United States Patent Application Publication US 2026/0240958 A1 - sequence listing, part 12

SEQ ID NO: 10349 - RNA, 8787 nt, synthetic construct
  source 1..8787: mol_type = other RNA
aggaaataagagagaaaagaagagtaagaagaaatataagagccaccatggcccctaagaagaagcgtaaagtgagccggatgaaccacgaccaggagttcgacccccctaaggtgtaccctcccgtccccgccgagaagagaaagcccatccgggtcctgagcctgttcgatggcatcgccaccggtctgctggtgctgaaggacctgggcatccaggtggataggtacattgcctccgaggtgtgcgaggactccatcaccgtgggaatggtgcgtcatcagggcaagatcatgtacgtgggcgacgtgcggagcgtgacacagaagcatatccaggagtggggccctttcgacctggtgatcggcggcagcccttgcaatgacctgagcatcgtgaacccagcccggaagggcctgtacgagggaaccggcagactgttcttcgagttttacagactgctgcacgacgcccggcctaaggaaggcgacgaccggcccttcttttggctgttcgagaatgtggtggccatgggagtcagcgacaagcgggatattagccggttcctggagagcaaccccgtgatgatcgatgccaaggaagtgagcgccgcccaccgggccagatacttctggggcaatctgcctggcatgaacagacccctggccagcaccgtgaacgacaagctggagctgcaggagtgcctggagcacggccggatcgccaagttcagcaaggtgagaaccatcaccacccgaagcaacagcatcaaacaaggcaaggaccagcactttcctgtgttcatgaacgagaaggaggacatcctgtggtgtaccgagatggagagagtgttcgggttcccagtccactacacagatgtcagcaacatgtctagactggccagacagagactgctgggaagaagctggtccgtccctgtgatcagacacctgttcgcccctctgaaggagtacttcgcctgcgtgagcagcggcaacagcaacgccaacagccggggccccagcttctctagcggcctggtgccactgtccctgagagggagccacatgggccccatggagatctacaaaaccgtgagcgcctggaagcggcagcctgtgcgcgtgctgagcctgtttcggaatatcgataaagtcctgaaaagcctgggattcctggagagcggctctggctccggcggtggcaccctgaagtacgtggaggatgtgacaaacgtggtcagacgggatgtggagaagtggggccccttcgatctggtgtacggcagcacccaacccctgggcagctcttgtgaccggtgccctggctggtacatgtttcagttccaccggatcctgcagtacgccctgccgagacaggagtcccagcggccattcttttggattttcatggacaacttgctgctgaccgaggatgaccaggaaactaccactcggttcctgcagaccgaagccgtgaccctgcaggacgtgagaggccgggactaccagaacgccatgcgggtgtggtccaacatccctggactgaaaagcaagcacgcacctctgacccctaaagaagaggagtacctgcaggcccaggtgcggagcagaagcaagctggacgcccctaaggtggatctgctggtgaagaattgcctcctgcccctgagagagtacttcaagtatttcagccagaatagtctgcccctgggaggcagcggcggcggccccaaggtgcccgtgagcttcgaggacgtgagcgtgtacttcaccaagaccgagtggaagctgctggacgtgcagcagaggatcctgtacaagaccgtgatgctggagaactaccaccacctggtgagcctgggctgcctgagcaccaagccccacctggtgagctggctggagcagggcgagggcccctggaccaccgacatctggaggacccccgccaccgccaagacccagaccgagggcggcggcccaagcagcggcgcccctcctcccagcggcggcaggcggcccaagcagcggcgcccctcctcccagcggcggcagcccagccggctccccaacctctaccgaggagggcacctctgagtccgccacccccgagagcggccctggcacctccaccgagcccagcgagggcagcgcacccggcagccctgccggcagccccacctccacagaggagggaaccagcaccgagcccagcgaaggcagcgccccaggcaccagcaccgagcctagtgagcaggagattaaacggatcaacaagatcagaagaagacttgtgaaagacagcaacaccaagaaggccggcaagacaggccccatgaaaaccctgctggttagagtgatgacacccgatctgagagagcggctggaaaacctgagaaagaagcctgaaaatatcccccagcccatcagcaatacatctagagccaacctgaataagctgctgaccgattacaccgaaatgaagaaggcgatcctgcatgtgtactgggaagagttccagaaggaccctgtgggcctgatgagccgggtggcccagcctgccagcaagaagatcgatcagaacaagctgaaacctgagatggacgagaagggcaacctgaccaccgccggctttgcctgctctcagtgtggccagcccctgttcgtgtacaagctggagcaggtgtctgagaagggcaaggcttacaccaactacttcggacggtgcaatgtggccgagcacgaaaagctgatcctgctggcccagctgaagcccgagaaggatagcgacgaagccgtgacatatagcctgggaaagtttgggcagagggccctggatttctacagcattcatgtgaccaaggagtccacccaccccgtgaagcccctggcccagatcgccggaaacagatacgcctccggacctgtgggaaaggccctgagcgacgcatgtatgggcacaatcgcctccttcctgtctaagtaccaggacatcatcatcgaacaccagaaggtggtgaagggcaaccagaagagactggagagcctgcgggagctggccggcaaggaaaacctggaataccctagcgtgaccctgccacctcagcctcacaccaaggagggcgttgatgcctacaacgaagtgatcgcccgggtgcgaatgtgggtgaacctgaacctgtggcagaagctgaagctaagcagagatgatgccaagcctctgctgagactgaagggattcccttcctttcctctggtcgagagacaggccaacgaagtggactggtgggacatggtgtgtaacgtgaagaagctgatcaacgagaaaaaggaggatggcaaggtgttttggcagaatctggctggctacaagagacaggaagccctgagaccatacctgagcagcgaggaagatcggaagaagggaaagaaattcgctcggtaccagctgggcgacctgctgctgcacctggaaaagaagcacggcgaggactggggaaaggtgtacgacgaggcctgggagcggattgacaagaaagtggaaggcctgagcaagcacatcaagctggaagaggaacggagaagcgaggacgcccagagcaaggccgccctgaccgactggctgcgggctaaggccagcttcgtgatcgagggcctgaaggaggccgacaaggacgagttctgcagatgcgagctgaagctgcagaagtggtacggggacctgcggggaaagcccttcgccatcgaagccgagaacagcatcctggacatcagcggcttcagcaagcagtacaactgtgccttcatctggcagaaggacggcgtgaagaagctgaacctgtacctgatcatcaactacttcaagggcggcaagctgcggttcaagaagatcaaacctgaagccttcgaagccaacagattctacaccgtgatcaacaaaaagagcggcgagatcgtgcccatggaggtgaacttcaacttcgacgaccccaacctgatcatcctgcctctggcctttggcaagagacagggcagagaattcatctggaacgacctgctgtccctggaaaccggcagcctgaagctggccaacggaagagtgatcgagaagacactgtacaacagaagaacccggcaggatgagcctgccctgttcgtggccctgaccttcgagcggcgggaggtcctggactcctccaatatcaaaccaatgaacctgatcggcgtggcaagaggcgaaaacatccccgccgtgatcgccctgaccgaccccgagggctgcccactgagccggtttaaggatagcctgggaaacccaacccacatcctgagaatcggcgagagctataaggagaagcagcggaccatccaggccaagaaggaggtggagcagcggagagccggcggctacagccggaagtacgccagcaaagccaagaatctggcagacgatatggtgagaaacaccgctagagatctgctgtactacgccgtgacccaggatgccatgctgatcttcgccaacctgagccggggcttcggccggcagggcaagcggaccttcatggccgagagacagtacacacggatggaggactggctgaccgccaagctggcctacgagggcctgagcaagacctacctgtccaagacactggcccagtacacctccaagacatgcagcaactgtgggtttaccatcaccagcgccgactacgacagggtgctggagaagctgaagaagacagcaacaggctggatgaccacaattaacggcaaggagctgaaggtggagggccagattacctactacaacagatacaagagacagaacgtagtcaaggacctgtccgtcgagctggatagactgagcgaagaatctgtgaacaacgacatctcctcctggacaaagggcagaagcggagaagctctgagcctcctgaagaaaagattctcccatagacccgtgcaggagaagttcgtgtgcctgaactgcggcttcgagacacacgcagccgagcaagccgccctgaacatcgccagatcctggctgttcctgcggagccaggagtacaagaaataccagacaaacaagacaaccggcaacaccgataagagagccttcgtcgagacctggcagtccttttaccggaagaagcttaaggaggtgtggaaacctgccgtgcggtctggcggatctggcggaggctccaccagccccaagaaaaagagaaaagtctaagctgccttctgcggggcttgccttctggccatgcccttcttctctcccttgcacctgtacctcttggtctttgaataaagcctgagtaggaaggctagcaaaaaaaaaaaaaaaaaaaaaaaaaaaaaaaaaaaaaaaaaaaaaaaaaaaaaaaaaaaaaaaaaaaaaaaaaaaaaaaagcccagccggctccccaacctctaccgaggagggcacctctgagtccgccacccccgagagcggccctggcacctccaccgagcccagcgagggcagcgcacccggcagccctgccggcagccccacctccacagaggagggaaccagcaccgagcccagcgaaggcagcgccccaggcaccagcaccgagcctagtgagcaggagattaaacggatcaacaagatcagaagaagacttgtgaaagacagcaacaccaagaaggccggcaagacaggccccatgaaaaccctgctggttagagtgatgacacccgatctgagagagcggctggaaaacctgagaaagaagcctgaaaatatcccccagcccatcagcaatacatctagagccaacctgaataagctgctgaccgattacaccgaaatgaagaaggcgatcctgcatgtgtactgggaagagttccagaaggaccctgtgggcctgatgagccgggtggcccagcctgccagcaagaagatcgatcagaacaagctgaaacctgagatggacgagaagggcaacctgaccaccgccggctttgcctgctctcagtgtggccagcccctgttcgtgtacaagctggagcaggtgtctgagaagggcaaggcttacaccaactacttcggacggtgcaatgtggccgagcacgaaaagctgatcctgctggcccagctgaagcccgagaaggatagcgacgaagccgtgacatatagcctgggaaagtttgggcagagggccctggatttctacagcattcatgtgaccaaggagtccacccaccccgtgaagcccctggcccagatcgccggaaacagatacgcctccggacctgtgggaaaggccctgagcgacgcatgtatgggcacaatcgcctccttcctgtctaagtaccaggacatcatcatcgaacaccagaaggtggtgaagggcaaccagaagagactggagagcctgcgggagctggccggcaaggaaaacctggaataccctagcgtgaccctgccacctcagcctcacaccaaggagggcgttgatgcctacaacgaagtgatcgcccgggtgcgaatgtgggtgaacctgaacctgtggcagaagctgaagctaagcagagatgatgccaagcctctgctgagactgaagggattcccttcctttcctctggtcgagagacaggccaacgaagtggactggtgggacatggtgtgtaacgtgaagaagctgatcaacgagaaaaaggaggatggcaaggtgttttggcagaatctggctggctacaagagacaggaagccctgagaccatacctgagcagcgaggaagatcggaagaagggaaagaaattcgctcggtaccagctgggcgacctgctgctgcacctggaaaagaagcacggcgaggactggggaaaggtgtacgacgaggcctgggagcggattgacaagaaagtggaaggcctgagcaagcacatcaagctggaagaggaacggagaagcgaggacgcccagagcaaggccgccctgaccgactggctgcgggctaaggccagcttcgtgatcgagggcctgaaggaggccgacaaggacgagttctgcagatgcgagctgaagctgcagaagtggtacggggacctgcggggaaagcccttcgccatcgaagccgagaacagcatcctggacatcagcggcttcagcaagcagtacaactgtgccttcatctggcagaaggacggcgtgaagaagctgaacctgtacctgatcatcaactacttcaagggcggcaagctgcggttcaagaagatcaaacctgaagccttcgaagccaacagattctacaccgtgatcaacaaaaagagcggcgagatcgtgcccatggaggtgaacttcaacttcgacgaccccaacctgatcatcctgcctctggcctttggcaagagacagggcagagaattcatctggaacgacctgctgtccctggaaaccggcagcctgaagctggccaacggaagagtgatcgagaagacactgtacaacagaagaacccggcaggatgagcctgccctgttcgtggccctgaccttcgagcggcgggaggtcctggactcctccaatatcaaaccaatgaacctgatcggcgtggcaagaggcgaaaacatccccgccgtgatcgccctgaccgaccccgagggctgcccactgagccggtttaaggatagcctgggaaacccaacccacatcctgagaatcggcgagagctataaggagaagcagcggaccatccaggccaagaaggaggtggagcagcggagagccggcggctacagccggaagtacgccagcaaagccaagaatctggcagacgatatggtgagaaacaccgctagagatctgctgtactacgccgtgacccaggatgccatgctgatcttcgccaacctgagccggggcttcggccggcagggcaagcggaccttcatggccgagagacagtacacacggatggaggactggctgaccgccaagctggcctacgagggcctgagcaagacctacctgtccaagacactggcccagtacacctccaagacatgcagcaactgtgggtttaccatcaccagcgccgactacgacagggtgctggagaagctgaagaagacagcaacaggctggatgaccacaattaacggcaaggagctgaaggtggagggccagattacctactacaacagatacaagagacagaacgtagtcaaggacctgtccgtcgagctggatagactgagcgaagaatctgtgaacaacgacatctcctcctggacaaagggcagaagcggagaagctctgagcctcctgaagaaaagattctcccatagacccgtgcaggagaagttcgtgtgcctgaactgcggcttcgagacacacgcagccgagcaagccgccctgaacatcgccagatcctggctgttcctgcggagccaggagtacaagaaataccagacaaacaagacaaccggcaacaccgataagagagccttcgtcgagacctggcagtccttttaccggaagaagcttaaggaggtgtggaaacctgccgtgcggtctggcggatctggcggaggctccaccagccccaagaaaaagagaaaagtctaagctgccttctgcggggcttgccttctggccatgcccttcttctctcccttgcacctgtacctcttggtctttgaataaagcctgagtaggaaggctagcaaaaaaaaaaaaaaaaaaaaaaaaaaaaaaaaaaaaaaaaaaaaaaaaaaaaaaaaaaaaaaaaaaaaaaaaaaaaaaaa

SEQ ID NO: 10350 - RNA, 8787 nt, synthetic construct
  source 1..8787: mol_type = other RNA
aggaaataagagagaaaagaagagtaagaagaaatataagagccaccatggcccctaagaagaagcgtaaagtgagccggatgaaccacgaccaggagttcgacccccctaaggtgtaccctcccgtccccgccgagaagagaaagcccatccgggtcctgagcctgttcgatggcatcgccaccggtctgctggtgctgaaggacctgggcatccaggtggataggtacattgcctccgaggtgtgcgaggactccatcaccgtgggaatggtgcgtcatcagggcaagatcatgtacgtgggcgacgtgcggagcgtgacacagaagcatatccaggagtggggccctttcgacctggtgatcggcggcagcccttgcaatgacctgagcatcgtgaacccagcccggaagggcctgtacgagggaaccggcagactgttcttcgagttttacagactgctgcacgacgcccggcctaaggaaggcgacgaccggcccttcttttggctgttcgagaatgtggtggccatgggagtcagcgacaagcgggatattagccggttcctggagagcaaccccgtgatgatcgatgccaaggaagtgagcgccgcccaccgggccagatacttctggggcaatctgcctggcatgaacagacccctggccagcaccgtgaacgacaagctggagctgcaggagtgcctggagcacggccggatcgccaagttcagcaaggtgagaaccatcaccacccgaagcaacagcatcaaacaaggcaaggaccagcactttcctgtgttcatgaacgagaaggaggacatcctgtggtgtaccgagatggagagagtgttcgggttcccagtccactacacagatgtcagcaacatgtctagactggccagacagagactgctgggaagaagctggtccgtccctgtgatcagacacctgttcgcccctctgaaggagtacttcgcctgcgtgagcagcggcaacagcaacgccaacagccggggccccagcttctctagcggcctggtgccactgtccctgagagggagccacatgggccccatggagatctacaaaaccgtgagcgcctggaagcggcagcctgtgcgcgtgctgagcctgtttcggaatatcgataaagtcctgaaaagcctgggattcctggagagcggctctggctccggcggtggcaccctgaagtacgtggaggatgtgacaaacgtggtcagacgggatgtggagaagtggggccccttcgatctggtgtacggcagcacccaacccctgggcagctcttgtgaccggtgccctggctggtacatgtttcagttccaccggatcctgcagtacgccctgccgagacaggagtcccagcggccattcttttggattttcatggacaacttgctgctgaccgaggatgaccaggaaactaccactcggttcctgcagaccgaagccgtgaccctgcaggacgtgagaggccgggactaccagaacgccatgcgggtgtggtccaacatccctggactgaaaagcaagcacgcacctctgacccctaaagaagaggagtacctgcaggcccaggtgcggagcagaagcaagctggacgcccctaaggtggatctgctggtgaagaattgcctcctgcccctgagagagtacttcaagtatttcagccagaatagtctgcccctgggaggcagcggcggcggcacccaggtgagcgtgaccttcgacgacgtggccgtgaccttcacccaggaggagtggaggcagctggaccccgcccagaggaccctgtaccaggaggtgatgctggagaactgcaggctgctggtgagcctgggctgccccgtgcccaggctggagctgatcttccagctggagcagggccagaagctgtggaccgtgaagaaggacctgagcaggagcacctgccccggcaagaggtgcaggggcggcccaagcagcggcgcccctcctcccagcggcggcaggcggcccaagcagcggcgcccctcctcccagcggcggcagcccagccggctccccaacctctaccgaggagggcacctctgagtccgccacccccgagagcggccctggcacctccaccgagcccagcgagggcagcgcacccggcagccctgccggcagccccacctccacagaggagggaaccagcaccgagcccagcgaaggcagcgccccaggcaccagcaccgagcctagtgagcaggagattaaacggatcaacaagatcagaagaagacttgtgaaagacagcaacaccaagaaggccggcaagacaggccccatgaaaaccctgctggttagagtgatgacacccgatctgagagagcggctggaaaacctgagaaagaagcctgaaaatatcccccagcccatcagcaatacatctagagccaacctgaataagctgctgaccgattacaccgaaatgaagaaggcgatcctgcatgtgtactgggaagagttccagaaggaccctgtgggcctgatgagccgggtggcccagcctgccagcaagaagatcgatcagaacaagctgaaacctgagatggacgagaagggcaacctgaccaccgccggctttgcctgctctcagtgtggccagcccctgttcgtgtacaagctggagcaggtgtctgagaagggcaaggcttacaccaactacttcggacggtgcaatgtggccgagcacgaaaagctgatcctgctggcccagctgaagcccgagaaggatagcgacgaagccgtgacatatagcctgggaaagtttgggcagagggccctggatttctacagcattcatgtgaccaaggagtccacccaccccgtgaagcccctggcccagatcgccggaaacagatacgcctccggacctgtgggaaaggccctgagcgacgcatgtatgggcacaatcgcctccttcctgtctaagtaccaggacatcatcatcgaacaccagaaggtggtgaagggcaaccagaagagactggagagcctgcgggagctggccggcaaggaaaacctggaataccctagcgtgaccctgccacctcagcctcacaccaaggagggcgttgatgcctacaacgaagtgatcgcccgggtgcgaatgtgggtgaacctgaacctgtggcagaagctgaagctaagcagagatgatgccaagcctctgctgagactgaagggattcccttcctttcctctggtcgagagacaggccaacgaagtggactggtgggacatggtgtgtaacgtgaagaagctgatcaacgagaaaaaggaggatggcaaggtgttttggcagaatctggctggctacaagagacaggaagccctgagaccatacctgagcagcgaggaagatcggaagaagggaaagaaattcgctcggtaccagctgggcgacctgctgctgcacctggaaaagaagcacggcgaggactggggaaaggtgtacgacgaggcctgggagcggattgacaagaaagtggaaggcctgagcaagcacatcaagctggaagaggaacggagaagcgaggacgcccagagcaaggccgccctgaccgactggctgcgggctaaggccagcttcgtgatcgagggcctgaaggaggccgacaaggacgagttctgcagatgcgagctgaagctgcagaagtggtacggggacctgcggggaaagcccttcgccatcgaagccgagaacagcatcctggacatcagcggcttcagcaagcagtacaactgtgccttcatctggcagaaggacggcgtgaagaagctgaacctgtacctgatcatcaactacttcaagggcggcaagctgcggttcaagaagatcaaacctgaagccttcgaagccaacagattctacaccgtgatcaacaaaaagagcggcgagatcgtgcccatggaggtgaacttcaacttcgacgaccccaacctgatcatcctgcctctggcctttggcaagagacagggcagagaattcatctggaacgacctgctgtccctggaaaccggcagcctgaagctggccaacggaagagtgatcgagaagacactgtacaacagaagaacccggcaggatgagcctgccctgttcgtggccctgaccttcgagcggcgggaggtcctggactcctccaatatcaaaccaatgaacctgatcggcgtggcaagaggcgaaaacatccccgccgtgatcgccctgaccgaccccgagggctgcccactgagccggtttaaggatagcctgggaaacccaacccacatcctgagaatcggcgagagctataaggagaagcagcggaccatccaggccaagaaggaggtggagcagcggagagccggcggctacagccggaagtacgccagcaaagccaagaatctggcagacgatatggtgagaaacaccgctagagatctgctgtactacgccgtgacccaggatgccatgctgatcttcgccaacctgagccggggcttcggccggcagggcaagcggaccttcatggccgagagacagtacacacggatggaggactggctgaccgccaagctggcctacgagggcctgagcaagacctacctgtccaagacactggcccagtacacctccaagacatgcagcaactgtgggtttaccatcaccagcgccgactacgacagggtgctggagaagctgaagaagacagcaacaggctggatgaccacaattaacggcaaggagctgaaggtggagggccagattacctactacaacagatacaagagacagaacgtagtcaaggacctgtccgtcgagctggatagactgagcgaagaatctgtgaacaacgacatctcctcctggacaaagggcagaagcggagaagctctgagcctcctgaagaaaagattctcccatagacccgtgcaggagaagttcgtgtgcctgaactgcggcttcgagacacacgcagccgagcaagccgccctgaacatcgccagatcctggctgttcctgcggagccaggagtacaagaaataccagacaaacaagacaaccggcaacaccgataagagagccttcgtcgagacctggcagtccttttaccggaagaagcttaaggaggtgtggaaacctgccgtgcggtctggcggatctggcggaggctccaccagccccaagaaaaagagaaaagtctaagctgccttctgcggggcttgccttctggccatgcccttcttctctcccttgcacctgtacctcttggtctttgaataaagcctgagtaggaaggctagcaaaaaaaaaaaaaaaaaaaaaaaaaaaaaaaaaaaaaaaaaaaaaaaaaaaaaaaaaaaaaaaaaaaaaaaaaaaaaaaagcccagccggctccccaacctctaccgaggagggcacctctgagtccgccacccccgagagcggccctggcacctccaccgagcccagcgagggcagcgcacccggcagccctgccggcagccccacctccacagaggagggaaccagcaccgagcccagcgaaggcagcgccccaggcaccagcaccgagcctagtgagcaggagattaaacggatcaacaagatcagaagaagacttgtgaaagacagcaacaccaagaaggccggcaagacaggccccatgaaaaccctgctggttagagtgatgacacccgatctgagagagcggctggaaaacctgagaaagaagcctgaaaatatcccccagcccatcagcaatacatctagagccaacctgaataagctgctgaccgattacaccgaaatgaagaaggcgatcctgcatgtgtactgggaagagttccagaaggaccctgtgggcctgatgagccgggtggcccagcctgccagcaagaagatcgatcagaacaagctgaaacctgagatggacgagaagggcaacctgaccaccgccggctttgcctgctctcagtgtggccagcccctgttcgtgtacaagctggagcaggtgtctgagaagggcaaggcttacaccaactacttcggacggtgcaatgtggccgagcacgaaaagctgatcctgctggcccagctgaagcccgagaaggatagcgacgaagccgtgacatatagcctgggaaagtttgggcagagggccctggatttctacagcattcatgtgaccaaggagtccacccaccccgtgaagcccctggcccagatcgccggaaacagatacgcctccggacctgtgggaaaggccctgagcgacgcatgtatgggcacaatcgcctccttcctgtctaagtaccaggacatcatcatcgaacaccagaaggtggtgaagggcaaccagaagagactggagagcctgcgggagctggccggcaaggaaaacctggaataccctagcgtgaccctgccacctcagcctcacaccaaggagggcgttgatgcctacaacgaagtgatcgcccgggtgcgaatgtgggtgaacctgaacctgtggcagaagctgaagctaagcagagatgatgccaagcctctgctgagactgaagggattcccttcctttcctctggtcgagagacaggccaacgaagtggactggtgggacatggtgtgtaacgtgaagaagctgatcaacgagaaaaaggaggatggcaaggtgttttggcagaatctggctggctacaagagacaggaagccctgagaccatacctgagcagcgaggaagatcggaagaagggaaagaaattcgctcggtaccagctgggcgacctgctgctgcacctggaaaagaagcacggcgaggactggggaaaggtgtacgacgaggcctgggagcggattgacaagaaagtggaaggcctgagcaagcacatcaagctggaagaggaacggagaagcgaggacgcccagagcaaggccgccctgaccgactggctgcgggctaaggccagcttcgtgatcgagggcctgaaggaggccgacaaggacgagttctgcagatgcgagctgaagctgcagaagtggtacggggacctgcggggaaagcccttcgccatcgaagccgagaacagcatcctggacatcagcggcttcagcaagcagtacaactgtgccttcatctggcagaaggacggcgtgaagaagctgaacctgtacctgatcatcaactacttcaagggcggcaagctgcggttcaagaagatcaaacctgaagccttcgaagccaacagattctacaccgtgatcaacaaaaagagcggcgagatcgtgcccatggaggtgaacttcaacttcgacgaccccaacctgatcatcctgcctctggcctttggcaagagacagggcagagaattcatctggaacgacctgctgtccctggaaaccggcagcctgaagctggccaacggaagagtgatcgagaagacactgtacaacagaagaacccggcaggatgagcctgccctgttcgtggccctgaccttcgagcggcgggaggtcctggactcctccaatatcaaaccaatgaacctgatcggcgtggcaagaggcgaaaacatccccgccgtgatcgccctgaccgaccccgagggctgcccactgagccggtttaaggatagcctgggaaacccaacccacatcctgagaatcggcgagagctataaggagaagcagcggaccatccaggccaagaaggaggtggagcagcggagagccggcggctacagccggaagtacgccagcaaagccaagaatctggcagacgatatggtgagaaacaccgctagagatctgctgtactacgccgtgacccaggatgccatgctgatcttcgccaacctgagccggggcttcggccggcagggcaagcggaccttcatggccgagagacagtacacacggatggaggactggctgaccgccaagctggcctacgagggcctgagcaagacctacctgtccaagacactggcccagtacacctccaagacatgcagcaactgtgggtttaccatcaccagcgccgactacgacagggtgctggagaagctgaagaagacagcaacaggctggatgaccacaattaacggcaaggagctgaaggtggagggccagattacctactacaacagatacaagagacagaacgtagtcaaggacctgtccgtcgagctggatagactgagcgaagaatctgtgaacaacgacatctcctcctggacaaagggcagaagcggagaagctctgagcctcctgaagaaaagattctcccatagacccgtgcaggagaagttcgtgtgcctgaactgcggcttcgagacacacgcagccgagcaagccgccctgaacatcgccagatcctggctgttcctgcggagccaggagtacaagaaataccagacaaacaagacaaccggcaacaccgataagagagccttcgtcgagacctggcagtccttttaccggaagaagcttaaggaggtgtggaaacctgccgtgcggtctggcggatctggcggaggctccaccagccccaagaaaaagagaaaagtctaagctgccttctgcggggcttgccttctggccatgcccttcttctctcccttgcacctgtacctcttggtctttgaataaagcctgagtaggaaggctagcaaaaaaaaaaaaaaaaaaaaaaaaaaaaaaaaaaaaaaaaaaaaaaaaaaaaaaaaaaaaaaaaaaaaaaaaaaaaaaaa

SEQ ID NO: 10351 - RNA, 8787 nt, synthetic construct
  source 1..8787: mol_type = other RNA
aggaaataagagagaaaagaagagtaagaagaaatataagagccaccatggcccctaagaagaagcgtaaagtgagccggatgaaccacgaccaggagttcgacccccctaaggtgtaccctcccgtccccgccgagaagagaaagcccatccgggtcctgagcctgttcgatggcatcgccaccggtctgctggtgctgaaggacctgggcatccaggtggataggtacattgcctccgaggtgtgcgaggactccatcaccgtgggaatggtgcgtcatcagggcaagatcatgtacgtgggcgacgtgcggagcgtgacacagaagcatatccaggagtggggccctttcgacctggtgatcggcggcagcccttgcaatgacctgagcatcgtgaacccagcccggaagggcctgtacgagggaaccggcagactgttcttcgagttttacagactgctgcacgacgcccggcctaaggaaggcgacgaccggcccttcttttggctgttcgagaatgtggtggccatgggagtcagcgacaagcgggatattagccggttcctggagagcaaccccgtgatgatcgatgccaaggaagtgagcgccgcccaccgggccagatacttctggggcaatctgcctggcatgaacagacccctggccagcaccgtgaacgacaagctggagctgcaggagtgcctggagcacggccggatcgccaagttcagcaaggtgagaaccatcaccacccgaagcaacagcatcaaacaaggcaaggaccagcactttcctgtgttcatgaacgagaaggaggacatcctgtggtgtaccgagatggagagagtgttcgggttcccagtccactacacagatgtcagcaacatgtctagactggccagacagagactgctgggaagaagctggtccgtccctgtgatcagacacctgttcgcccctctgaaggagtacttcgcctgcgtgagcagcggcaacagcaacgccaacagccggggccccagcttctctagcggcctggtgccactgtccctgagagggagccacatgggccccatggagatctacaaaaccgtgagcgcctggaagcggcagcctgtgcgcgtgctgagcctgtttcggaatatcgataaagtcctgaaaagcctgggattcctggagagcggctctggctccggcggtggcaccctgaagtacgtggaggatgtgacaaacgtggtcagacgggatgtggagaagtggggccccttcgatctggtgtacggcagcacccaacccctgggcagctcttgtgaccggtgccctggctggtacatgtttcagttccaccggatcctgcagtacgccctgccgagacaggagtcccagcggccattcttttggattttcatggacaacttgctgctgaccgaggatgaccaggaaactaccactcggttcctgcagaccgaagccgtgaccctgcaggacgtgagaggccgggactaccagaacgccatgcgggtgtggtccaacatccctggactgaaaagcaagcacgcacctctgacccctaaagaagaggagtacctgcaggcccaggtgcggagcagaagcaagctggacgcccctaaggtggatctgctggtgaagaattgcctcctgcccctgagagagtacttcaagtatttcagccagaatagtctgcccctgggaggcagcggcggcggccaggcccaggagaccctgaccttcgaggacgtggccgtggacttcacctgggaggagtggcagctgctggcccccccccagaaggacctgtacagggacgtgatgctggagaactacagcaacctgctgagcgtgggcttccaggccagcaagcccaacgtgctgagcaagctgggccagggcgagccctggaccatggaggacgagatccactgccagaccaggagcgagatctggaaggtgggcggcccaagcagcggcgcccctcctcccagcggcggcaggcggcccaagcagcggcgcccctcctcccagcggcggcagcccagccggctccccaacctctaccgaggagggcacctctgagtccgccacccccgagagcggccctggcacctccaccgagcccagcgagggcagcgcacccggcagccctgccggcagccccacctccacagaggagggaaccagcaccgagcccagcgaaggcagcgccccaggcaccagcaccgagcctagtgagcaggagattaaacggatcaacaagatcagaagaagacttgtgaaagacagcaacaccaagaaggccggcaagacaggccccatgaaaaccctgctggttagagtgatgacacccgatctgagagagcggctggaaaacctgagaaagaagcctgaaaatatcccccagcccatcagcaatacatctagagccaacctgaataagctgctgaccgattacaccgaaatgaagaaggcgatcctgcatgtgtactgggaagagttccagaaggaccctgtgggcctgatgagccgggtggcccagcctgccagcaagaagatcgatcagaacaagctgaaacctgagatggacgagaagggcaacctgaccaccgccggctttgcctgctctcagtgtggccagcccctgttcgtgtacaagctggagcaggtgtctgagaagggcaaggcttacaccaactacttcggacggtgcaatgtggccgagcacgaaaagctgatcctgctggcccagctgaagcccgagaaggatagcgacgaagccgtgacatatagcctgggaaagtttgggcagagggccctggatttctacagcattcatgtgaccaaggagtccacccaccccgtgaagcccctggcccagatcgccggaaacagatacgcctccggacctgtgggaaaggccctgagcgacgcatgtatgggcacaatcgcctccttcctgtctaagtaccaggacatcatcatcgaacaccagaaggtggtgaagggcaaccagaagagactggagagcctgcgggagctggccggcaaggaaaacctggaataccctagcgtgaccctgccacctcagcctcacaccaaggagggcgttgatgcctacaacgaagtgatcgcccgggtgcgaatgtgggtgaacctgaacctgtggcagaagctgaagctaagcagagatgatgccaagcctctgctgagactgaagggattcccttcctttcctctggtcgagagacaggccaacgaagtggactggtgggacatggtgtgtaacgtgaagaagctgatcaacgagaaaaaggaggatggcaaggtgttttggcagaatctggctggctacaagagacaggaagccctgagaccatacctgagcagcgaggaagatcggaagaagggaaagaaattcgctcggtaccagctgggcgacctgctgctgcacctggaaaagaagcacggcgaggactggggaaaggtgtacgacgaggcctgggagcggattgacaagaaagtggaaggcctgagcaagcacatcaagctggaagaggaacggagaagcgaggacgcccagagcaaggccgccctgaccgactggctgcgggctaaggccagcttcgtgatcgagggcctgaaggaggccgacaaggacgagttctgcagatgcgagctgaagctgcagaagtggtacggggacctgcggggaaagcccttcgccatcgaagccgagaacagcatcctggacatcagcggcttcagcaagcagtacaactgtgccttcatctggcagaaggacggcgtgaagaagctgaacctgtacctgatcatcaactacttcaagggcggcaagctgcggttcaagaagatcaaacctgaagccttcgaagccaacagattctacaccgtgatcaacaaaaagagcggcgagatcgtgcccatggaggtgaacttcaacttcgacgaccccaacctgatcatcctgcctctggcctttggcaagagacagggcagagaattcatctggaacgacctgctgtccctggaaaccggcagcctgaagctggccaacggaagagtgatcgagaagacactgtacaacagaagaacccggcaggatgagcctgccctgttcgtggccctgaccttcgagcggcgggaggtcctggactcctccaatatcaaaccaatgaacctgatcggcgtggcaagaggcgaaaacatccccgccgtgatcgccctgaccgaccccgagggctgcccactgagccggtttaaggatagcctgggaaacccaacccacatcctgagaatcggcgagagctataaggagaagcagcggaccatccaggccaagaaggaggtggagcagcggagagccggcggctacagccggaagtacgccagcaaagccaagaatctggcagacgatatggtgagaaacaccgctagagatctgctgtactacgccgtgacccaggatgccatgctgatcttcgccaacctgagccggggcttcggccggcagggcaagcggaccttcatggccgagagacagtacacacggatggaggactggctgaccgccaagctggcctacgagggcctgagcaagacctacctgtccaagacactggcccagtacacctccaagacatgcagcaactgtgggtttaccatcaccagcgccgactacgacagggtgctggagaagctgaagaagacagcaacaggctggatgaccacaattaacggcaaggagctgaaggtggagggccagattacctactacaacagatacaagagacagaacgtagtcaaggacctgtccgtcgagctggatagactgagcgaagaatctgtgaacaacgacatctcctcctggacaaagggcagaagcggagaagctctgagcctcctgaagaaaagattctcccatagacccgtgcaggagaagttcgtgtgcctgaactgcggcttcgagacacacgcagccgagcaagccgccctgaacatcgccagatcctggctgttcctgcggagccaggagtacaagaaataccagacaaacaagacaaccggcaacaccgataagagagccttcgtcgagacctggcagtccttttaccggaagaagcttaaggaggtgtggaaacctgccgtgcggtctggcggatctggcggaggctccaccagccccaagaaaaagagaaaagtctaagctgccttctgcggggcttgccttctggccatgcccttcttctctcccttgcacctgtacctcttggtctttgaataaagcctgagtaggaaggctagcaaaaaaaaaaaaaaaaaaaaaaaaaaaaaaaaaaaaaaaaaaaaaaaaaaaaaaaaaaaaaaaaaaaaaaaaaaaaaaaagcccagccggctccccaacctctaccgaggagggcacctctgagtccgccacccccgagagcggccctggcacctccaccgagcccagcgagggcagcgcacccggcagccctgccggcagccccacctccacagaggagggaaccagcaccgagcccagcgaaggcagcgccccaggcaccagcaccgagcctagtgagcaggagattaaacggatcaacaagatcagaagaagacttgtgaaagacagcaacaccaagaaggccggcaagacaggccccatgaaaaccctgctggttagagtgatgacacccgatctgagagagcggctggaaaacctgagaaagaagcctgaaaatatcccccagcccatcagcaatacatctagagccaacctgaataagctgctgaccgattacaccgaaatgaagaaggcgatcctgcatgtgtactgggaagagttccagaaggaccctgtgggcctgatgagccgggtggcccagcctgccagcaagaagatcgatcagaacaagctgaaacctgagatggacgagaagggcaacctgaccaccgccggctttgcctgctctcagtgtggccagcccctgttcgtgtacaagctggagcaggtgtctgagaagggcaaggcttacaccaactacttcggacggtgcaatgtggccgagcacgaaaagctgatcctgctggcccagctgaagcccgagaaggatagcgacgaagccgtgacatatagcctgggaaagtttgggcagagggccctggatttctacagcattcatgtgaccaaggagtccacccaccccgtgaagcccctggcccagatcgccggaaacagatacgcctccggacctgtgggaaaggccctgagcgacgcatgtatgggcacaatcgcctccttcctgtctaagtaccaggacatcatcatcgaacaccagaaggtggtgaagggcaaccagaagagactggagagcctgcgggagctggccggcaaggaaaacctggaataccctagcgtgaccctgccacctcagcctcacaccaaggagggcgttgatgcctacaacgaagtgatcgcccgggtgcgaatgtgggtgaacctgaacctgtggcagaagctgaagctaagcagagatgatgccaagcctctgctgagactgaagggattcccttcctttcctctggtcgagagacaggccaacgaagtggactggtgggacatggtgtgtaacgtgaagaagctgatcaacgagaaaaaggaggatggcaaggtgttttggcagaatctggctggctacaagagacaggaagccctgagaccatacctgagcagcgaggaagatcggaagaagggaaagaaattcgctcggtaccagctgggcgacctgctgctgcacctggaaaagaagcacggcgaggactggggaaaggtgtacgacgaggcctgggagcggattgacaagaaagtggaaggcctgagcaagcacatcaagctggaagaggaacggagaagcgaggacgcccagagcaaggccgccctgaccgactggctgcgggctaaggccagcttcgtgatcgagggcctgaaggaggccgacaaggacgagttctgcagatgcgagctgaagctgcagaagtggtacggggacctgcggggaaagcccttcgccatcgaagccgagaacagcatcctggacatcagcggcttcagcaagcagtacaactgtgccttcatctggcagaaggacggcgtgaagaagctgaacctgtacctgatcatcaactacttcaagggcggcaagctgcggttcaagaagatcaaacctgaagccttcgaagccaacagattctacaccgtgatcaacaaaaagagcggcgagatcgtgcccatggaggtgaacttcaacttcgacgaccccaacctgatcatcctgcctctggcctttggcaagagacagggcagagaattcatctggaacgacctgctgtccctggaaaccggcagcctgaagctggccaacggaagagtgatcgagaagacactgtacaacagaagaacccggcaggatgagcctgccctgttcgtggccctgaccttcgagcggcgggaggtcctggactcctccaatatcaaaccaatgaacctgatcggcgtggcaagaggcgaaaacatccccgccgtgatcgccctgaccgaccccgagggctgcccactgagccggtttaaggatagcctgggaaacccaacccacatcctgagaatcggcgagagctataaggagaagcagcggaccatccaggccaagaaggaggtggagcagcggagagccggcggctacagccggaagtacgccagcaaagccaagaatctggcagacgatatggtgagaaacaccgctagagatctgctgtactacgccgtgacccaggatgccatgctgatcttcgccaacctgagccggggcttcggccggcagggcaagcggaccttcatggccgagagacagtacacacggatggaggactggctgaccgccaagctggcctacgagggcctgagcaagacctacctgtccaagacactggcccagtacacctccaagacatgcagcaactgtgggtttaccatcaccagcgccgactacgacagggtgctggagaagctgaagaagacagcaacaggctggatgaccacaattaacggcaaggagctgaaggtggagggccagattacctactacaacagatacaagagacagaacgtagtcaaggacctgtccgtcgagctggatagactgagcgaagaatctgtgaacaacgacatctcctcctggacaaagggcagaagcggagaagctctgagcctcctgaagaaaagattctcccatagacccgtgcaggagaagttcgtgtgcctgaactgcggcttcgagacacacgcagccgagcaagccgccctgaacatcgccagatcctggctgttcctgcggagccaggagtacaagaaataccagacaaacaagacaaccggcaacaccgataagagagccttcgtcgagacctggcagtccttttaccggaagaagcttaaggaggtgtggaaacctgccgtgcggtctggcggatctggcggaggctccaccagccccaagaaaaagagaaaagtctaagctgccttctgcggggcttgccttctggccatgcccttcttctctcccttgcacctgtacctcttggtctttgaataaagcctgagtaggaaggctagcaaaaaaaaaaaaaaaaaaaaaaaaaaaaaaaaaaaaaaaaaaaaaaaaaaaaaaaaaaaaaaaaaaaaaaaaaaaaaaaa

SEQ ID NO: 10352 - RNA, 8787 nt, synthetic construct
  source 1..8787: mol_type = other RNA
aggaaataagagagaaaagaagagtaagaagaaatataagagccaccatggcccctaagaagaagcgtaaagtgagccggatgaaccacgaccaggagttcgacccccctaaggtgtaccctcccgtccccgccgagaagagaaagcccatccgggtcctgagcctgttcgatggcatcgccaccggtctgctggtgctgaaggacctgggcatccaggtggataggtacattgcctccgaggtgtgcgaggactccatcaccgtgggaatggtgcgtcatcagggcaagatcatgtacgtgggcgacgtgcggagcgtgacacagaagcatatccaggagtggggccctttcgacctggtgatcggcggcagcccttgcaatgacctgagcatcgtgaacccagcccggaagggcctgtacgagggaaccggcagactgttcttcgagttttacagactgctgcacgacgcccggcctaaggaaggcgacgaccggcccttcttttggctgttcgagaatgtggtggccatgggagtcagcgacaagcgggatattagccggttcctggagagcaaccccgtgatgatcgatgccaaggaagtgagcgccgcccaccgggccagatacttctggggcaatctgcctggcatgaacagacccctggccagcaccgtgaacgacaagctggagctgcaggagtgcctggagcacggccggatcgccaagttcagcaaggtgagaaccatcaccacccgaagcaacagcatcaaacaaggcaaggaccagcactttcctgtgttcatgaacgagaaggaggacatcctgtggtgtaccgagatggagagagtgttcgggttcccagtccactacacagatgtcagcaacatgtctagactggccagacagagactgctgggaagaagctggtccgtccctgtgatcagacacctgttcgcccctctgaaggagtacttcgcctgcgtgagcagcggcaacagcaacgccaacagccggggccccagcttctctagcggcctggtgccactgtccctgagagggagccacatgggccccatggagatctacaaaaccgtgagcgcctggaagcggcagcctgtgcgcgtgctgagcctgtttcggaatatcgataaagtcctgaaaagcctgggattcctggagagcggctctggctccggcggtggcaccctgaagtacgtggaggatgtgacaaacgtggtcagacgggatgtggagaagtggggccccttcgatctggtgtacggcagcacccaacccctgggcagctcttgtgaccggtgccctggctggtacatgtttcagttccaccggatcctgcagtacgccctgccgagacaggagtcccagcggccattcttttggattttcatggacaacttgctgctgaccgaggatgaccaggaaactaccactcggttcctgcagaccgaagccgtgaccctgcaggacgtgagaggccgggactaccagaacgccatgcgggtgtggtccaacatccctggactgaaaagcaagcacgcacctctgacccctaaagaagaggagtacctgcaggcccaggtgcggagcagaagcaagctggacgcccctaaggtggatctgctggtgaagaattgcctcctgcccctgagagagtacttcaagtatttcagccagaatagtctgcccctgggaggcagcggcggcggcccccagggcagcctgaccttcagggacgtggccatcgagttcagccaggaggagtggaagtgcctggaccccatccagaaggccctgtacagggacgtgatgctggagaactacaggaacctgggcttcctgggcctgtgcctgcccgacctgaacatcatcagcatgctggaggagggcaaggagccctggaccgtggtgagccaggtgaagatcgccaggaaccccaactggggcgagtgcggcggcccaagcagcggcgcccctcctcccagcggcggcaggcggcccaagcagcggcgcccctcctcccagcggcggcagcccagccggctccccaacctctaccgaggagggcacctctgagtccgccacccccgagagcggccctggcacctccaccgagcccagcgagggcagcgcacccggcagccctgccggcagccccacctccacagaggagggaaccagcaccgagcccagcgaaggcagcgccccaggcaccagcaccgagcctagtgagcaggagattaaacggatcaacaagatcagaagaagacttgtgaaagacagcaacaccaagaaggccggcaagacaggccccatgaaaaccctgctggttagagtgatgacacccgatctgagagagcggctggaaaacctgagaaagaagcctgaaaatatcccccagcccatcagcaatacatctagagccaacctgaataagctgctgaccgattacaccgaaatgaagaaggcgatcctgcatgtgtactgggaagagttccagaaggaccctgtgggcctgatgagccgggtggcccagcctgccagcaagaagatcgatcagaacaagctgaaacctgagatggacgagaagggcaacctgaccaccgccggctttgcctgctctcagtgtggccagcccctgttcgtgtacaagctggagcaggtgtctgagaagggcaaggcttacaccaactacttcggacggtgcaatgtggccgagcacgaaaagctgatcctgctggcccagctgaagcccgagaaggatagcgacgaagccgtgacatatagcctgggaaagtttgggcagagggccctggatttctacagcattcatgtgaccaaggagtccacccaccccgtgaagcccctggcccagatcgccggaaacagatacgcctccggacctgtgggaaaggccctgagcgacgcatgtatgggcacaatcgcctccttcctgtctaagtaccaggacatcatcatcgaacaccagaaggtggtgaagggcaaccagaagagactggagagcctgcgggagctggccggcaaggaaaacctggaataccctagcgtgaccctgccacctcagcctcacaccaaggagggcgttgatgcctacaacgaagtgatcgcccgggtgcgaatgtgggtgaacctgaacctgtggcagaagctgaagctaagcagagatgatgccaagcctctgctgagactgaagggattcccttcctttcctctggtcgagagacaggccaacgaagtggactggtgggacatggtgtgtaacgtgaagaagctgatcaacgagaaaaaggaggatggcaaggtgttttggcagaatctggctggctacaagagacaggaagccctgagaccatacctgagcagcgaggaagatcggaagaagggaaagaaattcgctcggtaccagctgggcgacctgctgctgcacctggaaaagaagcacggcgaggactggggaaaggtgtacgacgaggcctgggagcggattgacaagaaagtggaaggcctgagcaagcacatcaagctggaagaggaacggagaagcgaggacgcccagagcaaggccgccctgaccgactggctgcgggctaaggccagcttcgtgatcgagggcctgaaggaggccgacaaggacgagttctgcagatgcgagctgaagctgcagaagtggtacggggacctgcggggaaagcccttcgccatcgaagccgagaacagcatcctggacatcagcggcttcagcaagcagtacaactgtgccttcatctggcagaaggacggcgtgaagaagctgaacctgtacctgatcatcaactacttcaagggcggcaagctgcggttcaagaagatcaaacctgaagccttcgaagccaacagattctacaccgtgatcaacaaaaagagcggcgagatcgtgcccatggaggtgaacttcaacttcgacgaccccaacctgatcatcctgcctctggcctttggcaagagacagggcagagaattcatctggaacgacctgctgtccctggaaaccggcagcctgaagctggccaacggaagagtgatcgagaagacactgtacaacagaagaacccggcaggatgagcctgccctgttcgtggccctgaccttcgagcggcgggaggtcctggactcctccaatatcaaaccaatgaacctgatcggcgtggcaagaggcgaaaacatccccgccgtgatcgccctgaccgaccccgagggctgcccactgagccggtttaaggatagcctgggaaacccaacccacatcctgagaatcggcgagagctataaggagaagcagcggaccatccaggccaagaaggaggtggagcagcggagagccggcggctacagccggaagtacgccagcaaagccaagaatctggcagacgatatggtgagaaacaccgctagagatctgctgtactacgccgtgacccaggatgccatgctgatcttcgccaacctgagccggggcttcggccggcagggcaagcggaccttcatggccgagagacagtacacacggatggaggactggctgaccgccaagctggcctacgagggcctgagcaagacctacctgtccaagacactggcccagtacacctccaagacatgcagcaactgtgggtttaccatcaccagcgccgactacgacagggtgctggagaagctgaagaagacagcaacaggctggatgaccacaattaacggcaaggagctgaaggtggagggccagattacctactacaacagatacaagagacagaacgtagtcaaggacctgtccgtcgagctggatagactgagcgaagaatctgtgaacaacgacatctcctcctggacaaagggcagaagcggagaagctctgagcctcctgaagaaaagattctcccatagacccgtgcaggagaagttcgtgtgcctgaactgcggcttcgagacacacgcagccgagcaagccgccctgaacatcgccagatcctggctgttcctgcggagccaggagtacaagaaataccagacaaacaagacaaccggcaacaccgataagagagccttcgtcgagacctggcagtccttttaccggaagaagcttaaggaggtgtggaaacctgccgtgcggtctggcggatctggcggaggctccaccagccccaagaaaaagagaaaagtctaagctgccttctgcggggcttgccttctggccatgcccttcttctctcccttgcacctgtacctcttggtctttgaataaagcctgagtaggaaggctagcaaaaaaaaaaaaaaaaaaaaaaaaaaaaaaaaaaaaaaaaaaaaaaaaaaaaaaaaaaaaaaaaaaaaaaaaaaaaaaaagcccagccggctccccaacctctaccgaggagggcacctctgagtccgccacccccgagagcggccctggcacctccaccgagcccagcgagggcagcgcacccggcagccctgccggcagccccacctccacagaggagggaaccagcaccgagcccagcgaaggcagcgccccaggcaccagcaccgagcctagtgagcaggagattaaacggatcaacaagatcagaagaagacttgtgaaagacagcaacaccaagaaggccggcaagacaggccccatgaaaaccctgctggttagagtgatgacacccgatctgagagagcggctggaaaacctgagaaagaagcctgaaaatatcccccagcccatcagcaatacatctagagccaacctgaataagctgctgaccgattacaccgaaatgaagaaggcgatcctgcatgtgtactgggaagagttccagaaggaccctgtgggcctgatgagccgggtggcccagcctgccagcaagaagatcgatcagaacaagctgaaacctgagatggacgagaagggcaacctgaccaccgccggctttgcctgctctcagtgtggccagcccctgttcgtgtacaagctggagcaggtgtctgagaagggcaaggcttacaccaactacttcggacggtgcaatgtggccgagcacgaaaagctgatcctgctggcccagctgaagcccgagaaggatagcgacgaagccgtgacatatagcctgggaaagtttgggcagagggccctggatttctacagcattcatgtgaccaaggagtccacccaccccgtgaagcccctggcccagatcgccggaaacagatacgcctccggacctgtgggaaaggccctgagcgacgcatgtatgggcacaatcgcctccttcctgtctaagtaccaggacatcatcatcgaacaccagaaggtggtgaagggcaaccagaagagactggagagcctgcgggagctggccggcaaggaaaacctggaataccctagcgtgaccctgccacctcagcctcacaccaaggagggcgttgatgcctacaacgaagtgatcgcccgggtgcgaatgtgggtgaacctgaacctgtggcagaagctgaagctaagcagagatgatgccaagcctctgctgagactgaagggattcccttcctttcctctggtcgagagacaggccaacgaagtggactggtgggacatggtgtgtaacgtgaagaagctgatcaacgagaaaaaggaggatggcaaggtgttttggcagaatctggctggctacaagagacaggaagccctgagaccatacctgagcagcgaggaagatcggaagaagggaaagaaattcgctcggtaccagctgggcgacctgctgctgcacctggaaaagaagcacggcgaggactggggaaaggtgtacgacgaggcctgggagcggattgacaagaaagtggaaggcctgagcaagcacatcaagctggaagaggaacggagaagcgaggacgcccagagcaaggccgccctgaccgactggctgcgggctaaggccagcttcgtgatcgagggcctgaaggaggccgacaaggacgagttctgcagatgcgagctgaagctgcagaagtggtacggggacctgcggggaaagcccttcgccatcgaagccgagaacagcatcctggacatcagcggcttcagcaagcagtacaactgtgccttcatctggcagaaggacggcgtgaagaagctgaacctgtacctgatcatcaactacttcaagggcggcaagctgcggttcaagaagatcaaacctgaagccttcgaagccaacagattctacaccgtgatcaacaaaaagagcggcgagatcgtgcccatggaggtgaacttcaacttcgacgaccccaacctgatcatcctgcctctggcctttggcaagagacagggcagagaattcatctggaacgacctgctgtccctggaaaccggcagcctgaagctggccaacggaagagtgatcgagaagacactgtacaacagaagaacccggcaggatgagcctgccctgttcgtggccctgaccttcgagcggcgggaggtcctggactcctccaatatcaaaccaatgaacctgatcggcgtggcaagaggcgaaaacatccccgccgtgatcgccctgaccgaccccgagggctgcccactgagccggtttaaggatagcctgggaaacccaacccacatcctgagaatcggcgagagctataaggagaagcagcggaccatccaggccaagaaggaggtggagcagcggagagccggcggctacagccggaagtacgccagcaaagccaagaatctggcagacgatatggtgagaaacaccgctagagatctgctgtactacgccgtgacccaggatgccatgctgatcttcgccaacctgagccggggcttcggccggcagggcaagcggaccttcatggccgagagacagtacacacggatggaggactggctgaccgccaagctggcctacgagggcctgagcaagacctacctgtccaagacactggcccagtacacctccaagacatgcagcaactgtgggtttaccatcaccagcgccgactacgacagggtgctggagaagctgaagaagacagcaacaggctggatgaccacaattaacggcaaggagctgaaggtggagggccagattacctactacaacagatacaagagacagaacgtagtcaaggacctgtccgtcgagctggatagactgagcgaagaatctgtgaacaacgacatctcctcctggacaaagggcagaagcggagaagctctgagcctcctgaagaaaagattctcccatagacccgtgcaggagaagttcgtgtgcctgaactgcggcttcgagacacacgcagccgagcaagccgccctgaacatcgccagatcctggctgttcctgcggagccaggagtacaagaaataccagacaaacaagacaaccggcaacaccgataagagagccttcgtcgagacctggcagtccttttaccggaagaagcttaaggaggtgtggaaacctgccgtgcggtctggcggatctggcggaggctccaccagccccaagaaaaagagaaaagtctaagctgccttctgcggggcttgccttctggccatgcccttcttctctcccttgcacctgtacctcttggtctttgaataaagcctgagtaggaaggctagcaaaaaaaaaaaaaaaaaaaaaaaaaaaaaaaaaaaaaaaaaaaaaaaaaaaaaaaaaaaaaaaaaaaaaaaaaaaaaaaa

SEQ ID NO: 10353 - RNA, 8796 nt, synthetic construct
  source 1..8796: mol_type = other RNA
aggaaataagagagaaaagaagagtaagaagaaatataagagccaccatggcccctaagaagaagcgtaaagtgagccggatgaaccacgaccaggagttcgacccccctaaggtgtaccctcccgtccccgccgagaagagaaagcccatccgggtcctgagcctgttcgatggcatcgccaccggtctgctggtgctgaaggacctgggcatccaggtggataggtacattgcctccgaggtgtgcgaggactccatcaccgtgggaatggtgcgtcatcagggcaagatcatgtacgtgggcgacgtgcggagcgtgacacagaagcatatccaggagtggggccctttcgacctggtgatcggcggcagcccttgcaatgacctgagcatcgtgaacccagcccggaagggcctgtacgagggaaccggcagactgttcttcgagttttacagactgctgcacgacgcccggcctaaggaaggcgacgaccggcccttcttttggctgttcgagaatgtggtggccatgggagtcagcgacaagcgggatattagccggttcctggagagcaaccccgtgatgatcgatgccaaggaagtgagcgccgcccaccgggccagatacttctggggcaatctgcctggcatgaacagacccctggccagcaccgtgaacgacaagctggagctgcaggagtgcctggagcacggccggatcgccaagttcagcaaggtgagaaccatcaccacccgaagcaacagcatcaaacaaggcaaggaccagcactttcctgtgttcatgaacgagaaggaggacatcctgtggtgtaccgagatggagagagtgttcgggttcccagtccactacacagatgtcagcaacatgtctagactggccagacagagactgctgggaagaagctggtccgtccctgtgatcagacacctgttcgcccctctgaaggagtacttcgcctgcgtgagcagcggcaacagcaacgccaacagccggggccccagcttctctagcggcctggtgccactgtccctgagagggagccacatgggccccatggagatctacaaaaccgtgagcgcctggaagcggcagcctgtgcgcgtgctgagcctgtttcggaatatcgataaagtcctgaaaagcctgggattcctggagagcggctctggctccggcggtggcaccctgaagtacgtggaggatgtgacaaacgtggtcagacgggatgtggagaagtggggccccttcgatctggtgtacggcagcacccaacccctgggcagctcttgtgaccggtgccctggctggtacatgtttcagttccaccggatcctgcagtacgccctgccgagacaggagtcccagcggccattcttttggattttcatggacaacttgctgctgaccgaggatgaccaggaaactaccactcggttcctgcagaccgaagccgtgaccctgcaggacgtgagaggccgggactaccagaacgccatgcgggtgtggtccaacatccctggactgaaaagcaagcacgcacctctgacccctaaagaagaggagtacctgcaggcccaggtgcggagcagaagcaagctggacgcccctaaggtggatctgctggtgaagaattgcctcctgcccctgagagagtacttcaagtatttcagccagaatagtctgcccctgggaggcagcggcggcggcgtgacctacaacgacgtgcacatcgacttcacctgggaggagtggaccctgctggacctgagccagaagaacctgtacaaggacgtgatgctggagacctactggaacctgctgaccatcggctacagctgggaggaccacaacatcgaggagcactgccagagcagcaggaggtacgagaggcacgagaggagccaggccggcgagaagcccagcatctacacccagtgcatcaaggccttcgagcacctgggcggcccaagcagcggcgcccctcctcccagcggcggcaggcggcccaagcagcggcgcccctcctcccagcggcggcagcccagccggctccccaacctctaccgaggagggcacctctgagtccgccacccccgagagcggccctggcacctccaccgagcccagcgagggcagcgcacccggcagccctgccggcagccccacctccacagaggagggaaccagcaccgagcccagcgaaggcagcgccccaggcaccagcaccgagcctagtgagcaggagattaaacggatcaacaagatcagaagaagacttgtgaaagacagcaacaccaagaaggccggcaagacaggccccatgaaaaccctgctggttagagtgatgacacccgatctgagagagcggctggaaaacctgagaaagaagcctgaaaatatcccccagcccatcagcaatacatctagagccaacctgaataagctgctgaccgattacaccgaaatgaagaaggcgatcctgcatgtgtactgggaagagttccagaaggaccctgtgggcctgatgagccgggtggcccagcctgccagcaagaagatcgatcagaacaagctgaaacctgagatggacgagaagggcaacctgaccaccgccggctttgcctgctctcagtgtggccagcccctgttcgtgtacaagctggagcaggtgtctgagaagggcaaggcttacaccaactacttcggacggtgcaatgtggccgagcacgaaaagctgatcctgctggcccagctgaagcccgagaaggatagcgacgaagccgtgacatatagcctgggaaagtttgggcagagggccctggatttctacagcattcatgtgaccaaggagtccacccaccccgtgaagcccctggcccagatcgccggaaacagatacgcctccggacctgtgggaaaggccctgagcgacgcatgtatgggcacaatcgcctccttcctgtctaagtaccaggacatcatcatcgaacaccagaaggtggtgaagggcaaccagaagagactggagagcctgcgggagctggccggcaaggaaaacctggaataccctagcgtgaccctgccacctcagcctcacaccaaggagggcgttgatgcctacaacgaagtgatcgcccgggtgcgaatgtgggtgaacctgaacctgtggcagaagctgaagctaagcagagatgatgccaagcctctgctgagactgaagggattcccttcctttcctctggtcgagagacaggccaacgaagtggactggtgggacatggtgtgtaacgtgaagaagctgatcaacgagaaaaaggaggatggcaaggtgttttggcagaatctggctggctacaagagacaggaagccctgagaccatacctgagcagcgaggaagatcggaagaagggaaagaaattcgctcggtaccagctgggcgacctgctgctgcacctggaaaagaagcacggcgaggactggggaaaggtgtacgacgaggcctgggagcggattgacaagaaagtggaaggcctgagcaagcacatcaagctggaagaggaacggagaagcgaggacgcccagagcaaggccgccctgaccgactggctgcgggctaaggccagcttcgtgatcgagggcctgaaggaggccgacaaggacgagttctgcagatgcgagctgaagctgcagaagtggtacggggacctgcggggaaagcccttcgccatcgaagccgagaacagcatcctggacatcagcggcttcagcaagcagtacaactgtgccttcatctggcagaaggacggcgtgaagaagctgaacctgtacctgatcatcaactacttcaagggcggcaagctgcggttcaagaagatcaaacctgaagccttcgaagccaacagattctacaccgtgatcaacaaaaagagcggcgagatcgtgcccatggaggtgaacttcaacttcgacgaccccaacctgatcatcctgcctctggcctttggcaagagacagggcagagaattcatctggaacgacctgctgtccctggaaaccggcagcctgaagctggccaacggaagagtgatcgagaagacactgtacaacagaagaacccggcaggatgagcctgccctgttcgtggccctgaccttcgagcggcgggaggtcctggactcctccaatatcaaaccaatgaacctgatcggcgtggcaagaggcgaaaacatccccgccgtgatcgccctgaccgaccccgagggctgcccactgagccggtttaaggatagcctgggaaacccaacccacatcctgagaatcggcgagagctataaggagaagcagcggaccatccaggccaagaaggaggtggagcagcggagagccggcggctacagccggaagtacgccagcaaagccaagaatctggcagacgatatggtgagaaacaccgctagagatctgctgtactacgccgtgacccaggatgccatgctgatcttcgccaacctgagccggggcttcggccggcagggcaagcggaccttcatggccgagagacagtacacacggatggaggactggctgaccgccaagctggcctacgagggcctgagcaagacctacctgtccaagacactggcccagtacacctccaagacatgcagcaactgtgggtttaccatcaccagcgccgactacgacagggtgctggagaagctgaagaagacagcaacaggctggatgaccacaattaacggcaaggagctgaaggtggagggccagattacctactacaacagatacaagagacagaacgtagtcaaggacctgtccgtcgagctggatagactgagcgaagaatctgtgaacaacgacatctcctcctggacaaagggcagaagcggagaagctctgagcctcctgaagaaaagattctcccatagacccgtgcaggagaagttcgtgtgcctgaactgcggcttcgagacacacgcagccgagcaagccgccctgaacatcgccagatcctggctgttcctgcggagccaggagtacaagaaataccagacaaacaagacaaccggcaacaccgataagagagccttcgtcgagacctggcagtccttttaccggaagaagcttaaggaggtgtggaaacctgccgtgcggtctggcggatctggcggaggctccaccagccccaagaaaaagagaaaagtctaagctgccttctgcggggcttgccttctggccatgcccttcttctctcccttgcacctgtacctcttggtctttgaataaagcctgagtaggaaggctagcaaaaaaaaaaaaaaaaaaaaaaaaaaaaaaaaaaaaaaaaaaaaaaaaaaaaaaaaaaaaaaaaaaaaaaaaaaaaaaaagcccagccggctccccaacctctaccgaggagggcacctctgagtccgccacccccgagagcggccctggcacctccaccgagcccagcgagggcagcgcacccggcagccctgccggcagccccacctccacagaggagggaaccagcaccgagcccagcgaaggcagcgccccaggcaccagcaccgagcctagtgagcaggagattaaacggatcaacaagatcagaagaagacttgtgaaagacagcaacaccaagaaggccggcaagacaggccccatgaaaaccctgctggttagagtgatgacacccgatctgagagagcggctggaaaacctgagaaagaagcctgaaaatatcccccagcccatcagcaatacatctagagccaacctgaataagctgctgaccgattacaccgaaatgaagaaggcgatcctgcatgtgtactgggaagagttccagaaggaccctgtgggcctgatgagccgggtggcccagcctgccagcaagaagatcgatcagaacaagctgaaacctgagatggacgagaagggcaacctgaccaccgccggctttgcctgctctcagtgtggccagcccctgttcgtgtacaagctggagcaggtgtctgagaagggcaaggcttacaccaactacttcggacggtgcaatgtggccgagcacgaaaagctgatcctgctggcccagctgaagcccgagaaggatagcgacgaagccgtgacatatagcctgggaaagtttgggcagagggccctggatttctacagcattcatgtgaccaaggagtccacccaccccgtgaagcccctggcccagatcgccggaaacagatacgcctccggacctgtgggaaaggccctgagcgacgcatgtatgggcacaatcgcctccttcctgtctaagtaccaggacatcatcatcgaacaccagaaggtggtgaagggcaaccagaagagactggagagcctgcgggagctggccggcaaggaaaacctggaataccctagcgtgaccctgccacctcagcctcacaccaaggagggcgttgatgcctacaacgaagtgatcgcccgggtgcgaatgtgggtgaacctgaacctgtggcagaagctgaagctaagcagagatgatgccaagcctctgctgagactgaagggattcccttcctttcctctggtcgagagacaggccaacgaagtggactggtgggacatggtgtgtaacgtgaagaagctgatcaacgagaaaaaggaggatggcaaggtgttttggcagaatctggctggctacaagagacaggaagccctgagaccatacctgagcagcgaggaagatcggaagaagggaaagaaattcgctcggtaccagctgggcgacctgctgctgcacctggaaaagaagcacggcgaggactggggaaaggtgtacgacgaggcctgggagcggattgacaagaaagtggaaggcctgagcaagcacatcaagctggaagaggaacggagaagcgaggacgcccagagcaaggccgccctgaccgactggctgcgggctaaggccagcttcgtgatcgagggcctgaaggaggccgacaaggacgagttctgcagatgcgagctgaagctgcagaagtggtacggggacctgcggggaaagcccttcgccatcgaagccgagaacagcatcctggacatcagcggcttcagcaagcagtacaactgtgccttcatctggcagaaggacggcgtgaagaagctgaacctgtacctgatcatcaactacttcaagggcggcaagctgcggttcaagaagatcaaacctgaagccttcgaagccaacagattctacaccgtgatcaacaaaaagagcggcgagatcgtgcccatggaggtgaacttcaacttcgacgaccccaacctgatcatcctgcctctggcctttggcaagagacagggcagagaattcatctggaacgacctgctgtccctggaaaccggcagcctgaagctggccaacggaagagtgatcgagaagacactgtacaacagaagaacccggcaggatgagcctgccctgttcgtggccctgaccttcgagcggcgggaggtcctggactcctccaatatcaaaccaatgaacctgatcggcgtggcaagaggcgaaaacatccccgccgtgatcgccctgaccgaccccgagggctgcccactgagccggtttaaggatagcctgggaaacccaacccacatcctgagaatcggcgagagctataaggagaagcagcggaccatccaggccaagaaggaggtggagcagcggagagccggcggctacagccggaagtacgccagcaaagccaagaatctggcagacgatatggtgagaaacaccgctagagatctgctgtactacgccgtgacccaggatgccatgctgatcttcgccaacctgagccggggcttcggccggcagggcaagcggaccttcatggccgagagacagtacacacggatggaggactggctgaccgccaagctggcctacgagggcctgagcaagacctacctgtccaagacactggcccagtacacctccaagacatgcagcaactgtgggtttaccatcaccagcgccgactacgacagggtgctggagaagctgaagaagacagcaacaggctggatgaccacaattaacggcaaggagctgaaggtggagggccagattacctactacaacagatacaagagacagaacgtagtcaaggacctgtccgtcgagctggatagactgagcgaagaatctgtgaacaacgacatctcctcctggacaaagggcagaagcggagaagctctgagcctcctgaagaaaagattctcccatagacccgtgcaggagaagttcgtgtgcctgaactgcggcttcgagacacacgcagccgagcaagccgccctgaacatcgccagatcctggctgttcctgcggagccaggagtacaagaaataccagacaaacaagacaaccggcaacaccgataagagagccttcgtcgagacctggcagtccttttaccggaagaagcttaaggaggtgtggaaacctgccgtgcggtctggcggatctggcggaggctccaccagccccaagaaaaagagaaaagtctaagctgccttctgcggggcttgccttctggccatgcccttcttctctcccttgcacctgtacctcttggtctttgaataaagcctgagtaggaaggctagcaaaaaaaaaaaaaaaaaaaaaaaaaaaaaaaaaaaaaaaaaaaaaaaaaaaaaaaaaaaaaaaaaaaaaaaaaaaaaaaa

SEQ ID NO: 10354 - RNA, 8787 nt, synthetic construct
  source 1..8787: mol_type = other RNA
aggaaataagagagaaaagaagagtaagaagaaatataagagccaccatggcccctaagaagaagcgtaaagtgagccggatgaaccacgaccaggagttcgacccccctaaggtgtaccctcccgtccccgccgagaagagaaagcccatccgggtcctgagcctgttcgatggcatcgccaccggtctgctggtgctgaaggacctgggcatccaggtggataggtacattgcctccgaggtgtgcgaggactccatcaccgtgggaatggtgcgtcatcagggcaagatcatgtacgtgggcgacgtgcggagcgtgacacagaagcatatccaggagtggggccctttcgacctggtgatcggcggcagcccttgcaatgacctgagcatcgtgaacccagcccggaagggcctgtacgagggaaccggcagactgttcttcgagttttacagactgctgcacgacgcccggcctaaggaaggcgacgaccggcccttcttttggctgttcgagaatgtggtggccatgggagtcagcgacaagcgggatattagccggttcctggagagcaaccccgtgatgatcgatgccaaggaagtgagcgccgcccaccgggccagatacttctggggcaatctgcctggcatgaacagacccctggccagcaccgtgaacgacaagctggagctgcaggagtgcctggagcacggccggatcgccaagttcagcaaggtgagaaccatcaccacccgaagcaacagcatcaaacaaggcaaggaccagcactttcctgtgttcatgaacgagaaggaggacatcctgtggtgtaccgagatggagagagtgttcgggttcccagtccactacacagatgtcagcaacatgtctagactggccagacagagactgctgggaagaagctggtccgtccctgtgatcagacacctgttcgcccctctgaaggagtacttcgcctgcgtgagcagcggcaacagcaacgccaacagccggggccccagcttctctagcggcctggtgccactgtccctgagagggagccacatgggccccatggagatctacaaaaccgtgagcgcctggaagcggcagcctgtgcgcgtgctgagcctgtttcggaatatcgataaagtcctgaaaagcctgggattcctggagagcggctctggctccggcggtggcaccctgaagtacgtggaggatgtgacaaacgtggtcagacgggatgtggagaagtggggccccttcgatctggtgtacggcagcacccaacccctgggcagctcttgtgaccggtgccctggctggtacatgtttcagttccaccggatcctgcagtacgccctgccgagacaggagtcccagcggccattcttttggattttcatggacaacttgctgctgaccgaggatgaccaggaaactaccactcggttcctgcagaccgaagccgtgaccctgcaggacgtgagaggccgggactaccagaacgccatgcgggtgtggtccaacatccctggactgaaaagcaagcacgcacctctgacccctaaagaagaggagtacctgcaggcccaggtgcggagcagaagcaagctggacgcccctaaggtggatctgctggtgaagaattgcctcctgcccctgagagagtacttcaagtatttcagccagaatagtctgcccctgggaggcagcggcggcggcctggccagcatcagcttcgaggacctggccgtgaccttcaccgaggaggagtgggagcacctggacctgggccagaggaacctgtaccaggaggtgatgctggagacctaccagctgctggtgagcctgggcgaccaggtgaggctggccccccccacccccggcacccccctgcccgccctgcccgcccagcccaggctgctgggcctgcccagccagcccctggacaggaggggcacccccggcggcccaagcagcggcgcccctcctcccagcggcggcaggcggcccaagcagcggcgcccctcctcccagcggcggcagcccagccggctccccaacctctaccgaggagggcacctctgagtccgccacccccgagagcggccctggcacctccaccgagcccagcgagggcagcgcacccggcagccctgccggcagccccacctccacagaggagggaaccagcaccgagcccagcgaaggcagcgccccaggcaccagcaccgagcctagtgagcaggagattaaacggatcaacaagatcagaagaagacttgtgaaagacagcaacaccaagaaggccggcaagacaggccccatgaaaaccctgctggttagagtgatgacacccgatctgagagagcggctggaaaacctgagaaagaagcctgaaaatatcccccagcccatcagcaatacatctagagccaacctgaataagctgctgaccgattacaccgaaatgaagaaggcgatcctgcatgtgtactgggaagagttccagaaggaccctgtgggcctgatgagccgggtggcccagcctgccagcaagaagatcgatcagaacaagctgaaacctgagatggacgagaagggcaacctgaccaccgccggctttgcctgctctcagtgtggccagcccctgttcgtgtacaagctggagcaggtgtctgagaagggcaaggcttacaccaactacttcggacggtgcaatgtggccgagcacgaaaagctgatcctgctggcccagctgaagcccgagaaggatagcgacgaagccgtgacatatagcctgggaaagtttgggcagagggccctggatttctacagcattcatgtgaccaaggagtccacccaccccgtgaagcccctggcccagatcgccggaaacagatacgcctccggacctgtgggaaaggccctgagcgacgcatgtatgggcacaatcgcctccttcctgtctaagtaccaggacatcatcatcgaacaccagaaggtggtgaagggcaaccagaagagactggagagcctgcgggagctggccggcaaggaaaacctggaataccctagcgtgaccctgccacctcagcctcacaccaaggagggcgttgatgcctacaacgaagtgatcgcccgggtgcgaatgtgggtgaacctgaacctgtggcagaagctgaagctaagcagagatgatgccaagcctctgctgagactgaagggattcccttcctttcctctggtcgagagacaggccaacgaagtggactggtgggacatggtgtgtaacgtgaagaagctgatcaacgagaaaaaggaggatggcaaggtgttttggcagaatctggctggctacaagagacaggaagccctgagaccatacctgagcagcgaggaagatcggaagaagggaaagaaattcgctcggtaccagctgggcgacctgctgctgcacctggaaaagaagcacggcgaggactggggaaaggtgtacgacgaggcctgggagcggattgacaagaaagtggaaggcctgagcaagcacatcaagctggaagaggaacggagaagcgaggacgcccagagcaaggccgccctgaccgactggctgcgggctaaggccagcttcgtgatcgagggcctgaaggaggccgacaaggacgagttctgcagatgcgagctgaagctgcagaagtggtacggggacctgcggggaaagcccttcgccatcgaagccgagaacagcatcctggacatcagcggcttcagcaagcagtacaactgtgccttcatctggcagaaggacggcgtgaagaagctgaacctgtacctgatcatcaactacttcaagggcggcaagctgcggttcaagaagatcaaacctgaagccttcgaagccaacagattctacaccgtgatcaacaaaaagagcggcgagatcgtgcccatggaggtgaacttcaacttcgacgaccccaacctgatcatcctgcctctggcctttggcaagagacagggcagagaattcatctggaacgacctgctgtccctggaaaccggcagcctgaagctggccaacggaagagtgatcgagaagacactgtacaacagaagaacccggcaggatgagcctgccctgttcgtggccctgaccttcgagcggcgggaggtcctggactcctccaatatcaaaccaatgaacctgatcggcgtggcaagaggcgaaaacatccccgccgtgatcgccctgaccgaccccgagggctgcccactgagccggtttaaggatagcctgggaaacccaacccacatcctgagaatcggcgagagctataaggagaagcagcggaccatccaggccaagaaggaggtggagcagcggagagccggcggctacagccggaagtacgccagcaaagccaagaatctggcagacgatatggtgagaaacaccgctagagatctgctgtactacgccgtgacccaggatgccatgctgatcttcgccaacctgagccggggcttcggccggcagggcaagcggaccttcatggccgagagacagtacacacggatggaggactggctgaccgccaagctggcctacgagggcctgagcaagacctacctgtccaagacactggcccagtacacctccaagacatgcagcaactgtgggtttaccatcaccagcgccgactacgacagggtgctggagaagctgaagaagacagcaacaggctggatgaccacaattaacggcaaggagctgaaggtggagggccagattacctactacaacagatacaagagacagaacgtagtcaaggacctgtccgtcgagctggatagactgagcgaagaatctgtgaacaacgacatctcctcctggacaaagggcagaagcggagaagctctgagcctcctgaagaaaagattctcccatagacccgtgcaggagaagttcgtgtgcctgaactgcggcttcgagacacacgcagccgagcaagccgccctgaacatcgccagatcctggctgttcctgcggagccaggagtacaagaaataccagacaaacaagacaaccggcaacaccgataagagagccttcgtcgagacctggcagtccttttaccggaagaagcttaaggaggtgtggaaacctgccgtgcggtctggcggatctggcggaggctccaccagccccaagaaaaagagaaaagtctaagctgccttctgcggggcttgccttctggccatgcccttcttctctcccttgcacctgtacctcttggtctttgaataaagcctgagtaggaaggctagcaaaaaaaaaaaaaaaaaaaaaaaaaaaaaaaaaaaaaaaaaaaaaaaaaaaaaaaaaaaaaaaaaaaaaaaaaaaaaaaagcccagccggctccccaacctctaccgaggagggcacctctgagtccgccacccccgagagcggccctggcacctccaccgagcccagcgagggcagcgcacccggcagccctgccggcagccccacctccacagaggagggaaccagcaccgagcccagcgaaggcagcgccccaggcaccagcaccgagcctagtgagcaggagattaaacggatcaacaagatcagaagaagacttgtgaaagacagcaacaccaagaaggccggcaagacaggccccatgaaaaccctgctggttagagtgatgacacccgatctgagagagcggctggaaaacctgagaaagaagcctgaaaatatcccccagcccatcagcaatacatctagagccaacctgaataagctgctgaccgattacaccgaaatgaagaaggcgatcctgcatgtgtactgggaagagttccagaaggaccctgtgggcctgatgagccgggtggcccagcctgccagcaagaagatcgatcagaacaagctgaaacctgagatggacgagaagggcaacctgaccaccgccggctttgcctgctctcagtgtggccagcccctgttcgtgtacaagctggagcaggtgtctgagaagggcaaggcttacaccaactacttcggacggtgcaatgtggccgagcacgaaaagctgatcctgctggcccagctgaagcccgagaaggatagcgacgaagccgtgacatatagcctgggaaagtttgggcagagggccctggatttctacagcattcatgtgaccaaggagtccacccaccccgtgaagcccctggcccagatcgccggaaacagatacgcctccggacctgtgggaaaggccctgagcgacgcatgtatgggcacaatcgcctccttcctgtctaagtaccaggacatcatcatcgaacaccagaaggtggtgaagggcaaccagaagagactggagagcctgcgggagctggccggcaaggaaaacctggaataccctagcgtgaccctgccacctcagcctcacaccaaggagggcgttgatgcctacaacgaagtgatcgcccgggtgcgaatgtgggtgaacctgaacctgtggcagaagctgaagctaagcagagatgatgccaagcctctgctgagactgaagggattcccttcctttcctctggtcgagagacaggccaacgaagtggactggtgggacatggtgtgtaacgtgaagaagctgatcaacgagaaaaaggaggatggcaaggtgttttggcagaatctggctggctacaagagacaggaagccctgagaccatacctgagcagcgaggaagatcggaagaagggaaagaaattcgctcggtaccagctgggcgacctgctgctgcacctggaaaagaagcacggcgaggactggggaaaggtgtacgacgaggcctgggagcggattgacaagaaagtggaaggcctgagcaagcacatcaagctggaagaggaacggagaagcgaggacgcccagagcaaggccgccctgaccgactggctgcgggctaaggccagcttcgtgatcgagggcctgaaggaggccgacaaggacgagttctgcagatgcgagctgaagctgcagaagtggtacggggacctgcggggaaagcccttcgccatcgaagccgagaacagcatcctggacatcagcggcttcagcaagcagtacaactgtgccttcatctggcagaaggacggcgtgaagaagctgaacctgtacctgatcatcaactacttcaagggcggcaagctgcggttcaagaagatcaaacctgaagccttcgaagccaacagattctacaccgtgatcaacaaaaagagcggcgagatcgtgcccatggaggtgaacttcaacttcgacgaccccaacctgatcatcctgcctctggcctttggcaagagacagggcagagaattcatctggaacgacctgctgtccctggaaaccggcagcctgaagctggccaacggaagagtgatcgagaagacactgtacaacagaagaacccggcaggatgagcctgccctgttcgtggccctgaccttcgagcggcgggaggtcctggactcctccaatatcaaaccaatgaacctgatcggcgtggcaagaggcgaaaacatccccgccgtgatcgccctgaccgaccccgagggctgcccactgagccggtttaaggatagcctgggaaacccaacccacatcctgagaatcggcgagagctataaggagaagcagcggaccatccaggccaagaaggaggtggagcagcggagagccggcggctacagccggaagtacgccagcaaagccaagaatctggcagacgatatggtgagaaacaccgctagagatctgctgtactacgccgtgacccaggatgccatgctgatcttcgccaacctgagccggggcttcggccggcagggcaagcggaccttcatggccgagagacagtacacacggatggaggactggctgaccgccaagctggcctacgagggcctgagcaagacctacctgtccaagacactggcccagtacacctccaagacatgcagcaactgtgggtttaccatcaccagcgccgactacgacagggtgctggagaagctgaagaagacagcaacaggctggatgaccacaattaacggcaaggagctgaaggtggagggccagattacctactacaacagatacaagagacagaacgtagtcaaggacctgtccgtcgagctggatagactgagcgaagaatctgtgaacaacgacatctcctcctggacaaagggcagaagcggagaagctctgagcctcctgaagaaaagattctcccatagacccgtgcaggagaagttcgtgtgcctgaactgcggcttcgagacacacgcagccgagcaagccgccctgaacatcgccagatcctggctgttcctgcggagccaggagtacaagaaataccagacaaacaagacaaccggcaacaccgataagagagccttcgtcgagacctggcagtccttttaccggaagaagcttaaggaggtgtggaaacctgccgtgcggtctggcggatctggcggaggctccaccagccccaagaaaaagagaaaagtctaagctgccttctgcggggcttgccttctggccatgcccttcttctctcccttgcacctgtacctcttggtctttgaataaagcctgagtaggaaggctagcaaaaaaaaaaaaaaaaaaaaaaaaaaaaaaaaaaaaaaaaaaaaaaaaaaaaaaaaaaaaaaaaaaaaaaaaaaaaaaaa

SEQ ID NO: 10355 - RNA, 8787 nt, synthetic construct
  source 1..8787: mol_type = other RNA
aggaaataagagagaaaagaagagtaagaagaaatataagagccaccatggcccctaagaagaagcgtaaagtgagccggatgaaccacgaccaggagttcgacccccctaaggtgtaccctcccgtccccgccgagaagagaaagcccatccgggtcctgagcctgttcgatggcatcgccaccggtctgctggtgctgaaggacctgggcatccaggtggataggtacattgcctccgaggtgtgcgaggactccatcaccgtgggaatggtgcgtcatcagggcaagatcatgtacgtgggcgacgtgcggagcgtgacacagaagcatatccaggagtggggccctttcgacctggtgatcggcggcagcccttgcaatgacctgagcatcgtgaacccagcccggaagggcctgtacgagggaaccggcagactgttcttcgagttttacagactgctgcacgacgcccggcctaaggaaggcgacgaccggcccttcttttggctgttcgagaatgtggtggccatgggagtcagcgacaagcgggatattagccggttcctggagagcaaccccgtgatgatcgatgccaaggaagtgagcgccgcccaccgggccagatacttctggggcaatctgcctggcatgaacagacccctggccagcaccgtgaacgacaagctggagctgcaggagtgcctggagcacggccggatcgccaagttcagcaaggtgagaaccatcaccacccgaagcaacagcatcaaacaaggcaaggaccagcactttcctgtgttcatgaacgagaaggaggacatcctgtggtgtaccgagatggagagagtgttcgggttcccagtccactacacagatgtcagcaacatgtctagactggccagacagagactgctgggaagaagctggtccgtccctgtgatcagacacctgttcgcccctctgaaggagtacttcgcctgcgtgagcagcggcaacagcaacgccaacagccggggccccagcttctctagcggcctggtgccactgtccctgagagggagccacatgggccccatggagatctacaaaaccgtgagcgcctggaagcggcagcctgtgcgcgtgctgagcctgtttcggaatatcgataaagtcctgaaaagcctgggattcctggagagcggctctggctccggcggtggcaccctgaagtacgtggaggatgtgacaaacgtggtcagacgggatgtggagaagtggggccccttcgatctggtgtacggcagcacccaacccctgggcagctcttgtgaccggtgccctggctggtacatgtttcagttccaccggatcctgcagtacgccctgccgagacaggagtcccagcggccattcttttggattttcatggacaacttgctgctgaccgaggatgaccaggaaactaccactcggttcctgcagaccgaagccgtgaccctgcaggacgtgagaggccgggactaccagaacgccatgcgggtgtggtccaacatccctggactgaaaagcaagcacgcacctctgacccctaaagaagaggagtacctgcaggcccaggtgcggagcagaagcaagctggacgcccctaaggtggatctgctggtgaagaattgcctcctgcccctgagagagtacttcaagtatttcagccagaatagtctgcccctgggaggcagcggcggcggccagatgcaggtgaccttcgaggaggtggccatcagcttcagccaggaggagtgggagtacctggacgaggagcagaaggagctgtacagggaggtgatgaaggagaactaccagaccctgatcagcctggccaccggcagccccaccgtgacccccaagatcatcgcccacatcgagaggggcgaggagccctacatcaggggcgagcccggcagcgaggagagggagaccggcaacagcagcggcggcccaagcagcggcgcccctcctcccagcggcggcaggcggcccaagcagcggcgcccctcctcccagcggcggcagcccagccggctccccaacctctaccgaggagggcacctctgagtccgccacccccgagagcggccctggcacctccaccgagcccagcgagggcagcgcacccggcagccctgccggcagccccacctccacagaggagggaaccagcaccgagcccagcgaaggcagcgccccaggcaccagcaccgagcctagtgagcaggagattaaacggatcaacaagatcagaagaagacttgtgaaagacagcaacaccaagaaggccggcaagacaggccccatgaaaaccctgctggttagagtgatgacacccgatctgagagagcggctggaaaacctgagaaagaagcctgaaaatatcccccagcccatcagcaatacatctagagccaacctgaataagctgctgaccgattacaccgaaatgaagaaggcgatcctgcatgtgtactgggaagagttccagaaggaccctgtgggcctgatgagccgggtggcccagcctgccagcaagaagatcgatcagaacaagctgaaacctgagatggacgagaagggcaacctgaccaccgccggctttgcctgctctcagtgtggccagcccctgttcgtgtacaagctggagcaggtgtctgagaagggcaaggcttacaccaactacttcggacggtgcaatgtggccgagcacgaaaagctgatcctgctggcccagctgaagcccgagaaggatagcgacgaagccgtgacatatagcctgggaaagtttgggcagagggccctggatttctacagcattcatgtgaccaaggagtccacccaccccgtgaagcccctggcccagatcgccggaaacagatacgcctccggacctgtgggaaaggccctgagcgacgcatgtatgggcacaatcgcctccttcctgtctaagtaccaggacatcatcatcgaacaccagaaggtggtgaagggcaaccagaagagactggagagcctgcgggagctggccggcaaggaaaacctggaataccctagcgtgaccctgccacctcagcctcacaccaaggagggcgttgatgcctacaacgaagtgatcgcccgggtgcgaatgtgggtgaacctgaacctgtggcagaagctgaagctaagcagagatgatgccaagcctctgctgagactgaagggattcccttcctttcctctggtcgagagacaggccaacgaagtggactggtgggacatggtgtgtaacgtgaagaagctgatcaacgagaaaaaggaggatggcaaggtgttttggcagaatctggctggctacaagagacaggaagccctgagaccatacctgagcagcgaggaagatcggaagaagggaaagaaattcgctcggtaccagctgggcgacctgctgctgcacctggaaaagaagcacggcgaggactggggaaaggtgtacgacgaggcctgggagcggattgacaagaaagtggaaggcctgagcaagcacatcaagctggaagaggaacggagaagcgaggacgcccagagcaaggccgccctgaccgactggctgcgggctaaggccagcttcgtgatcgagggcctgaaggaggccgacaaggacgagttctgcagatgcgagctgaagctgcagaagtggtacggggacctgcggggaaagcccttcgccatcgaagccgagaacagcatcctggacatcagcggcttcagcaagcagtacaactgtgccttcatctggcagaaggacggcgtgaagaagctgaacctgtacctgatcatcaactacttcaagggcggcaagctgcggttcaagaagatcaaacctgaagccttcgaagccaacagattctacaccgtgatcaacaaaaagagcggcgagatcgtgcccatggaggtgaacttcaacttcgacgaccccaacctgatcatcctgcctctggcctttggcaagagacagggcagagaattcatctggaacgacctgctgtccctggaaaccggcagcctgaagctggccaacggaagagtgatcgagaagacactgtacaacagaagaacccggcaggatgagcctgccctgttcgtggccctgaccttcgagcggcgggaggtcctggactcctccaatatcaaaccaatgaacctgatcggcgtggcaagaggcgaaaacatccccgccgtgatcgccctgaccgaccccgagggctgcccactgagccggtttaaggatagcctgggaaacccaacccacatcctgagaatcggcgagagctataaggagaagcagcggaccatccaggccaagaaggaggtggagcagcggagagccggcggctacagccggaagtacgccagcaaagccaagaatctggcagacgatatggtgagaaacaccgctagagatctgctgtactacgccgtgacccaggatgccatgctgatcttcgccaacctgagccggggcttcggccggcagggcaagcggaccttcatggccgagagacagtacacacggatggaggactggctgaccgccaagctggcctacgagggcctgagcaagacctacctgtccaagacactggcccagtacacctccaagacatgcagcaactgtgggtttaccatcaccagcgccgactacgacagggtgctggagaagctgaagaagacagcaacaggctggatgaccacaattaacggcaaggagctgaaggtggagggccagattacctactacaacagatacaagagacagaacgtagtcaaggacctgtccgtcgagctggatagactgagcgaagaatctgtgaacaacgacatctcctcctggacaaagggcagaagcggagaagctctgagcctcctgaagaaaagattctcccatagacccgtgcaggagaagttcgtgtgcctgaactgcggcttcgagacacacgcagccgagcaagccgccctgaacatcgccagatcctggctgttcctgcggagccaggagtacaagaaataccagacaaacaagacaaccggcaacaccgataagagagccttcgtcgagacctggcagtccttttaccggaagaagcttaaggaggtgtggaaacctgccgtgcggtctggcggatctggcggaggctccaccagccccaagaaaaagagaaaagtctaagctgccttctgcggggcttgccttctggccatgcccttcttctctcccttgcacctgtacctcttggtctttgaataaagcctgagtaggaaggctagcaaaaaaaaaaaaaaaaaaaaaaaaaaaaaaaaaaaaaaaaaaaaaaaaaaaaaaaaaaaaaaaaaaaaaaaaaaaaaaaagcccagccggctccccaacctctaccgaggagggcacctctgagtccgccacccccgagagcggccctggcacctccaccgagcccagcgagggcagcgcacccggcagccctgccggcagccccacctccacagaggagggaaccagcaccgagcccagcgaaggcagcgccccaggcaccagcaccgagcctagtgagcaggagattaaacggatcaacaagatcagaagaagacttgtgaaagacagcaacaccaagaaggccggcaagacaggccccatgaaaaccctgctggttagagtgatgacacccgatctgagagagcggctggaaaacctgagaaagaagcctgaaaatatcccccagcccatcagcaatacatctagagccaacctgaataagctgctgaccgattacaccgaaatgaagaaggcgatcctgcatgtgtactgggaagagttccagaaggaccctgtgggcctgatgagccgggtggcccagcctgccagcaagaagatcgatcagaacaagctgaaacctgagatggacgagaagggcaacctgaccaccgccggctttgcctgctctcagtgtggccagcccctgttcgtgtacaagctggagcaggtgtctgagaagggcaaggcttacaccaactacttcggacggtgcaatgtggccgagcacgaaaagctgatcctgctggcccagctgaagcccgagaaggatagcgacgaagccgtgacatatagcctgggaaagtttgggcagagggccctggatttctacagcattcatgtgaccaaggagtccacccaccccgtgaagcccctggcccagatcgccggaaacagatacgcctccggacctgtgggaaaggccctgagcgacgcatgtatgggcacaatcgcctccttcctgtctaagtaccaggacatcatcatcgaacaccagaaggtggtgaagggcaaccagaagagactggagagcctgcgggagctggccggcaaggaaaacctggaataccctagcgtgaccctgccacctcagcctcacaccaaggagggcgttgatgcctacaacgaagtgatcgcccgggtgcgaatgtgggtgaacctgaacctgtggcagaagctgaagctaagcagagatgatgccaagcctctgctgagactgaagggattcccttcctttcctctggtcgagagacaggccaacgaagtggactggtgggacatggtgtgtaacgtgaagaagctgatcaacgagaaaaaggaggatggcaaggtgttttggcagaatctggctggctacaagagacaggaagccctgagaccatacctgagcagcgaggaagatcggaagaagggaaagaaattcgctcggtaccagctgggcgacctgctgctgcacctggaaaagaagcacggcgaggactggggaaaggtgtacgacgaggcctgggagcggattgacaagaaagtggaaggcctgagcaagcacatcaagctggaagaggaacggagaagcgaggacgcccagagcaaggccgccctgaccgactggctgcgggctaaggccagcttcgtgatcgagggcctgaaggaggccgacaaggacgagttctgcagatgcgagctgaagctgcagaagtggtacggggacctgcggggaaagcccttcgccatcgaagccgagaacagcatcctggacatcagcggcttcagcaagcagtacaactgtgccttcatctggcagaaggacggcgtgaagaagctgaacctgtacctgatcatcaactacttcaagggcggcaagctgcggttcaagaagatcaaacctgaagccttcgaagccaacagattctacaccgtgatcaacaaaaagagcggcgagatcgtgcccatggaggtgaacttcaacttcgacgaccccaacctgatcatcctgcctctggcctttggcaagagacagggcagagaattcatctggaacgacctgctgtccctggaaaccggcagcctgaagctggccaacggaagagtgatcgagaagacactgtacaacagaagaacccggcaggatgagcctgccctgttcgtggccctgaccttcgagcggcgggaggtcctggactcctccaatatcaaaccaatgaacctgatcggcgtggcaagaggcgaaaacatccccgccgtgatcgccctgaccgaccccgagggctgcccactgagccggtttaaggatagcctgggaaacccaacccacatcctgagaatcggcgagagctataaggagaagcagcggaccatccaggccaagaaggaggtggagcagcggagagccggcggctacagccggaagtacgccagcaaagccaagaatctggcagacgatatggtgagaaacaccgctagagatctgctgtactacgccgtgacccaggatgccatgctgatcttcgccaacctgagccggggcttcggccggcagggcaagcggaccttcatggccgagagacagtacacacggatggaggactggctgaccgccaagctggcctacgagggcctgagcaagacctacctgtccaagacactggcccagtacacctccaagacatgcagcaactgtgggtttaccatcaccagcgccgactacgacagggtgctggagaagctgaagaagacagcaacaggctggatgaccacaattaacggcaaggagctgaaggtggagggccagattacctactacaacagatacaagagacagaacgtagtcaaggacctgtccgtcgagctggatagactgagcgaagaatctgtgaacaacgacatctcctcctggacaaagggcagaagcggagaagctctgagcctcctgaagaaaagattctcccatagacccgtgcaggagaagttcgtgtgcctgaactgcggcttcgagacacacgcagccgagcaagccgccctgaacatcgccagatcctggctgttcctgcggagccaggagtacaagaaataccagacaaacaagacaaccggcaacaccgataagagagccttcgtcgagacctggcagtccttttaccggaagaagcttaaggaggtgtggaaacctgccgtgcggtctggcggatctggcggaggctccaccagccccaagaaaaagagaaaagtctaagctgccttctgcggggcttgccttctggccatgcccttcttctctcccttgcacctgtacctcttggtctttgaataaagcctgagtaggaaggctagcaaaaaaaaaaaaaaaaaaaaaaaaaaaaaaaaaaaaaaaaaaaaaaaaaaaaaaaaaaaaaaaaaaaaaaaaaaaaaaaa

SEQ ID NO: 10356 - RNA, 8787 nt, synthetic construct
  source 1..8787: mol_type = other RNA
aggaaataagagagaaaagaagagtaagaagaaatataagagccaccatggcccctaagaagaagcgtaaagtgagccggatgaaccacgaccaggagttcgacccccctaaggtgtaccctcccgtccccgccgagaagagaaagcccatccgggtcctgagcctgttcgatggcatcgccaccggtctgctggtgctgaaggacctgggcatccaggtggataggtacattgcctccgaggtgtgcgaggactccatcaccgtgggaatggtgcgtcatcagggcaagatcatgtacgtgggcgacgtgcggagcgtgacacagaagcatatccaggagtggggccctttcgacctggtgatcggcggcagcccttgcaatgacctgagcatcgtgaacccagcccggaagggcctgtacgagggaaccggcagactgttcttcgagttttacagactgctgcacgacgcccggcctaaggaaggcgacgaccggcccttcttttggctgttcgagaatgtggtggccatgggagtcagcgacaagcgggatattagccggttcctggagagcaaccccgtgatgatcgatgccaaggaagtgagcgccgcccaccgggccagatacttctggggcaatctgcctggcatgaacagacccctggccagcaccgtgaacgacaagctggagctgcaggagtgcctggagcacggccggatcgccaagttcagcaaggtgagaaccatcaccacccgaagcaacagcatcaaacaaggcaaggaccagcactttcctgtgttcatgaacgagaaggaggacatcctgtggtgtaccgagatggagagagtgttcgggttcccagtccactacacagatgtcagcaacatgtctagactggccagacagagactgctgggaagaagctggtccgtccctgtgatcagacacctgttcgcccctctgaaggagtacttcgcctgcgtgagcagcggcaacagcaacgccaacagccggggccccagcttctctagcggcctggtgccactgtccctgagagggagccacatgggccccatggagatctacaaaaccgtgagcgcctggaagcggcagcctgtgcgcgtgctgagcctgtttcggaatatcgataaagtcctgaaaagcctgggattcctggagagcggctctggctccggcggtggcaccctgaagtacgtggaggatgtgacaaacgtggtcagacgggatgtggagaagtggggccccttcgatctggtgtacggcagcacccaacccctgggcagctcttgtgaccggtgccctggctggtacatgtttcagttccaccggatcctgcagtacgccctgccgagacaggagtcccagcggccattcttttggattttcatggacaacttgctgctgaccgaggatgaccaggaaactaccactcggttcctgcagaccgaagccgtgaccctgcaggacgtgagaggccgggactaccagaacgccatgcgggtgtggtccaacatccctggactgaaaagcaagcacgcacctctgacccctaaagaagaggagtacctgcaggcccaggtgcggagcagaagcaagctggacgcccctaaggtggatctgctggtgaagaattgcctcctgcccctgagagagtacttcaagtatttcagccagaatagtctgcccctgggaggcagcggcggcggcgcccaggagagcgtgaccttcgaggacgtggccgtgaacttcaccaacagggagtggcagtgcctgacctacgcccagaggcacctgtacaaggacgtgatgctggagaactacggcaacatggtgagcctgggcttccccttccccaagccccccctgatcagccacctggagagggaggtggacccctgcgtgcaggacccccaggacagggagagcctgagctgcagctaccccgtgagcggcggcccaagcagcggcgcccctcctcccagcggcggcaggcggcccaagcagcggcgcccctcctcccagcggcggcagcccagccggctccccaacctctaccgaggagggcacctctgagtccgccacccccgagagcggccctggcacctccaccgagcccagcgagggcagcgcacccggcagccctgccggcagccccacctccacagaggagggaaccagcaccgagcccagcgaaggcagcgccccaggcaccagcaccgagcctagtgagcaggagattaaacggatcaacaagatcagaagaagacttgtgaaagacagcaacaccaagaaggccggcaagacaggccccatgaaaaccctgctggttagagtgatgacacccgatctgagagagcggctggaaaacctgagaaagaagcctgaaaatatcccccagcccatcagcaatacatctagagccaacctgaataagctgctgaccgattacaccgaaatgaagaaggcgatcctgcatgtgtactgggaagagttccagaaggaccctgtgggcctgatgagccgggtggcccagcctgccagcaagaagatcgatcagaacaagctgaaacctgagatggacgagaagggcaacctgaccaccgccggctttgcctgctctcagtgtggccagcccctgttcgtgtacaagctggagcaggtgtctgagaagggcaaggcttacaccaactacttcggacggtgcaatgtggccgagcacgaaaagctgatcctgctggcccagctgaagcccgagaaggatagcgacgaagccgtgacatatagcctgggaaagtttgggcagagggccctggatttctacagcattcatgtgaccaaggagtccacccaccccgtgaagcccctggcccagatcgccggaaacagatacgcctccggacctgtgggaaaggccctgagcgacgcatgtatgggcacaatcgcctccttcctgtctaagtaccaggacatcatcatcgaacaccagaaggtggtgaagggcaaccagaagagactggagagcctgcgggagctggccggcaaggaaaacctggaataccctagcgtgaccctgccacctcagcctcacaccaaggagggcgttgatgcctacaacgaagtgatcgcccgggtgcgaatgtgggtgaacctgaacctgtggcagaagctgaagctaagcagagatgatgccaagcctctgctgagactgaagggattcccttcctttcctctggtcgagagacaggccaacgaagtggactggtgggacatggtgtgtaacgtgaagaagctgatcaacgagaaaaaggaggatggcaaggtgttttggcagaatctggctggctacaagagacaggaagccctgagaccatacctgagcagcgaggaagatcggaagaagggaaagaaattcgctcggtaccagctgggcgacctgctgctgcacctggaaaagaagcacggcgaggactggggaaaggtgtacgacgaggcctgggagcggattgacaagaaagtggaaggcctgagcaagcacatcaagctggaagaggaacggagaagcgaggacgcccagagcaaggccgccctgaccgactggctgcgggctaaggccagcttcgtgatcgagggcctgaaggaggccgacaaggacgagttctgcagatgcgagctgaagctgcagaagtggtacggggacctgcggggaaagcccttcgccatcgaagccgagaacagcatcctggacatcagcggcttcagcaagcagtacaactgtgccttcatctggcagaaggacggcgtgaagaagctgaacctgtacctgatcatcaactacttcaagggcggcaagctgcggttcaagaagatcaaacctgaagccttcgaagccaacagattctacaccgtgatcaacaaaaagagcggcgagatcgtgcccatggaggtgaacttcaacttcgacgaccccaacctgatcatcctgcctctggcctttggcaagagacagggcagagaattcatctggaacgacctgctgtccctggaaaccggcagcctgaagctggccaacggaagagtgatcgagaagacactgtacaacagaagaacccggcaggatgagcctgccctgttcgtggccctgaccttcgagcggcgggaggtcctggactcctccaatatcaaaccaatgaacctgatcggcgtggcaagaggcgaaaacatccccgccgtgatcgccctgaccgaccccgagggctgcccactgagccggtttaaggatagcctgggaaacccaacccacatcctgagaatcggcgagagctataaggagaagcagcggaccatccaggccaagaaggaggtggagcagcggagagccggcggctacagccggaagtacgccagcaaagccaagaatctggcagacgatatggtgagaaacaccgctagagatctgctgtactacgccgtgacccaggatgccatgctgatcttcgccaacctgagccggggcttcggccggcagggcaagcggaccttcatggccgagagacagtacacacggatggaggactggctgaccgccaagctggcctacgagggcctgagcaagacctacctgtccaagacactggcccagtacacctccaagacatgcagcaactgtgggtttaccatcaccagcgccgactacgacagggtgctggagaagctgaagaagacagcaacaggctggatgaccacaattaacggcaaggagctgaaggtggagggccagattacctactacaacagatacaagagacagaacgtagtcaaggacctgtccgtcgagctggatagactgagcgaagaatctgtgaacaacgacatctcctcctggacaaagggcagaagcggagaagctctgagcctcctgaagaaaagattctcccatagacccgtgcaggagaagttcgtgtgcctgaactgcggcttcgagacacacgcagccgagcaagccgccctgaacatcgccagatcctggctgttcctgcggagccaggagtacaagaaataccagacaaacaagacaaccggcaacaccgataagagagccttcgtcgagacctggcagtccttttaccggaagaagcttaaggaggtgtggaaacctgccgtgcggtctggcggatctggcggaggctccaccagccccaagaaaaagagaaaagtctaagctgccttctgcggggcttgccttctggccatgcccttcttctctcccttgcacctgtacctcttggtctttgaataaagcctgagtaggaaggctagcaaaaaaaaaaaaaaaaaaaaaaaaaaaaaaaaaaaaaaaaaaaaaaaaaaaaaaaaaaaaaaaaaaaaaaaaaaaaaaaagcccagccggctccccaacctctaccgaggagggcacctctgagtccgccacccccgagagcggccctggcacctccaccgagcccagcgagggcagcgcacccggcagccctgccggcagccccacctccacagaggagggaaccagcaccgagcccagcgaaggcagcgccccaggcaccagcaccgagcctagtgagcaggagattaaacggatcaacaagatcagaagaagacttgtgaaagacagcaacaccaagaaggccggcaagacaggccccatgaaaaccctgctggttagagtgatgacacccgatctgagagagcggctggaaaacctgagaaagaagcctgaaaatatcccccagcccatcagcaatacatctagagccaacctgaataagctgctgaccgattacaccgaaatgaagaaggcgatcctgcatgtgtactgggaagagttccagaaggaccctgtgggcctgatgagccgggtggcccagcctgccagcaagaagatcgatcagaacaagctgaaacctgagatggacgagaagggcaacctgaccaccgccggctttgcctgctctcagtgtggccagcccctgttcgtgtacaagctggagcaggtgtctgagaagggcaaggcttacaccaactacttcggacggtgcaatgtggccgagcacgaaaagctgatcctgctggcccagctgaagcccgagaaggatagcgacgaagccgtgacatatagcctgggaaagtttgggcagagggccctggatttctacagcattcatgtgaccaaggagtccacccaccccgtgaagcccctggcccagatcgccggaaacagatacgcctccggacctgtgggaaaggccctgagcgacgcatgtatgggcacaatcgcctccttcctgtctaagtaccaggacatcatcatcgaacaccagaaggtggtgaagggcaaccagaagagactggagagcctgcgggagctggccggcaaggaaaacctggaataccctagcgtgaccctgccacctcagcctcacaccaaggagggcgttgatgcctacaacgaagtgatcgcccgggtgcgaatgtgggtgaacctgaacctgtggcagaagctgaagctaagcagagatgatgccaagcctctgctgagactgaagggattcccttcctttcctctggtcgagagacaggccaacgaagtggactggtgggacatggtgtgtaacgtgaagaagctgatcaacgagaaaaaggaggatggcaaggtgttttggcagaatctggctggctacaagagacaggaagccctgagaccatacctgagcagcgaggaagatcggaagaagggaaagaaattcgctcggtaccagctgggcgacctgctgctgcacctggaaaagaagcacggcgaggactggggaaaggtgtacgacgaggcctgggagcggattgacaagaaagtggaaggcctgagcaagcacatcaagctggaagaggaacggagaagcgaggacgcccagagcaaggccgccctgaccgactggctgcgggctaaggccagcttcgtgatcgagggcctgaaggaggccgacaaggacgagttctgcagatgcgagctgaagctgcagaagtggtacggggacctgcggggaaagcccttcgccatcgaagccgagaacagcatcctggacatcagcggcttcagcaagcagtacaactgtgccttcatctggcagaaggacggcgtgaagaagctgaacctgtacctgatcatcaactacttcaagggcggcaagctgcggttcaagaagatcaaacctgaagccttcgaagccaacagattctacaccgtgatcaacaaaaagagcggcgagatcgtgcccatggaggtgaacttcaacttcgacgaccccaacctgatcatcctgcctctggcctttggcaagagacagggcagagaattcatctggaacgacctgctgtccctggaaaccggcagcctgaagctggccaacggaagagtgatcgagaagacactgtacaacagaagaacccggcaggatgagcctgccctgttcgtggccctgaccttcgagcggcgggaggtcctggactcctccaatatcaaaccaatgaacctgatcggcgtggcaagaggcgaaaacatccccgccgtgatcgccctgaccgaccccgagggctgcccactgagccggtttaaggatagcctgggaaacccaacccacatcctgagaatcggcgagagctataaggagaagcagcggaccatccaggccaagaaggaggtggagcagcggagagccggcggctacagccggaagtacgccagcaaagccaagaatctggcagacgatatggtgagaaacaccgctagagatctgctgtactacgccgtgacccaggatgccatgctgatcttcgccaacctgagccggggcttcggccggcagggcaagcggaccttcatggccgagagacagtacacacggatggaggactggctgaccgccaagctggcctacgagggcctgagcaagacctacctgtccaagacactggcccagtacacctccaagacatgcagcaactgtgggtttaccatcaccagcgccgactacgacagggtgctggagaagctgaagaagacagcaacaggctggatgaccacaattaacggcaaggagctgaaggtggagggccagattacctactacaacagatacaagagacagaacgtagtcaaggacctgtccgtcgagctggatagactgagcgaagaatctgtgaacaacgacatctcctcctggacaaagggcagaagcggagaagctctgagcctcctgaagaaaagattctcccatagacccgtgcaggagaagttcgtgtgcctgaactgcggcttcgagacacacgcagccgagcaagccgccctgaacatcgccagatcctggctgttcctgcggagccaggagtacaagaaataccagacaaacaagacaaccggcaacaccgataagagagccttcgtcgagacctggcagtccttttaccggaagaagcttaaggaggtgtggaaacctgccgtgcggtctggcggatctggcggaggctccaccagccccaagaaaaagagaaaagtctaagctgccttctgcggggcttgccttctggccatgcccttcttctctcccttgcacctgtacctcttggtctttgaataaagcctgagtaggaaggctagcaaaaaaaaaaaaaaaaaaaaaaaaaaaaaaaaaaaaaaaaaaaaaaaaaaaaaaaaaaaaaaaaaaaaaaaaaaaaaaaa

SEQ ID NO: 10357 - RNA, 8787 nt, synthetic construct
  source 1..8787: mol_type = other RNA
aggaaataagagagaaaagaagagtaagaagaaatataagagccaccatggcccctaagaagaagcgtaaagtgagccggatgaaccacgaccaggagttcgacccccctaaggtgtaccctcccgtccccgccgagaagagaaagcccatccgggtcctgagcctgttcgatggcatcgccaccggtctgctggtgctgaaggacctgggcatccaggtggataggtacattgcctccgaggtgtgcgaggactccatcaccgtgggaatggtgcgtcatcagggcaagatcatgtacgtgggcgacgtgcggagcgtgacacagaagcatatccaggagtggggccctttcgacctggtgatcggcggcagcccttgcaatgacctgagcatcgtgaacccagcccggaagggcctgtacgagggaaccggcagactgttcttcgagttttacagactgctgcacgacgcccggcctaaggaaggcgacgaccggcccttcttttggctgttcgagaatgtggtggccatgggagtcagcgacaagcgggatattagccggttcctggagagcaaccccgtgatgatcgatgccaaggaagtgagcgccgcccaccgggccagatacttctggggcaatctgcctggcatgaacagacccctggccagcaccgtgaacgacaagctggagctgcaggagtgcctggagcacggccggatcgccaagttcagcaaggtgagaaccatcaccacccgaagcaacagcatcaaacaaggcaaggaccagcactttcctgtgttcatgaacgagaaggaggacatcctgtggtgtaccgagatggagagagtgttcgggttcccagtccactacacagatgtcagcaacatgtctagactggccagacagagactgctgggaagaagctggtccgtccctgtgatcagacacctgttcgcccctctgaaggagtacttcgcctgcgtgagcagcggcaacagcaacgccaacagccggggccccagcttctctagcggcctggtgccactgtccctgagagggagccacatgggccccatggagatctacaaaaccgtgagcgcctggaagcggcagcctgtgcgcgtgctgagcctgtttcggaatatcgataaagtcctgaaaagcctgggattcctggagagcggctctggctccggcggtggcaccctgaagtacgtggaggatgtgacaaacgtggtcagacgggatgtggagaagtggggccccttcgatctggtgtacggcagcacccaacccctgggcagctcttgtgaccggtgccctggctggtacatgtttcagttccaccggatcctgcagtacgccctgccgagacaggagtcccagcggccattcttttggattttcatggacaacttgctgctgaccgaggatgaccaggaaactaccactcggttcctgcagaccgaagccgtgaccctgcaggacgtgagaggccgggactaccagaacgccatgcgggtgtggtccaacatccctggactgaaaagcaagcacgcacctctgacccctaaagaagaggagtacctgcaggcccaggtgcggagcagaagcaagctggacgcccctaaggtggatctgctggtgaagaattgcctcctgcccctgagagagtacttcaagtatttcagccagaatagtctgcccctgggaggcagcggcggcggcgcccagggcagcgtgatgttcaccgacgtgagcatcgacttcagccaggaggagtgggagttcctgaaccccgaccagagggacctgtacaaggacgtgatgctggagaactacagcaacctggtgagcatgggcctgtacatccccaagccccaggtgatcagcctgctggagcagggcaaggagccctggatgatcggcagggagctgaccaggggcctgtgcagcgccctggagagcatgggcggcccaagcagcggcgcccctcctcccagcggcggcaggcggcccaagcagcggcgcccctcctcccagcggcggcagcccagccggctccccaacctctaccgaggagggcacctctgagtccgccacccccgagagcggccctggcacctccaccgagcccagcgagggcagcgcacccggcagccctgccggcagccccacctccacagaggagggaaccagcaccgagcccagcgaaggcagcgccccaggcaccagcaccgagcctagtgagcaggagattaaacggatcaacaagatcagaagaagacttgtgaaagacagcaacaccaagaaggccggcaagacaggccccatgaaaaccctgctggttagagtgatgacacccgatctgagagagcggctggaaaacctgagaaagaagcctgaaaatatcccccagcccatcagcaatacatctagagccaacctgaataagctgctgaccgattacaccgaaatgaagaaggcgatcctgcatgtgtactgggaagagttccagaaggaccctgtgggcctgatgagccgggtggcccagcctgccagcaagaagatcgatcagaacaagctgaaacctgagatggacgagaagggcaacctgaccaccgccggctttgcctgctctcagtgtggccagcccctgttcgtgtacaagctggagcaggtgtctgagaagggcaaggcttacaccaactacttcggacggtgcaatgtggccgagcacgaaaagctgatcctgctggcccagctgaagcccgagaaggatagcgacgaagccgtgacatatagcctgggaaagtttgggcagagggccctggatttctacagcattcatgtgaccaaggagtccacccaccccgtgaagcccctggcccagatcgccggaaacagatacgcctccggacctgtgggaaaggccctgagcgacgcatgtatgggcacaatcgcctccttcctgtctaagtaccaggacatcatcatcgaacaccagaaggtggtgaagggcaaccagaagagactggagagcctgcgggagctggccggcaaggaaaacctggaataccctagcgtgaccctgccacctcagcctcacaccaaggagggcgttgatgcctacaacgaagtgatcgcccgggtgcgaatgtgggtgaacctgaacctgtggcagaagctgaagctaagcagagatgatgccaagcctctgctgagactgaagggattcccttcctttcctctggtcgagagacaggccaacgaagtggactggtgggacatggtgtgtaacgtgaagaagctgatcaacgagaaaaaggaggatggcaaggtgttttggcagaatctggctggctacaagagacaggaagccctgagaccatacctgagcagcgaggaagatcggaagaagggaaagaaattcgctcggtaccagctgggcgacctgctgctgcacctggaaaagaagcacggcgaggactggggaaaggtgtacgacgaggcctgggagcggattgacaagaaagtggaaggcctgagcaagcacatcaagctggaagaggaacggagaagcgaggacgcccagagcaaggccgccctgaccgactggctgcgggctaaggccagcttcgtgatcgagggcctgaaggaggccgacaaggacgagttctgcagatgcgagctgaagctgcagaagtggtacggggacctgcggggaaagcccttcgccatcgaagccgagaacagcatcctggacatcagcggcttcagcaagcagtacaactgtgccttcatctggcagaaggacggcgtgaagaagctgaacctgtacctgatcatcaactacttcaagggcggcaagctgcggttcaagaagatcaaacctgaagccttcgaagccaacagattctacaccgtgatcaacaaaaagagcggcgagatcgtgcccatggaggtgaacttcaacttcgacgaccccaacctgatcatcctgcctctggcctttggcaagagacagggcagagaattcatctggaacgacctgctgtccctggaaaccggcagcctgaagctggccaacggaagagtgatcgagaagacactgtacaacagaagaacccggcaggatgagcctgccctgttcgtggccctgaccttcgagcggcgggaggtcctggactcctccaatatcaaaccaatgaacctgatcggcgtggcaagaggcgaaaacatccccgccgtgatcgccctgaccgaccccgagggctgcccactgagccggtttaaggatagcctgggaaacccaacccacatcctgagaatcggcgagagctataaggagaagcagcggaccatccaggccaagaaggaggtggagcagcggagagccggcggctacagccggaagtacgccagcaaagccaagaatctggcagacgatatggtgagaaacaccgctagagatctgctgtactacgccgtgacccaggatgccatgctgatcttcgccaacctgagccggggcttcggccggcagggcaagcggaccttcatggccgagagacagtacacacggatggaggactggctgaccgccaagctggcctacgagggcctgagcaagacctacctgtccaagacactggcccagtacacctccaagacatgcagcaactgtgggtttaccatcaccagcgccgactacgacagggtgctggagaagctgaagaagacagcaacaggctggatgaccacaattaacggcaaggagctgaaggtggagggccagattacctactacaacagatacaagagacagaacgtagtcaaggacctgtccgtcgagctggatagactgagcgaagaatctgtgaacaacgacatctcctcctggacaaagggcagaagcggagaagctctgagcctcctgaagaaaagattctcccatagacccgtgcaggagaagttcgtgtgcctgaactgcggcttcgagacacacgcagccgagcaagccgccctgaacatcgccagatcctggctgttcctgcggagccaggagtacaagaaataccagacaaacaagacaaccggcaacaccgataagagagccttcgtcgagacctggcagtccttttaccggaagaagcttaaggaggtgtggaaacctgccgtgcggtctggcggatctggcggaggctccaccagccccaagaaaaagagaaaagtctaagctgccttctgcggggcttgccttctggccatgcccttcttctctcccttgcacctgtacctcttggtctttgaataaagcctgagtaggaaggctagcaaaaaaaaaaaaaaaaaaaaaaaaaaaaaaaaaaaaaaaaaaaaaaaaaaaaaaaaaaaaaaaaaaaaaaaaaaaaaaaagcccagccggctccccaacctctaccgaggagggcacctctgagtccgccacccccgagagcggccctggcacctccaccgagcccagcgagggcagcgcacccggcagccctgccggcagccccacctccacagaggagggaaccagcaccgagcccagcgaaggcagcgccccaggcaccagcaccgagcctagtgagcaggagattaaacggatcaacaagatcagaagaagacttgtgaaagacagcaacaccaagaaggccggcaagacaggccccatgaaaaccctgctggttagagtgatgacacccgatctgagagagcggctggaaaacctgagaaagaagcctgaaaatatcccccagcccatcagcaatacatctagagccaacctgaataagctgctgaccgattacaccgaaatgaagaaggcgatcctgcatgtgtactgggaagagttccagaaggaccctgtgggcctgatgagccgggtggcccagcctgccagcaagaagatcgatcagaacaagctgaaacctgagatggacgagaagggcaacctgaccaccgccggctttgcctgctctcagtgtggccagcccctgttcgtgtacaagctggagcaggtgtctgagaagggcaaggcttacaccaactacttcggacggtgcaatgtggccgagcacgaaaagctgatcctgctggcccagctgaagcccgagaaggatagcgacgaagccgtgacatatagcctgggaaagtttgggcagagggccctggatttctacagcattcatgtgaccaaggagtccacccaccccgtgaagcccctggcccagatcgccggaaacagatacgcctccggacctgtgggaaaggccctgagcgacgcatgtatgggcacaatcgcctccttcctgtctaagtaccaggacatcatcatcgaacaccagaaggtggtgaagggcaaccagaagagactggagagcctgcgggagctggccggcaaggaaaacctggaataccctagcgtgaccctgccacctcagcctcacaccaaggagggcgttgatgcctacaacgaagtgatcgcccgggtgcgaatgtgggtgaacctgaacctgtggcagaagctgaagctaagcagagatgatgccaagcctctgctgagactgaagggattcccttcctttcctctggtcgagagacaggccaacgaagtggactggtgggacatggtgtgtaacgtgaagaagctgatcaacgagaaaaaggaggatggcaaggtgttttggcagaatctggctggctacaagagacaggaagccctgagaccatacctgagcagcgaggaagatcggaagaagggaaagaaattcgctcggtaccagctgggcgacctgctgctgcacctggaaaagaagcacggcgaggactggggaaaggtgtacgacgaggcctgggagcggattgacaagaaagtggaaggcctgagcaagcacatcaagctggaagaggaacggagaagcgaggacgcccagagcaaggccgccctgaccgactggctgcgggctaaggccagcttcgtgatcgagggcctgaaggaggccgacaaggacgagttctgcagatgcgagctgaagctgcagaagtggtacggggacctgcggggaaagcccttcgccatcgaagccgagaacagcatcctggacatcagcggcttcagcaagcagtacaactgtgccttcatctggcagaaggacggcgtgaagaagctgaacctgtacctgatcatcaactacttcaagggcggcaagctgcggttcaagaagatcaaacctgaagccttcgaagccaacagattctacaccgtgatcaacaaaaagagcggcgagatcgtgcccatggaggtgaacttcaacttcgacgaccccaacctgatcatcctgcctctggcctttggcaagagacagggcagagaattcatctggaacgacctgctgtccctggaaaccggcagcctgaagctggccaacggaagagtgatcgagaagacactgtacaacagaagaacccggcaggatgagcctgccctgttcgtggccctgaccttcgagcggcgggaggtcctggactcctccaatatcaaaccaatgaacctgatcggcgtggcaagaggcgaaaacatccccgccgtgatcgccctgaccgaccccgagggctgcccactgagccggtttaaggatagcctgggaaacccaacccacatcctgagaatcggcgagagctataaggagaagcagcggaccatccaggccaagaaggaggtggagcagcggagagccggcggctacagccggaagtacgccagcaaagccaagaatctggcagacgatatggtgagaaacaccgctagagatctgctgtactacgccgtgacccaggatgccatgctgatcttcgccaacctgagccggggcttcggccggcagggcaagcggaccttcatggccgagagacagtacacacggatggaggactggctgaccgccaagctggcctacgagggcctgagcaagacctacctgtccaagacactggcccagtacacctccaagacatgcagcaactgtgggtttaccatcaccagcgccgactacgacagggtgctggagaagctgaagaagacagcaacaggctggatgaccacaattaacggcaaggagctgaaggtggagggccagattacctactacaacagatacaagagacagaacgtagtcaaggacctgtccgtcgagctggatagactgagcgaagaatctgtgaacaacgacatctcctcctggacaaagggcagaagcggagaagctctgagcctcctgaagaaaagattctcccatagacccgtgcaggagaagttcgtgtgcctgaactgcggcttcgagacacacgcagccgagcaagccgccctgaacatcgccagatcctggctgttcctgcggagccaggagtacaagaaataccagacaaacaagacaaccggcaacaccgataagagagccttcgtcgagacctggcagtccttttaccggaagaagcttaaggaggtgtggaaacctgccgtgcggtctggcggatctggcggaggctccaccagccccaagaaaaagagaaaagtctaagctgccttctgcggggcttgccttctggccatgcccttcttctctcccttgcacctgtacctcttggtctttgaataaagcctgagtaggaaggctagcaaaaaaaaaaaaaaaaaaaaaaaaaaaaaaaaaaaaaaaaaaaaaaaaaaaaaaaaaaaaaaaaaaaaaaaaaaaaaaaa

SEQ ID NO: 10358 - RNA, 8787 nt, synthetic construct
  source 1..8787: mol_type = other RNA
aggaaataagagagaaaagaagagtaagaagaaatataagagccaccatggcccctaagaagaagcgtaaagtgagccggatgaaccacgaccaggagttcgacccccctaaggtgtaccctcccgtccccgccgagaagagaaagcccatccgggtcctgagcctgttcgatggcatcgccaccggtctgctggtgctgaaggacctgggcatccaggtggataggtacattgcctccgaggtgtgcgaggactccatcaccgtgggaatggtgcgtcatcagggcaagatcatgtacgtgggcgacgtgcggagcgtgacacagaagcatatccaggagtggggccctttcgacctggtgatcggcggcagcccttgcaatgacctgagcatcgtgaacccagcccggaagggcctgtacgagggaaccggcagactgttcttcgagttttacagactgctgcacgacgcccggcctaaggaaggcgacgaccggcccttcttttggctgttcgagaatgtggtggccatgggagtcagcgacaagcgggatattagccggttcctggagagcaaccccgtgatgatcgatgccaaggaagtgagcgccgcccaccgggccagatacttctggggcaatctgcctggcatgaacagacccctggccagcaccgtgaacgacaagctggagctgcaggagtgcctggagcacggccggatcgccaagttcagcaaggtgagaaccatcaccacccgaagcaacagcatcaaacaaggcaaggaccagcactttcctgtgttcatgaacgagaaggaggacatcctgtggtgtaccgagatggagagagtgttcgggttcccagtccactacacagatgtcagcaacatgtctagactggccagacagagactgctgggaagaagctggtccgtccctgtgatcagacacctgttcgcccctctgaaggagtacttcgcctgcgtgagcagcggcaacagcaacgccaacagccggggccccagcttctctagcggcctggtgccactgtccctgagagggagccacatgggccccatggagatctacaaaaccgtgagcgcctggaagcggcagcctgtgcgcgtgctgagcctgtttcggaatatcgataaagtcctgaaaagcctgggattcctggagagcggctctggctccggcggtggcaccctgaagtacgtggaggatgtgacaaacgtggtcagacgggatgtggagaagtggggccccttcgatctggtgtacggcagcacccaacccctgggcagctcttgtgaccggtgccctggctggtacatgtttcagttccaccggatcctgcagtacgccctgccgagacaggagtcccagcggccattcttttggattttcatggacaacttgctgctgaccgaggatgaccaggaaactaccactcggttcctgcagaccgaagccgtgaccctgcaggacgtgagaggccgggactaccagaacgccatgcgggtgtggtccaacatccctggactgaaaagcaagcacgcacctctgacccctaaagaagaggagtacctgcaggcccaggtgcggagcagaagcaagctggacgcccctaaggtggatctgctggtgaagaattgcctcctgcccctgagagagtacttcaagtatttcagccagaatagtctgcccctgggaggcagcggcggcggcccccaggacctgatgaccttcgacgacgtggccgtggagttcacccagtgggagtggggccagctgaaccccgcccagaaggacctgtacagggaggtgatgctggagaacttcaggaacctgaccctgctgggcctgctggtgagcaagccctacatgatctgccagctggaggagggcggcgagcccttcatggtgaacaccgagatcagcgtgggcgcccacagcgactgggagaggaggggcggcccaagcagcggcgcccctcctcccagcggcggcaggcggcccaagcagcggcgcccctcctcccagcggcggcagcccagccggctccccaacctctaccgaggagggcacctctgagtccgccacccccgagagcggccctggcacctccaccgagcccagcgagggcagcgcacccggcagccctgccggcagccccacctccacagaggagggaaccagcaccgagcccagcgaaggcagcgccccaggcaccagcaccgagcctagtgagcaggagattaaacggatcaacaagatcagaagaagacttgtgaaagacagcaacaccaagaaggccggcaagacaggccccatgaaaaccctgctggttagagtgatgacacccgatctgagagagcggctggaaaacctgagaaagaagcctgaaaatatcccccagcccatcagcaatacatctagagccaacctgaataagctgctgaccgattacaccgaaatgaagaaggcgatcctgcatgtgtactgggaagagttccagaaggaccctgtgggcctgatgagccgggtggcccagcctgccagcaagaagatcgatcagaacaagctgaaacctgagatggacgagaagggcaacctgaccaccgccggctttgcctgctctcagtgtggccagcccctgttcgtgtacaagctggagcaggtgtctgagaagggcaaggcttacaccaactacttcggacggtgcaatgtggccgagcacgaaaagctgatcctgctggcccagctgaagcccgagaaggatagcgacgaagccgtgacatatagcctgggaaagtttgggcagagggccctggatttctacagcattcatgtgaccaaggagtccacccaccccgtgaagcccctggcccagatcgccggaaacagatacgcctccggacctgtgggaaaggccctgagcgacgcatgtatgggcacaatcgcctccttcctgtctaagtaccaggacatcatcatcgaacaccagaaggtggtgaagggcaaccagaagagactggagagcctgcgggagctggccggcaaggaaaacctggaataccctagcgtgaccctgccacctcagcctcacaccaaggagggcgttgatgcctacaacgaagtgatcgcccgggtgcgaatgtgggtgaacctgaacctgtggcagaagctgaagctaagcagagatgatgccaagcctctgctgagactgaagggattcccttcctttcctctggtcgagagacaggccaacgaagtggactggtgggacatggtgtgtaacgtgaagaagctgatcaacgagaaaaaggaggatggcaaggtgttttggcagaatctggctggctacaagagacaggaagccctgagaccatacctgagcagcgaggaagatcggaagaagggaaagaaattcgctcggtaccagctgggcgacctgctgctgcacctggaaaagaagcacggcgaggactggggaaaggtgtacgacgaggcctgggagcggattgacaagaaagtggaaggcctgagcaagcacatcaagctggaagaggaacggagaagcgaggacgcccagagcaaggccgccctgaccgactggctgcgggctaaggccagcttcgtgatcgagggcctgaaggaggccgacaaggacgagttctgcagatgcgagctgaagctgcagaagtggtacggggacctgcggggaaagcccttcgccatcgaagccgagaacagcatcctggacatcagcggcttcagcaagcagtacaactgtgccttcatctggcagaaggacggcgtgaagaagctgaacctgtacctgatcatcaactacttcaagggcggcaagctgcggttcaagaagatcaaacctgaagccttcgaagccaacagattctacaccgtgatcaacaaaaagagcggcgagatcgtgcccatggaggtgaacttcaacttcgacgaccccaacctgatcatcctgcctctggcctttggcaagagacagggcagagaattcatctggaacgacctgctgtccctggaaaccggcagcctgaagctggccaacggaagagtgatcgagaagacactgtacaacagaagaacccggcaggatgagcctgccctgttcgtggccctgaccttcgagcggcgggaggtcctggactcctccaatatcaaaccaatgaacctgatcggcgtggcaagaggcgaaaacatccccgccgtgatcgccctgaccgaccccgagggctgcccactgagccggtttaaggatagcctgggaaacccaacccacatcctgagaatcggcgagagctataaggagaagcagcggaccatccaggccaagaaggaggtggagcagcggagagccggcggctacagccggaagtacgccagcaaagccaagaatctggcagacgatatggtgagaaacaccgctagagatctgctgtactacgccgtgacccaggatgccatgctgatcttcgccaacctgagccggggcttcggccggcagggcaagcggaccttcatggccgagagacagtacacacggatggaggactggctgaccgccaagctggcctacgagggcctgagcaagacctacctgtccaagacactggcccagtacacctccaagacatgcagcaactgtgggtttaccatcaccagcgccgactacgacagggtgctggagaagctgaagaagacagcaacaggctggatgaccacaattaacggcaaggagctgaaggtggagggccagattacctactacaacagatacaagagacagaacgtagtcaaggacctgtccgtcgagctggatagactgagcgaagaatctgtgaacaacgacatctcctcctggacaaagggcagaagcggagaagctctgagcctcctgaagaaaagattctcccatagacccgtgcaggagaagttcgtgtgcctgaactgcggcttcgagacacacgcagccgagcaagccgccctgaacatcgccagatcctggctgttcctgcggagccaggagtacaagaaataccagacaaacaagacaaccggcaacaccgataagagagccttcgtcgagacctggcagtccttttaccggaagaagcttaaggaggtgtggaaacctgccgtgcggtctggcggatctggcggaggctccaccagccccaagaaaaagagaaaagtctaagctgccttctgcggggcttgccttctggccatgcccttcttctctcccttgcacctgtacctcttggtctttgaataaagcctgagtaggaaggctagcaaaaaaaaaaaaaaaaaaaaaaaaaaaaaaaaaaaaaaaaaaaaaaaaaaaaaaaaaaaaaaaaaaaaaaaaaaaaaaaagcccagccggctccccaacctctaccgaggagggcacctctgagtccgccacccccgagagcggccctggcacctccaccgagcccagcgagggcagcgcacccggcagccctgccggcagccccacctccacagaggagggaaccagcaccgagcccagcgaaggcagcgccccaggcaccagcaccgagcctagtgagcaggagattaaacggatcaacaagatcagaagaagacttgtgaaagacagcaacaccaagaaggccggcaagacaggccccatgaaaaccctgctggttagagtgatgacacccgatctgagagagcggctggaaaacctgagaaagaagcctgaaaatatcccccagcccatcagcaatacatctagagccaacctgaataagctgctgaccgattacaccgaaatgaagaaggcgatcctgcatgtgtactgggaagagttccagaaggaccctgtgggcctgatgagccgggtggcccagcctgccagcaagaagatcgatcagaacaagctgaaacctgagatggacgagaagggcaacctgaccaccgccggctttgcctgctctcagtgtggccagcccctgttcgtgtacaagctggagcaggtgtctgagaagggcaaggcttacaccaactacttcggacggtgcaatgtggccgagcacgaaaagctgatcctgctggcccagctgaagcccgagaaggatagcgacgaagccgtgacatatagcctgggaaagtttgggcagagggccctggatttctacagcattcatgtgaccaaggagtccacccaccccgtgaagcccctggcccagatcgccggaaacagatacgcctccggacctgtgggaaaggccctgagcgacgcatgtatgggcacaatcgcctccttcctgtctaagtaccaggacatcatcatcgaacaccagaaggtggtgaagggcaaccagaagagactggagagcctgcgggagctggccggcaaggaaaacctggaataccctagcgtgaccctgccacctcagcctcacaccaaggagggcgttgatgcctacaacgaagtgatcgcccgggtgcgaatgtgggtgaacctgaacctgtggcagaagctgaagctaagcagagatgatgccaagcctctgctgagactgaagggattcccttcctttcctctggtcgagagacaggccaacgaagtggactggtgggacatggtgtgtaacgtgaagaagctgatcaacgagaaaaaggaggatggcaaggtgttttggcagaatctggctggctacaagagacaggaagccctgagaccatacctgagcagcgaggaagatcggaagaagggaaagaaattcgctcggtaccagctgggcgacctgctgctgcacctggaaaagaagcacggcgaggactggggaaaggtgtacgacgaggcctgggagcggattgacaagaaagtggaaggcctgagcaagcacatcaagctggaagaggaacggagaagcgaggacgcccagagcaaggccgccctgaccgactggctgcgggctaaggccagcttcgtgatcgagggcctgaaggaggccgacaaggacgagttctgcagatgcgagctgaagctgcagaagtggtacggggacctgcggggaaagcccttcgccatcgaagccgagaacagcatcctggacatcagcggcttcagcaagcagtacaactgtgccttcatctggcagaaggacggcgtgaagaagctgaacctgtacctgatcatcaactacttcaagggcggcaagctgcggttcaagaagatcaaacctgaagccttcgaagccaacagattctacaccgtgatcaacaaaaagagcggcgagatcgtgcccatggaggtgaacttcaacttcgacgaccccaacctgatcatcctgcctctggcctttggcaagagacagggcagagaattcatctggaacgacctgctgtccctggaaaccggcagcctgaagctggccaacggaagagtgatcgagaagacactgtacaacagaagaacccggcaggatgagcctgccctgttcgtggccctgaccttcgagcggcgggaggtcctggactcctccaatatcaaaccaatgaacctgatcggcgtggcaagaggcgaaaacatccccgccgtgatcgccctgaccgaccccgagggctgcccactgagccggtttaaggatagcctgggaaacccaacccacatcctgagaatcggcgagagctataaggagaagcagcggaccatccaggccaagaaggaggtggagcagcggagagccggcggctacagccggaagtacgccagcaaagccaagaatctggcagacgatatggtgagaaacaccgctagagatctgctgtactacgccgtgacccaggatgccatgctgatcttcgccaacctgagccggggcttcggccggcagggcaagcggaccttcatggccgagagacagtacacacggatggaggactggctgaccgccaagctggcctacgagggcctgagcaagacctacctgtccaagacactggcccagtacacctccaagacatgcagcaactgtgggtttaccatcaccagcgccgactacgacagggtgctggagaagctgaagaagacagcaacaggctggatgaccacaattaacggcaaggagctgaaggtggagggccagattacctactacaacagatacaagagacagaacgtagtcaaggacctgtccgtcgagctggatagactgagcgaagaatctgtgaacaacgacatctcctcctggacaaagggcagaagcggagaagctctgagcctcctgaagaaaagattctcccatagacccgtgcaggagaagttcgtgtgcctgaactgcggcttcgagacacacgcagccgagcaagccgccctgaacatcgccagatcctggctgttcctgcggagccaggagtacaagaaataccagacaaacaagacaaccggcaacaccgataagagagccttcgtcgagacctggcagtccttttaccggaagaagcttaaggaggtgtggaaacctgccgtgcggtctggcggatctggcggaggctccaccagccccaagaaaaagagaaaagtctaagctgccttctgcggggcttgccttctggccatgcccttcttctctcccttgcacctgtacctcttggtctttgaataaagcctgagtaggaaggctagcaaaaaaaaaaaaaaaaaaaaaaaaaaaaaaaaaaaaaaaaaaaaaaaaaaaaaaaaaaaaaaaaaaaaaaaaaaaaaaaa

SEQ ID NO: 10359 - RNA, 8787 nt, synthetic construct
  source 1..8787: mol_type = other RNA
aggaaataagagagaaaagaagagtaagaagaaatataagagccaccatggcccctaagaagaagcgtaaagtgagccggatgaaccacgaccaggagttcgacccccctaaggtgtaccctcccgtccccgccgagaagagaaagcccatccgggtcctgagcctgttcgatggcatcgccaccggtctgctggtgctgaaggacctgggcatccaggtggataggtacattgcctccgaggtgtgcgaggactccatcaccgtgggaatggtgcgtcatcagggcaagatcatgtacgtgggcgacgtgcggagcgtgacacagaagcatatccaggagtggggccctttcgacctggtgatcggcggcagcccttgcaatgacctgagcatcgtgaacccagcccggaagggcctgtacgagggaaccggcagactgttcttcgagttttacagactgctgcacgacgcccggcctaaggaaggcgacgaccggcccttcttttggctgttcgagaatgtggtggccatgggagtcagcgacaagcgggatattagccggttcctggagagcaaccccgtgatgatcgatgccaaggaagtgagcgccgcccaccgggccagatacttctggggcaatctgcctggcatgaacagacccctggccagcaccgtgaacgacaagctggagctgcaggagtgcctggagcacggccggatcgccaagttcagcaaggtgagaaccatcaccacccgaagcaacagcatcaaacaaggcaaggaccagcactttcctgtgttcatgaacgagaaggaggacatcctgtggtgtaccgagatggagagagtgttcgggttcccagtccactacacagatgtcagcaacatgtctagactggccagacagagactgctgggaagaagctggtccgtccctgtgatcagacacctgttcgcccctctgaaggagtacttcgcctgcgtgagcagcggcaacagcaacgccaacagccggggccccagcttctctagcggcctggtgccactgtccctgagagggagccacatgggccccatggagatctacaaaaccgtgagcgcctggaagcggcagcctgtgcgcgtgctgagcctgtttcggaatatcgataaagtcctgaaaagcctgggattcctggagagcggctctggctccggcggtggcaccctgaagtacgtggaggatgtgacaaacgtggtcagacgggatgtggagaagtggggccccttcgatctggtgtacggcagcacccaacccctgggcagctcttgtgaccggtgccctggctggtacatgtttcagttccaccggatcctgcagtacgccctgccgagacaggagtcccagcggccattcttttggattttcatggacaacttgctgctgaccgaggatgaccaggaaactaccactcggttcctgcagaccgaagccgtgaccctgcaggacgtgagaggccgggactaccagaacgccatgcgggtgtggtccaacatccctggactgaaaagcaagcacgcacctctgacccctaaagaagaggagtacctgcaggcccaggtgcggagcagaagcaagctggacgcccctaaggtggatctgctggtgaagaattgcctcctgcccctgagagagtacttcaagtatttcagccagaatagtctgcccctgggaggcagcggcggcggcaggagggagagcgtgaccttcgaggacgtggccgtgtacttcagcgagaacgagtggatcggcctgggccccgcccagagggccctgtacagggacgtgatgctggagaactacggcgccgtggccagcctggccttccccttccccaagcccgccctgatcagccagctggagaggggcgagaccccctggtgcagcgtgccccagggcgccctggacggcgaggcccccaggggcatcagcggcggcccaagcagcggcgcccctcctcccagcggcggcaggcggcccaagcagcggcgcccctcctcccagcggcggcagcccagccggctccccaacctctaccgaggagggcacctctgagtccgccacccccgagagcggccctggcacctccaccgagcccagcgagggcagcgcacccggcagccctgccggcagccccacctccacagaggagggaaccagcaccgagcccagcgaaggcagcgccccaggcaccagcaccgagcctagtgagcaggagattaaacggatcaacaagatcagaagaagacttgtgaaagacagcaacaccaagaaggccggcaagacaggccccatgaaaaccctgctggttagagtgatgacacccgatctgagagagcggctggaaaacctgagaaagaagcctgaaaatatcccccagcccatcagcaatacatctagagccaacctgaataagctgctgaccgattacaccgaaatgaagaaggcgatcctgcatgtgtactgggaagagttccagaaggaccctgtgggcctgatgagccgggtggcccagcctgccagcaagaagatcgatcagaacaagctgaaacctgagatggacgagaagggcaacctgaccaccgccggctttgcctgctctcagtgtggccagcccctgttcgtgtacaagctggagcaggtgtctgagaagggcaaggcttacaccaactacttcggacggtgcaatgtggccgagcacgaaaagctgatcctgctggcccagctgaagcccgagaaggatagcgacgaagccgtgacatatagcctgggaaagtttgggcagagggccctggatttctacagcattcatgtgaccaaggagtccacccaccccgtgaagcccctggcccagatcgccggaaacagatacgcctccggacctgtgggaaaggccctgagcgacgcatgtatgggcacaatcgcctccttcctgtctaagtaccaggacatcatcatcgaacaccagaaggtggtgaagggcaaccagaagagactggagagcctgcgggagctggccggcaaggaaaacctggaataccctagcgtgaccctgccacctcagcctcacaccaaggagggcgttgatgcctacaacgaagtgatcgcccgggtgcgaatgtgggtgaacctgaacctgtggcagaagctgaagctaagcagagatgatgccaagcctctgctgagactgaagggattcccttcctttcctctggtcgagagacaggccaacgaagtggactggtgggacatggtgtgtaacgtgaagaagctgatcaacgagaaaaaggaggatggcaaggtgttttggcagaatctggctggctacaagagacaggaagccctgagaccatacctgagcagcgaggaagatcggaagaagggaaagaaattcgctcggtaccagctgggcgacctgctgctgcacctggaaaagaagcacggcgaggactggggaaaggtgtacgacgaggcctgggagcggattgacaagaaagtggaaggcctgagcaagcacatcaagctggaagaggaacggagaagcgaggacgcccagagcaaggccgccctgaccgactggctgcgggctaaggccagcttcgtgatcgagggcctgaaggaggccgacaaggacgagttctgcagatgcgagctgaagctgcagaagtggtacggggacctgcggggaaagcccttcgccatcgaagccgagaacagcatcctggacatcagcggcttcagcaagcagtacaactgtgccttcatctggcagaaggacggcgtgaagaagctgaacctgtacctgatcatcaactacttcaagggcggcaagctgcggttcaagaagatcaaacctgaagccttcgaagccaacagattctacaccgtgatcaacaaaaagagcggcgagatcgtgcccatggaggtgaacttcaacttcgacgaccccaacctgatcatcctgcctctggcctttggcaagagacagggcagagaattcatctggaacgacctgctgtccctggaaaccggcagcctgaagctggccaacggaagagtgatcgagaagacactgtacaacagaagaacccggcaggatgagcctgccctgttcgtggccctgaccttcgagcggcgggaggtcctggactcctccaatatcaaaccaatgaacctgatcggcgtggcaagaggcgaaaacatccccgccgtgatcgccctgaccgaccccgagggctgcccactgagccggtttaaggatagcctgggaaacccaacccacatcctgagaatcggcgagagctataaggagaagcagcggaccatccaggccaagaaggaggtggagcagcggagagccggcggctacagccggaagtacgccagcaaagccaagaatctggcagacgatatggtgagaaacaccgctagagatctgctgtactacgccgtgacccaggatgccatgctgatcttcgccaacctgagccggggcttcggccggcagggcaagcggaccttcatggccgagagacagtacacacggatggaggactggctgaccgccaagctggcctacgagggcctgagcaagacctacctgtccaagacactggcccagtacacctccaagacatgcagcaactgtgggtttaccatcaccagcgccgactacgacagggtgctggagaagctgaagaagacagcaacaggctggatgaccacaattaacggcaaggagctgaaggtggagggccagattacctactacaacagatacaagagacagaacgtagtcaaggacctgtccgtcgagctggatagactgagcgaagaatctgtgaacaacgacatctcctcctggacaaagggcagaagcggagaagctctgagcctcctgaagaaaagattctcccatagacccgtgcaggagaagttcgtgtgcctgaactgcggcttcgagacacacgcagccgagcaagccgccctgaacatcgccagatcctggctgttcctgcggagccaggagtacaagaaataccagacaaacaagacaaccggcaacaccgataagagagccttcgtcgagacctggcagtccttttaccggaagaagcttaaggaggtgtggaaacctgccgtgcggtctggcggatctggcggaggctccaccagccccaagaaaaagagaaaagtctaagctgccttctgcggggcttgccttctggccatgcccttcttctctcccttgcacctgtacctcttggtctttgaataaagcctgagtaggaaggctagcaaaaaaaaaaaaaaaaaaaaaaaaaaaaaaaaaaaaaaaaaaaaaaaaaaaaaaaaaaaaaaaaaaaaaaaaaaaaaaaagcccagccggctccccaacctctaccgaggagggcacctctgagtccgccacccccgagagcggccctggcacctccaccgagcccagcgagggcagcgcacccggcagccctgccggcagccccacctccacagaggagggaaccagcaccgagcccagcgaaggcagcgccccaggcaccagcaccgagcctagtgagcaggagattaaacggatcaacaagatcagaagaagacttgtgaaagacagcaacaccaagaaggccggcaagacaggccccatgaaaaccctgctggttagagtgatgacacccgatctgagagagcggctggaaaacctgagaaagaagcctgaaaatatcccccagcccatcagcaatacatctagagccaacctgaataagctgctgaccgattacaccgaaatgaagaaggcgatcctgcatgtgtactgggaagagttccagaaggaccctgtgggcctgatgagccgggtggcccagcctgccagcaagaagatcgatcagaacaagctgaaacctgagatggacgagaagggcaacctgaccaccgccggctttgcctgctctcagtgtggccagcccctgttcgtgtacaagctggagcaggtgtctgagaagggcaaggcttacaccaactacttcggacggtgcaatgtggccgagcacgaaaagctgatcctgctggcccagctgaagcccgagaaggatagcgacgaagccgtgacatatagcctgggaaagtttgggcagagggccctggatttctacagcattcatgtgaccaaggagtccacccaccccgtgaagcccctggcccagatcgccggaaacagatacgcctccggacctgtgggaaaggccctgagcgacgcatgtatgggcacaatcgcctccttcctgtctaagtaccaggacatcatcatcgaacaccagaaggtggtgaagggcaaccagaagagactggagagcctgcgggagctggccggcaaggaaaacctggaataccctagcgtgaccctgccacctcagcctcacaccaaggagggcgttgatgcctacaacgaagtgatcgcccgggtgcgaatgtgggtgaacctgaacctgtggcagaagctgaagctaagcagagatgatgccaagcctctgctgagactgaagggattcccttcctttcctctggtcgagagacaggccaacgaagtggactggtgggacatggtgtgtaacgtgaagaagctgatcaacgagaaaaaggaggatggcaaggtgttttggcagaatctggctggctacaagagacaggaagccctgagaccatacctgagcagcgaggaagatcggaagaagggaaagaaattcgctcggtaccagctgggcgacctgctgctgcacctggaaaagaagcacggcgaggactggggaaaggtgtacgacgaggcctgggagcggattgacaagaaagtggaaggcctgagcaagcacatcaagctggaagaggaacggagaagcgaggacgcccagagcaaggccgccctgaccgactggctgcgggctaaggccagcttcgtgatcgagggcctgaaggaggccgacaaggacgagttctgcagatgcgagctgaagctgcagaagtggtacggggacctgcggggaaagcccttcgccatcgaagccgagaacagcatcctggacatcagcggcttcagcaagcagtacaactgtgccttcatctggcagaaggacggcgtgaagaagctgaacctgtacctgatcatcaactacttcaagggcggcaagctgcggttcaagaagatcaaacctgaagccttcgaagccaacagattctacaccgtgatcaacaaaaagagcggcgagatcgtgcccatggaggtgaacttcaacttcgacgaccccaacctgatcatcctgcctctggcctttggcaagagacagggcagagaattcatctggaacgacctgctgtccctggaaaccggcagcctgaagctggccaacggaagagtgatcgagaagacactgtacaacagaagaacccggcaggatgagcctgccctgttcgtggccctgaccttcgagcggcgggaggtcctggactcctccaatatcaaaccaatgaacctgatcggcgtggcaagaggcgaaaacatccccgccgtgatcgccctgaccgaccccgagggctgcccactgagccggtttaaggatagcctgggaaacccaacccacatcctgagaatcggcgagagctataaggagaagcagcggaccatccaggccaagaaggaggtggagcagcggagagccggcggctacagccggaagtacgccagcaaagccaagaatctggcagacgatatggtgagaaacaccgctagagatctgctgtactacgccgtgacccaggatgccatgctgatcttcgccaacctgagccggggcttcggccggcagggcaagcggaccttcatggccgagagacagtacacacggatggaggactggctgaccgccaagctggcctacgagggcctgagcaagacctacctgtccaagacactggcccagtacacctccaagacatgcagcaactgtgggtttaccatcaccagcgccgactacgacagggtgctggagaagctgaagaagacagcaacaggctggatgaccacaattaacggcaaggagctgaaggtggagggccagattacctactacaacagatacaagagacagaacgtagtcaaggacctgtccgtcgagctggatagactgagcgaagaatctgtgaacaacgacatctcctcctggacaaagggcagaagcggagaagctctgagcctcctgaagaaaagattctcccatagacccgtgcaggagaagttcgtgtgcctgaactgcggcttcgagacacacgcagccgagcaagccgccctgaacatcgccagatcctggctgttcctgcggagccaggagtacaagaaataccagacaaacaagacaaccggcaacaccgataagagagccttcgtcgagacctggcagtccttttaccggaagaagcttaaggaggtgtggaaacctgccgtgcggtctggcggatctggcggaggctccaccagccccaagaaaaagagaaaagtctaagctgccttctgcggggcttgccttctggccatgcccttcttctctcccttgcacctgtacctcttggtctttgaataaagcctgagtaggaaggctagcaaaaaaaaaaaaaaaaaaaaaaaaaaaaaaaaaaaaaaaaaaaaaaaaaaaaaaaaaaaaaaaaaaaaaaaaaaaaaaaa

SEQ ID NO: 10360 - RNA, 8787 nt, synthetic construct
  source 1..8787: mol_type = other RNA
aggaaataagagagaaaagaagagtaagaagaaatataagagccaccatggcccctaagaagaagcgtaaagtgagccggatgaaccacgaccaggagttcgacccccctaaggtgtaccctcccgtccccgccgagaagagaaagcccatccgggtcctgagcctgttcgatggcatcgccaccggtctgctggtgctgaaggacctgggcatccaggtggataggtacattgcctccgaggtgtgcgaggactccatcaccgtgggaatggtgcgtcatcagggcaagatcatgtacgtgggcgacgtgcggagcgtgacacagaagcatatccaggagtggggccctttcgacctggtgatcggcggcagcccttgcaatgacctgagcatcgtgaacccagcccggaagggcctgtacgagggaaccggcagactgttcttcgagttttacagactgctgcacgacgcccggcctaaggaaggcgacgaccggcccttcttttggctgttcgagaatgtggtggccatgggagtcagcgacaagcgggatattagccggttcctggagagcaaccccgtgatgatcgatgccaaggaagtgagcgccgcccaccgggccagatacttctggggcaatctgcctggcatgaacagacccctggccagcaccgtgaacgacaagctggagctgcaggagtgcctggagcacggccggatcgccaagttcagcaaggtgagaaccatcaccacccgaagcaacagcatcaaacaaggcaaggaccagcactttcctgtgttcatgaacgagaaggaggacatcctgtggtgtaccgagatggagagagtgttcgggttcccagtccactacacagatgtcagcaacatgtctagactggccagacagagactgctgggaagaagctggtccgtccctgtgatcagacacctgttcgcccctctgaaggagtacttcgcctgcgtgagcagcggcaacagcaacgccaacagccggggccccagcttctctagcggcctggtgccactgtccctgagagggagccacatgggccccatggagatctacaaaaccgtgagcgcctggaagcggcagcctgtgcgcgtgctgagcctgtttcggaatatcgataaagtcctgaaaagcctgggattcctggagagcggctctggctccggcggtggcaccctgaagtacgtggaggatgtgacaaacgtggtcagacgggatgtggagaagtggggccccttcgatctggtgtacggcagcacccaacccctgggcagctcttgtgaccggtgccctggctggtacatgtttcagttccaccggatcctgcagtacgccctgccgagacaggagtcccagcggccattcttttggattttcatggacaacttgctgctgaccgaggatgaccaggaaactaccactcggttcctgcagaccgaagccgtgaccctgcaggacgtgagaggccgggactaccagaacgccatgcgggtgtggtccaacatccctggactgaaaagcaagcacgcacctctgacccctaaagaagaggagtacctgcaggcccaggtgcggagcagaagcaagctggacgcccctaaggtggatctgctggtgaagaattgcctcctgcccctgagagagtacttcaagtatttcagccagaatagtctgcccctgggaggcagcggcggcggccaggccgaggtgaccttcgaggacgtggccgtgtacctgagcagggaggagtggggcaggctgggccccgcccagaggggcctgtacagggacgtgatgctggagacctacggcaacctggtgagcctgggcgtgggccccgccggccccaagcccggcgtgatcagccagctggagaggggcgacgagccctgggtgctggacgtgcagggcaccagcggcaaggagcacctgagggtgaacggcggcccaagcagcggcgcccctcctcccagcggcggcaggcggcccaagcagcggcgcccctcctcccagcggcggcagcccagccggctccccaacctctaccgaggagggcacctctgagtccgccacccccgagagcggccctggcacctccaccgagcccagcgagggcagcgcacccggcagccctgccggcagccccacctccacagaggagggaaccagcaccgagcccagcgaaggcagcgccccaggcaccagcaccgagcctagtgagcaggagattaaacggatcaacaagatcagaagaagacttgtgaaagacagcaacaccaagaaggccggcaagacaggccccatgaaaaccctgctggttagagtgatgacacccgatctgagagagcggctggaaaacctgagaaagaagcctgaaaatatcccccagcccatcagcaatacatctagagccaacctgaataagctgctgaccgattacaccgaaatgaagaaggcgatcctgcatgtgtactgggaagagttccagaaggaccctgtgggcctgatgagccgggtggcccagcctgccagcaagaagatcgatcagaacaagctgaaacctgagatggacgagaagggcaacctgaccaccgccggctttgcctgctctcagtgtggccagcccctgttcgtgtacaagctggagcaggtgtctgagaagggcaaggcttacaccaactacttcggacggtgcaatgtggccgagcacgaaaagctgatcctgctggcccagctgaagcccgagaaggatagcgacgaagccgtgacatatagcctgggaaagtttgggcagagggccctggatttctacagcattcatgtgaccaaggagtccacccaccccgtgaagcccctggcccagatcgccggaaacagatacgcctccggacctgtgggaaaggccctgagcgacgcatgtatgggcacaatcgcctccttcctgtctaagtaccaggacatcatcatcgaacaccagaaggtggtgaagggcaaccagaagagactggagagcctgcgggagctggccggcaaggaaaacctggaataccctagcgtgaccctgccacctcagcctcacaccaaggagggcgttgatgcctacaacgaagtgatcgcccgggtgcgaatgtgggtgaacctgaacctgtggcagaagctgaagctaagcagagatgatgccaagcctctgctgagactgaagggattcccttcctttcctctggtcgagagacaggccaacgaagtggactggtgggacatggtgtgtaacgtgaagaagctgatcaacgagaaaaaggaggatggcaaggtgttttggcagaatctggctggctacaagagacaggaagccctgagaccatacctgagcagcgaggaagatcggaagaagggaaagaaattcgctcggtaccagctgggcgacctgctgctgcacctggaaaagaagcacggcgaggactggggaaaggtgtacgacgaggcctgggagcggattgacaagaaagtggaaggcctgagcaagcacatcaagctggaagaggaacggagaagcgaggacgcccagagcaaggccgccctgaccgactggctgcgggctaaggccagcttcgtgatcgagggcctgaaggaggccgacaaggacgagttctgcagatgcgagctgaagctgcagaagtggtacggggacctgcggggaaagcccttcgccatcgaagccgagaacagcatcctggacatcagcggcttcagcaagcagtacaactgtgccttcatctggcagaaggacggcgtgaagaagctgaacctgtacctgatcatcaactacttcaagggcggcaagctgcggttcaagaagatcaaacctgaagccttcgaagccaacagattctacaccgtgatcaacaaaaagagcggcgagatcgtgcccatggaggtgaacttcaacttcgacgaccccaacctgatcatcctgcctctggcctttggcaagagacagggcagagaattcatctggaacgacctgctgtccctggaaaccggcagcctgaagctggccaacggaagagtgatcgagaagacactgtacaacagaagaacccggcaggatgagcctgccctgttcgtggccctgaccttcgagcggcgggaggtcctggactcctccaatatcaaaccaatgaacctgatcggcgtggcaagaggcgaaaacatccccgccgtgatcgccctgaccgaccccgagggctgcccactgagccggtttaaggatagcctgggaaacccaacccacatcctgagaatcggcgagagctataaggagaagcagcggaccatccaggccaagaaggaggtggagcagcggagagccggcggctacagccggaagtacgccagcaaagccaagaatctggcagacgatatggtgagaaacaccgctagagatctgctgtactacgccgtgacccaggatgccatgctgatcttcgccaacctgagccggggcttcggccggcagggcaagcggaccttcatggccgagagacagtacacacggatggaggactggctgaccgccaagctggcctacgagggcctgagcaagacctacctgtccaagacactggcccagtacacctccaagacatgcagcaactgtgggtttaccatcaccagcgccgactacgacagggtgctggagaagctgaagaagacagcaacaggctggatgaccacaattaacggcaaggagctgaaggtggagggccagattacctactacaacagatacaagagacagaacgtagtcaaggacctgtccgtcgagctggatagactgagcgaagaatctgtgaacaacgacatctcctcctggacaaagggcagaagcggagaagctctgagcctcctgaagaaaagattctcccatagacccgtgcaggagaagttcgtgtgcctgaactgcggcttcgagacacacgcagccgagcaagccgccctgaacatcgccagatcctggctgttcctgcggagccaggagtacaagaaataccagacaaacaagacaaccggcaacaccgataagagagccttcgtcgagacctggcagtccttttaccggaagaagcttaaggaggtgtggaaacctgccgtgcggtctggcggatctggcggaggctccaccagccccaagaaaaagagaaaagtctaagctgccttctgcggggcttgccttctggccatgcccttcttctctcccttgcacctgtacctcttggtctttgaataaagcctgagtaggaaggctagcaaaaaaaaaaaaaaaaaaaaaaaaaaaaaaaaaaaaaaaaaaaaaaaaaaaaaaaaaaaaaaaaaaaaaaaaaaaaaaaagcccagccggctccccaacctctaccgaggagggcacctctgagtccgccacccccgagagcggccctggcacctccaccgagcccagcgagggcagcgcacccggcagccctgccggcagccccacctccacagaggagggaaccagcaccgagcccagcgaaggcagcgccccaggcaccagcaccgagcctagtgagcaggagattaaacggatcaacaagatcagaagaagacttgtgaaagacagcaacaccaagaaggccggcaagacaggccccatgaaaaccctgctggttagagtgatgacacccgatctgagagagcggctggaaaacctgagaaagaagcctgaaaatatcccccagcccatcagcaatacatctagagccaacctgaataagctgctgaccgattacaccgaaatgaagaaggcgatcctgcatgtgtactgggaagagttccagaaggaccctgtgggcctgatgagccgggtggcccagcctgccagcaagaagatcgatcagaacaagctgaaacctgagatggacgagaagggcaacctgaccaccgccggctttgcctgctctcagtgtggccagcccctgttcgtgtacaagctggagcaggtgtctgagaagggcaaggcttacaccaactacttcggacggtgcaatgtggccgagcacgaaaagctgatcctgctggcccagctgaagcccgagaaggatagcgacgaagccgtgacatatagcctgggaaagtttgggcagagggccctggatttctacagcattcatgtgaccaaggagtccacccaccccgtgaagcccctggcccagatcgccggaaacagatacgcctccggacctgtgggaaaggccctgagcgacgcatgtatgggcacaatcgcctccttcctgtctaagtaccaggacatcatcatcgaacaccagaaggtggtgaagggcaaccagaagagactggagagcctgcgggagctggccggcaaggaaaacctggaataccctagcgtgaccctgccacctcagcctcacaccaaggagggcgttgatgcctacaacgaagtgatcgcccgggtgcgaatgtgggtgaacctgaacctgtggcagaagctgaagctaagcagagatgatgccaagcctctgctgagactgaagggattcccttcctttcctctggtcgagagacaggccaacgaagtggactggtgggacatggtgtgtaacgtgaagaagctgatcaacgagaaaaaggaggatggcaaggtgttttggcagaatctggctggctacaagagacaggaagccctgagaccatacctgagcagcgaggaagatcggaagaagggaaagaaattcgctcggtaccagctgggcgacctgctgctgcacctggaaaagaagcacggcgaggactggggaaaggtgtacgacgaggcctgggagcggattgacaagaaagtggaaggcctgagcaagcacatcaagctggaagaggaacggagaagcgaggacgcccagagcaaggccgccctgaccgactggctgcgggctaaggccagcttcgtgatcgagggcctgaaggaggccgacaaggacgagttctgcagatgcgagctgaagctgcagaagtggtacggggacctgcggggaaagcccttcgccatcgaagccgagaacagcatcctggacatcagcggcttcagcaagcagtacaactgtgccttcatctggcagaaggacggcgtgaagaagctgaacctgtacctgatcatcaactacttcaagggcggcaagctgcggttcaagaagatcaaacctgaagccttcgaagccaacagattctacaccgtgatcaacaaaaagagcggcgagatcgtgcccatggaggtgaacttcaacttcgacgaccccaacctgatcatcctgcctctggcctttggcaagagacagggcagagaattcatctggaacgacctgctgtccctggaaaccggcagcctgaagctggccaacggaagagtgatcgagaagacactgtacaacagaagaacccggcaggatgagcctgccctgttcgtggccctgaccttcgagcggcgggaggtcctggactcctccaatatcaaaccaatgaacctgatcggcgtggcaagaggcgaaaacatccccgccgtgatcgccctgaccgaccccgagggctgcccactgagccggtttaaggatagcctgggaaacccaacccacatcctgagaatcggcgagagctataaggagaagcagcggaccatccaggccaagaaggaggtggagcagcggagagccggcggctacagccggaagtacgccagcaaagccaagaatctggcagacgatatggtgagaaacaccgctagagatctgctgtactacgccgtgacccaggatgccatgctgatcttcgccaacctgagccggggcttcggccggcagggcaagcggaccttcatggccgagagacagtacacacggatggaggactggctgaccgccaagctggcctacgagggcctgagcaagacctacctgtccaagacactggcccagtacacctccaagacatgcagcaactgtgggtttaccatcaccagcgccgactacgacagggtgctggagaagctgaagaagacagcaacaggctggatgaccacaattaacggcaaggagctgaaggtggagggccagattacctactacaacagatacaagagacagaacgtagtcaaggacctgtccgtcgagctggatagactgagcgaagaatctgtgaacaacgacatctcctcctggacaaagggcagaagcggagaagctctgagcctcctgaagaaaagattctcccatagacccgtgcaggagaagttcgtgtgcctgaactgcggcttcgagacacacgcagccgagcaagccgccctgaacatcgccagatcctggctgttcctgcggagccaggagtacaagaaataccagacaaacaagacaaccggcaacaccgataagagagccttcgtcgagacctggcagtccttttaccggaagaagcttaaggaggtgtggaaacctgccgtgcggtctggcggatctggcggaggctccaccagccccaagaaaaagagaaaagtctaagctgccttctgcggggcttgccttctggccatgcccttcttctctcccttgcacctgtacctcttggtctttgaataaagcctgagtaggaaggctagcaaaaaaaaaaaaaaaaaaaaaaaaaaaaaaaaaaaaaaaaaaaaaaaaaaaaaaaaaaaaaaaaaaaaaaaaaaaaaaaa

SEQ ID NO: 10361 - RNA, 8787 nt, synthetic construct
  source 1..8787: mol_type = other RNA
aggaaataagagagaaaagaagagtaagaagaaatataagagccaccatggcccctaagaagaagcgtaaagtgagccggatgaaccacgaccaggagttcgacccccctaaggtgtaccctcccgtccccgccgagaagagaaagcccatccgggtcctgagcctgttcgatggcatcgccaccggtctgctggtgctgaaggacctgggcatccaggtggataggtacattgcctccgaggtgtgcgaggactccatcaccgtgggaatggtgcgtcatcagggcaagatcatgtacgtgggcgacgtgcggagcgtgacacagaagcatatccaggagtggggccctttcgacctggtgatcggcggcagcccttgcaatgacctgagcatcgtgaacccagcccggaagggcctgtacgagggaaccggcagactgttcttcgagttttacagactgctgcacgacgcccggcctaaggaaggcgacgaccggcccttcttttggctgttcgagaatgtggtggccatgggagtcagcgacaagcgggatattagccggttcctggagagcaaccccgtgatgatcgatgccaaggaagtgagcgccgcccaccgggccagatacttctggggcaatctgcctggcatgaacagacccctggccagcaccgtgaacgacaagctggagctgcaggagtgcctggagcacggccggatcgccaagttcagcaaggtgagaaccatcaccacccgaagcaacagcatcaaacaaggcaaggaccagcactttcctgtgttcatgaacgagaaggaggacatcctgtggtgtaccgagatggagagagtgttcgggttcccagtccactacacagatgtcagcaacatgtctagactggccagacagagactgctgggaagaagctggtccgtccctgtgatcagacacctgttcgcccctctgaaggagtacttcgcctgcgtgagcagcggcaacagcaacgccaacagccggggccccagcttctctagcggcctggtgccactgtccctgagagggagccacatgggccccatggagatctacaaaaccgtgagcgcctggaagcggcagcctgtgcgcgtgctgagcctgtttcggaatatcgataaagtcctgaaaagcctgggattcctggagagcggctctggctccggcggtggcaccctgaagtacgtggaggatgtgacaaacgtggtcagacgggatgtggagaagtggggccccttcgatctggtgtacggcagcacccaacccctgggcagctcttgtgaccggtgccctggctggtacatgtttcagttccaccggatcctgcagtacgccctgccgagacaggagtcccagcggccattcttttggattttcatggacaacttgctgctgaccgaggatgaccaggaaactaccactcggttcctgcagaccgaagccgtgaccctgcaggacgtgagaggccgggactaccagaacgccatgcgggtgtggtccaacatccctggactgaaaagcaagcacgcacctctgacccctaaagaagaggagtacctgcaggcccaggtgcggagcagaagcaagctggacgcccctaaggtggatctgctggtgaagaattgcctcctgcccctgagagagtacttcaagtatttcagccagaatagtctgcccctgggaggcagcggcggcggcgcccagggccaggtgaacttcgaggacgtggccgtgtacttcagccccgaggagtggggcctgctggacgaggcccagaggctgctgtacagggacgtgatgctggagaacctggccctgatggccagcctgggctacgagagcagcatgagccacggcttcgccagcctggagctgggcagcaagccctggggcagcgactgggccgacgtgacccccgccaggaccagggacacccagggcggcggcccaagcagcggcgcccctcctcccagcggcggcaggcggcccaagcagcggcgcccctcctcccagcggcggcagcccagccggctccccaacctctaccgaggagggcacctctgagtccgccacccccgagagcggccctggcacctccaccgagcccagcgagggcagcgcacccggcagccctgccggcagccccacctccacagaggagggaaccagcaccgagcccagcgaaggcagcgccccaggcaccagcaccgagcctagtgagcaggagattaaacggatcaacaagatcagaagaagacttgtgaaagacagcaacaccaagaaggccggcaagacaggccccatgaaaaccctgctggttagagtgatgacacccgatctgagagagcggctggaaaacctgagaaagaagcctgaaaatatcccccagcccatcagcaatacatctagagccaacctgaataagctgctgaccgattacaccgaaatgaagaaggcgatcctgcatgtgtactgggaagagttccagaaggaccctgtgggcctgatgagccgggtggcccagcctgccagcaagaagatcgatcagaacaagctgaaacctgagatggacgagaagggcaacctgaccaccgccggctttgcctgctctcagtgtggccagcccctgttcgtgtacaagctggagcaggtgtctgagaagggcaaggcttacaccaactacttcggacggtgcaatgtggccgagcacgaaaagctgatcctgctggcccagctgaagcccgagaaggatagcgacgaagccgtgacatatagcctgggaaagtttgggcagagggccctggatttctacagcattcatgtgaccaaggagtccacccaccccgtgaagcccctggcccagatcgccggaaacagatacgcctccggacctgtgggaaaggccctgagcgacgcatgtatgggcacaatcgcctccttcctgtctaagtaccaggacatcatcatcgaacaccagaaggtggtgaagggcaaccagaagagactggagagcctgcgggagctggccggcaaggaaaacctggaataccctagcgtgaccctgccacctcagcctcacaccaaggagggcgttgatgcctacaacgaagtgatcgcccgggtgcgaatgtgggtgaacctgaacctgtggcagaagctgaagctaagcagagatgatgccaagcctctgctgagactgaagggattcccttcctttcctctggtcgagagacaggccaacgaagtggactggtgggacatggtgtgtaacgtgaagaagctgatcaacgagaaaaaggaggatggcaaggtgttttggcagaatctggctggctacaagagacaggaagccctgagaccatacctgagcagcgaggaagatcggaagaagggaaagaaattcgctcggtaccagctgggcgacctgctgctgcacctggaaaagaagcacggcgaggactggggaaaggtgtacgacgaggcctgggagcggattgacaagaaagtggaaggcctgagcaagcacatcaagctggaagaggaacggagaagcgaggacgcccagagcaaggccgccctgaccgactggctgcgggctaaggccagcttcgtgatcgagggcctgaaggaggccgacaaggacgagttctgcagatgcgagctgaagctgcagaagtggtacggggacctgcggggaaagcccttcgccatcgaagccgagaacagcatcctggacatcagcggcttcagcaagcagtacaactgtgccttcatctggcagaaggacggcgtgaagaagctgaacctgtacctgatcatcaactacttcaagggcggcaagctgcggttcaagaagatcaaacctgaagccttcgaagccaacagattctacaccgtgatcaacaaaaagagcggcgagatcgtgcccatggaggtgaacttcaacttcgacgaccccaacctgatcatcctgcctctggcctttggcaagagacagggcagagaattcatctggaacgacctgctgtccctggaaaccggcagcctgaagctggccaacggaagagtgatcgagaagacactgtacaacagaagaacccggcaggatgagcctgccctgttcgtggccctgaccttcgagcggcgggaggtcctggactcctccaatatcaaaccaatgaacctgatcggcgtggcaagaggcgaaaacatccccgccgtgatcgccctgaccgaccccgagggctgcccactgagccggtttaaggatagcctgggaaacccaacccacatcctgagaatcggcgagagctataaggagaagcagcggaccatccaggccaagaaggaggtggagcagcggagagccggcggctacagccggaagtacgccagcaaagccaagaatctggcagacgatatggtgagaaacaccgctagagatctgctgtactacgccgtgacccaggatgccatgctgatcttcgccaacctgagccggggcttcggccggcagggcaagcggaccttcatggccgagagacagtacacacggatggaggactggctgaccgccaagctggcctacgagggcctgagcaagacctacctgtccaagacactggcccagtacacctccaagacatgcagcaactgtgggtttaccatcaccagcgccgactacgacagggtgctggagaagctgaagaagacagcaacaggctggatgaccacaattaacggcaaggagctgaaggtggagggccagattacctactacaacagatacaagagacagaacgtagtcaaggacctgtccgtcgagctggatagactgagcgaagaatctgtgaacaacgacatctcctcctggacaaagggcagaagcggagaagctctgagcctcctgaagaaaagattctcccatagacccgtgcaggagaagttcgtgtgcctgaactgcggcttcgagacacacgcagccgagcaagccgccctgaacatcgccagatcctggctgttcctgcggagccaggagtacaagaaataccagacaaacaagacaaccggcaacaccgataagagagccttcgtcgagacctggcagtccttttaccggaagaagcttaaggaggtgtggaaacctgccgtgcggtctggcggatctggcggaggctccaccagccccaagaaaaagagaaaagtctaagctgccttctgcggggcttgccttctggccatgcccttcttctctcccttgcacctgtacctcttggtctttgaataaagcctgagtaggaaggctagcaaaaaaaaaaaaaaaaaaaaaaaaaaaaaaaaaaaaaaaaaaaaaaaaaaaaaaaaaaaaaaaaaaaaaaaaaaaaaaaagcccagccggctccccaacctctaccgaggagggcacctctgagtccgccacccccgagagcggccctggcacctccaccgagcccagcgagggcagcgcacccggcagccctgccggcagccccacctccacagaggagggaaccagcaccgagcccagcgaaggcagcgccccaggcaccagcaccgagcctagtgagcaggagattaaacggatcaacaagatcagaagaagacttgtgaaagacagcaacaccaagaaggccggcaagacaggccccatgaaaaccctgctggttagagtgatgacacccgatctgagagagcggctggaaaacctgagaaagaagcctgaaaatatcccccagcccatcagcaatacatctagagccaacctgaataagctgctgaccgattacaccgaaatgaagaaggcgatcctgcatgtgtactgggaagagttccagaaggaccctgtgggcctgatgagccgggtggcccagcctgccagcaagaagatcgatcagaacaagctgaaacctgagatggacgagaagggcaacctgaccaccgccggctttgcctgctctcagtgtggccagcccctgttcgtgtacaagctggagcaggtgtctgagaagggcaaggcttacaccaactacttcggacggtgcaatgtggccgagcacgaaaagctgatcctgctggcccagctgaagcccgagaaggatagcgacgaagccgtgacatatagcctgggaaagtttgggcagagggccctggatttctacagcattcatgtgaccaaggagtccacccaccccgtgaagcccctggcccagatcgccggaaacagatacgcctccggacctgtgggaaaggccctgagcgacgcatgtatgggcacaatcgcctccttcctgtctaagtaccaggacatcatcatcgaacaccagaaggtggtgaagggcaaccagaagagactggagagcctgcgggagctggccggcaaggaaaacctggaataccctagcgtgaccctgccacctcagcctcacaccaaggagggcgttgatgcctacaacgaagtgatcgcccgggtgcgaatgtgggtgaacctgaacctgtggcagaagctgaagctaagcagagatgatgccaagcctctgctgagactgaagggattcccttcctttcctctggtcgagagacaggccaacgaagtggactggtgggacatggtgtgtaacgtgaagaagctgatcaacgagaaaaaggaggatggcaaggtgttttggcagaatctggctggctacaagagacaggaagccctgagaccatacctgagcagcgaggaagatcggaagaagggaaagaaattcgctcggtaccagctgggcgacctgctgctgcacctggaaaagaagcacggcgaggactggggaaaggtgtacgacgaggcctgggagcggattgacaagaaagtggaaggcctgagcaagcacatcaagctggaagaggaacggagaagcgaggacgcccagagcaaggccgccctgaccgactggctgcgggctaaggccagcttcgtgatcgagggcctgaaggaggccgacaaggacgagttctgcagatgcgagctgaagctgcagaagtggtacggggacctgcggggaaagcccttcgccatcgaagccgagaacagcatcctggacatcagcggcttcagcaagcagtacaactgtgccttcatctggcagaaggacggcgtgaagaagctgaacctgtacctgatcatcaactacttcaagggcggcaagctgcggttcaagaagatcaaacctgaagccttcgaagccaacagattctacaccgtgatcaacaaaaagagcggcgagatcgtgcccatggaggtgaacttcaacttcgacgaccccaacctgatcatcctgcctctggcctttggcaagagacagggcagagaattcatctggaacgacctgctgtccctggaaaccggcagcctgaagctggccaacggaagagtgatcgagaagacactgtacaacagaagaacccggcaggatgagcctgccctgttcgtggccctgaccttcgagcggcgggaggtcctggactcctccaatatcaaaccaatgaacctgatcggcgtggcaagaggcgaaaacatccccgccgtgatcgccctgaccgaccccgagggctgcccactgagccggtttaaggatagcctgggaaacccaacccacatcctgagaatcggcgagagctataaggagaagcagcggaccatccaggccaagaaggaggtggagcagcggagagccggcggctacagccggaagtacgccagcaaagccaagaatctggcagacgatatggtgagaaacaccgctagagatctgctgtactacgccgtgacccaggatgccatgctgatcttcgccaacctgagccggggcttcggccggcagggcaagcggaccttcatggccgagagacagtacacacggatggaggactggctgaccgccaagctggcctacgagggcctgagcaagacctacctgtccaagacactggcccagtacacctccaagacatgcagcaactgtgggtttaccatcaccagcgccgactacgacagggtgctggagaagctgaagaagacagcaacaggctggatgaccacaattaacggcaaggagctgaaggtggagggccagattacctactacaacagatacaagagacagaacgtagtcaaggacctgtccgtcgagctggatagactgagcgaagaatctgtgaacaacgacatctcctcctggacaaagggcagaagcggagaagctctgagcctcctgaagaaaagattctcccatagacccgtgcaggagaagttcgtgtgcctgaactgcggcttcgagacacacgcagccgagcaagccgccctgaacatcgccagatcctggctgttcctgcggagccaggagtacaagaaataccagacaaacaagacaaccggcaacaccgataagagagccttcgtcgagacctggcagtccttttaccggaagaagcttaaggaggtgtggaaacctgccgtgcggtctggcggatctggcggaggctccaccagccccaagaaaaagagaaaagtctaagctgccttctgcggggcttgccttctggccatgcccttcttctctcccttgcacctgtacctcttggtctttgaataaagcctgagtaggaaggctagcaaaaaaaaaaaaaaaaaaaaaaaaaaaaaaaaaaaaaaaaaaaaaaaaaaaaaaaaaaaaaaaaaaaaaaaaaaaaaaaa

SEQ ID NO: 10362 - RNA, 8787 nt, synthetic construct
  source 1..8787: mol_type = other RNA
aggaaataagagagaaaagaagagtaagaagaaatataagagccaccatggcccctaagaagaagcgtaaagtgagccggatgaaccacgaccaggagttcgacccccctaaggtgtaccctcccgtccccgccgagaagagaaagcccatccgggtcctgagcctgttcgatggcatcgccaccggtctgctggtgctgaaggacctgggcatccaggtggataggtacattgcctccgaggtgtgcgaggactccatcaccgtgggaatggtgcgtcatcagggcaagatcatgtacgtgggcgacgtgcggagcgtgacacagaagcatatccaggagtggggccctttcgacctggtgatcggcggcagcccttgcaatgacctgagcatcgtgaacccagcccggaagggcctgtacgagggaaccggcagactgttcttcgagttttacagactgctgcacgacgcccggcctaaggaaggcgacgaccggcccttcttttggctgttcgagaatgtggtggccatgggagtcagcgacaagcgggatattagccggttcctggagagcaaccccgtgatgatcgatgccaaggaagtgagcgccgcccaccgggccagatacttctggggcaatctgcctggcatgaacagacccctggccagcaccgtgaacgacaagctggagctgcaggagtgcctggagcacggccggatcgccaagttcagcaaggtgagaaccatcaccacccgaagcaacagcatcaaacaaggcaaggaccagcactttcctgtgttcatgaacgagaaggaggacatcctgtggtgtaccgagatggagagagtgttcgggttcccagtccactacacagatgtcagcaacatgtctagactggccagacagagactgctgggaagaagctggtccgtccctgtgatcagacacctgttcgcccctctgaaggagtacttcgcctgcgtgagcagcggcaacagcaacgccaacagccggggccccagcttctctagcggcctggtgccactgtccctgagagggagccacatgggccccatggagatctacaaaaccgtgagcgcctggaagcggcagcctgtgcgcgtgctgagcctgtttcggaatatcgataaagtcctgaaaagcctgggattcctggagagcggctctggctccggcggtggcaccctgaagtacgtggaggatgtgacaaacgtggtcagacgggatgtggagaagtggggccccttcgatctggtgtacggcagcacccaacccctgggcagctcttgtgaccggtgccctggctggtacatgtttcagttccaccggatcctgcagtacgccctgccgagacaggagtcccagcggccattcttttggattttcatggacaacttgctgctgaccgaggatgaccaggaaactaccactcggttcctgcagaccgaagccgtgaccctgcaggacgtgagaggccgggactaccagaacgccatgcgggtgtggtccaacatccctggactgaaaagcaagcacgcacctctgacccctaaagaagaggagtacctgcaggcccaggtgcggagcagaagcaagctggacgcccctaaggtggatctgctggtgaagaattgcctcctgcccctgagagagtacttcaagtatttcagccagaatagtctgcccctgggaggcagcggcggcggccaggccgaggtgaccttcgaggacgtggccgtgctgctgagccaggaggagtggggcctgctgggccccagccagaagggcctgtacagggaggtgatgctggagacctacaggaacctgctgagcctgggcgccggcctggccgaccccaagcccgaggtgatcgtgcagctggagaggggcgacgagctgtgggtgctggacatgcacggcgccgagcagcccagcgtggacggcagcgccggcggcccaagcagcggcgcccctcctcccagcggcggcaggcggcccaagcagcggcgcccctcctcccagcggcggcagcccagccggctccccaacctctaccgaggagggcacctctgagtccgccacccccgagagcggccctggcacctccaccgagcccagcgagggcagcgcacccggcagccctgccggcagccccacctccacagaggagggaaccagcaccgagcccagcgaaggcagcgccccaggcaccagcaccgagcctagtgagcaggagattaaacggatcaacaagatcagaagaagacttgtgaaagacagcaacaccaagaaggccggcaagacaggccccatgaaaaccctgctggttagagtgatgacacccgatctgagagagcggctggaaaacctgagaaagaagcctgaaaatatcccccagcccatcagcaatacatctagagccaacctgaataagctgctgaccgattacaccgaaatgaagaaggcgatcctgcatgtgtactgggaagagttccagaaggaccctgtgggcctgatgagccgggtggcccagcctgccagcaagaagatcgatcagaacaagctgaaacctgagatggacgagaagggcaacctgaccaccgccggctttgcctgctctcagtgtggccagcccctgttcgtgtacaagctggagcaggtgtctgagaagggcaaggcttacaccaactacttcggacggtgcaatgtggccgagcacgaaaagctgatcctgctggcccagctgaagcccgagaaggatagcgacgaagccgtgacatatagcctgggaaagtttgggcagagggccctggatttctacagcattcatgtgaccaaggagtccacccaccccgtgaagcccctggcccagatcgccggaaacagatacgcctccggacctgtgggaaaggccctgagcgacgcatgtatgggcacaatcgcctccttcctgtctaagtaccaggacatcatcatcgaacaccagaaggtggtgaagggcaaccagaagagactggagagcctgcgggagctggccggcaaggaaaacctggaataccctagcgtgaccctgccacctcagcctcacaccaaggagggcgttgatgcctacaacgaagtgatcgcccgggtgcgaatgtgggtgaacctgaacctgtggcagaagctgaagctaagcagagatgatgccaagcctctgctgagactgaagggattcccttcctttcctctggtcgagagacaggccaacgaagtggactggtgggacatggtgtgtaacgtgaagaagctgatcaacgagaaaaaggaggatggcaaggtgttttggcagaatctggctggctacaagagacaggaagccctgagaccatacctgagcagcgaggaagatcggaagaagggaaagaaattcgctcggtaccagctgggcgacctgctgctgcacctggaaaagaagcacggcgaggactggggaaaggtgtacgacgaggcctgggagcggattgacaagaaagtggaaggcctgagcaagcacatcaagctggaagaggaacggagaagcgaggacgcccagagcaaggccgccctgaccgactggctgcgggctaaggccagcttcgtgatcgagggcctgaaggaggccgacaaggacgagttctgcagatgcgagctgaagctgcagaagtggtacggggacctgcggggaaagcccttcgccatcgaagccgagaacagcatcctggacatcagcggcttcagcaagcagtacaactgtgccttcatctggcagaaggacggcgtgaagaagctgaacctgtacctgatcatcaactacttcaagggcggcaagctgcggttcaagaagatcaaacctgaagccttcgaagccaacagattctacaccgtgatcaacaaaaagagcggcgagatcgtgcccatggaggtgaacttcaacttcgacgaccccaacctgatcatcctgcctctggcctttggcaagagacagggcagagaattcatctggaacgacctgctgtccctggaaaccggcagcctgaagctggccaacggaagagtgatcgagaagacactgtacaacagaagaacccggcaggatgagcctgccctgttcgtggccctgaccttcgagcggcgggaggtcctggactcctccaatatcaaaccaatgaacctgatcggcgtggcaagaggcgaaaacatccccgccgtgatcgccctgaccgaccccgagggctgcccactgagccggtttaaggatagcctgggaaacccaacccacatcctgagaatcggcgagagctataaggagaagcagcggaccatccaggccaagaaggaggtggagcagcggagagccggcggctacagccggaagtacgccagcaaagccaagaatctggcagacgatatggtgagaaacaccgctagagatctgctgtactacgccgtgacccaggatgccatgctgatcttcgccaacctgagccggggcttcggccggcagggcaagcggaccttcatggccgagagacagtacacacggatggaggactggctgaccgccaagctggcctacgagggcctgagcaagacctacctgtccaagacactggcccagtacacctccaagacatgcagcaactgtgggtttaccatcaccagcgccgactacgacagggtgctggagaagctgaagaagacagcaacaggctggatgaccacaattaacggcaaggagctgaaggtggagggccagattacctactacaacagatacaagagacagaacgtagtcaaggacctgtccgtcgagctggatagactgagcgaagaatctgtgaacaacgacatctcctcctggacaaagggcagaagcggagaagctctgagcctcctgaagaaaagattctcccatagacccgtgcaggagaagttcgtgtgcctgaactgcggcttcgagacacacgcagccgagcaagccgccctgaacatcgccagatcctggctgttcctgcggagccaggagtacaagaaataccagacaaacaagacaaccggcaacaccgataagagagccttcgtcgagacctggcagtccttttaccggaagaagcttaaggaggtgtggaaacctgccgtgcggtctggcggatctggcggaggctccaccagccccaagaaaaagagaaaagtctaagctgccttctgcggggcttgccttctggccatgcccttcttctctcccttgcacctgtacctcttggtctttgaataaagcctgagtaggaaggctagcaaaaaaaaaaaaaaaaaaaaaaaaaaaaaaaaaaaaaaaaaaaaaaaaaaaaaaaaaaaaaaaaaaaaaaaaaaaaaaaagcccagccggctccccaacctctaccgaggagggcacctctgagtccgccacccccgagagcggccctggcacctccaccgagcccagcgagggcagcgcacccggcagccctgccggcagccccacctccacagaggagggaaccagcaccgagcccagcgaaggcagcgccccaggcaccagcaccgagcctagtgagcaggagattaaacggatcaacaagatcagaagaagacttgtgaaagacagcaacaccaagaaggccggcaagacaggccccatgaaaaccctgctggttagagtgatgacacccgatctgagagagcggctggaaaacctgagaaagaagcctgaaaatatcccccagcccatcagcaatacatctagagccaacctgaataagctgctgaccgattacaccgaaatgaagaaggcgatcctgcatgtgtactgggaagagttccagaaggaccctgtgggcctgatgagccgggtggcccagcctgccagcaagaagatcgatcagaacaagctgaaacctgagatggacgagaagggcaacctgaccaccgccggctttgcctgctctcagtgtggccagcccctgttcgtgtacaagctggagcaggtgtctgagaagggcaaggcttacaccaactacttcggacggtgcaatgtggccgagcacgaaaagctgatcctgctggcccagctgaagcccgagaaggatagcgacgaagccgtgacatatagcctgggaaagtttgggcagagggccctggatttctacagcattcatgtgaccaaggagtccacccaccccgtgaagcccctggcccagatcgccggaaacagatacgcctccggacctgtgggaaaggccctgagcgacgcatgtatgggcacaatcgcctccttcctgtctaagtaccaggacatcatcatcgaacaccagaaggtggtgaagggcaaccagaagagactggagagcctgcgggagctggccggcaaggaaaacctggaataccctagcgtgaccctgccacctcagcctcacaccaaggagggcgttgatgcctacaacgaagtgatcgcccgggtgcgaatgtgggtgaacctgaacctgtggcagaagctgaagctaagcagagatgatgccaagcctctgctgagactgaagggattcccttcctttcctctggtcgagagacaggccaacgaagtggactggtgggacatggtgtgtaacgtgaagaagctgatcaacgagaaaaaggaggatggcaaggtgttttggcagaatctggctggctacaagagacaggaagccctgagaccatacctgagcagcgaggaagatcggaagaagggaaagaaattcgctcggtaccagctgggcgacctgctgctgcacctggaaaagaagcacggcgaggactggggaaaggtgtacgacgaggcctgggagcggattgacaagaaagtggaaggcctgagcaagcacatcaagctggaagaggaacggagaagcgaggacgcccagagcaaggccgccctgaccgactggctgcgggctaaggccagcttcgtgatcgagggcctgaaggaggccgacaaggacgagttctgcagatgcgagctgaagctgcagaagtggtacggggacctgcggggaaagcccttcgccatcgaagccgagaacagcatcctggacatcagcggcttcagcaagcagtacaactgtgccttcatctggcagaaggacggcgtgaagaagctgaacctgtacctgatcatcaactacttcaagggcggcaagctgcggttcaagaagatcaaacctgaagccttcgaagccaacagattctacaccgtgatcaacaaaaagagcggcgagatcgtgcccatggaggtgaacttcaacttcgacgaccccaacctgatcatcctgcctctggcctttggcaagagacagggcagagaattcatctggaacgacctgctgtccctggaaaccggcagcctgaagctggccaacggaagagtgatcgagaagacactgtacaacagaagaacccggcaggatgagcctgccctgttcgtggccctgaccttcgagcggcgggaggtcctggactcctccaatatcaaaccaatgaacctgatcggcgtggcaagaggcgaaaacatccccgccgtgatcgccctgaccgaccccgagggctgcccactgagccggtttaaggatagcctgggaaacccaacccacatcctgagaatcggcgagagctataaggagaagcagcggaccatccaggccaagaaggaggtggagcagcggagagccggcggctacagccggaagtacgccagcaaagccaagaatctggcagacgatatggtgagaaacaccgctagagatctgctgtactacgccgtgacccaggatgccatgctgatcttcgccaacctgagccggggcttcggccggcagggcaagcggaccttcatggccgagagacagtacacacggatggaggactggctgaccgccaagctggcctacgagggcctgagcaagacctacctgtccaagacactggcccagtacacctccaagacatgcagcaactgtgggtttaccatcaccagcgccgactacgacagggtgctggagaagctgaagaagacagcaacaggctggatgaccacaattaacggcaaggagctgaaggtggagggccagattacctactacaacagatacaagagacagaacgtagtcaaggacctgtccgtcgagctggatagactgagcgaagaatctgtgaacaacgacatctcctcctggacaaagggcagaagcggagaagctctgagcctcctgaagaaaagattctcccatagacccgtgcaggagaagttcgtgtgcctgaactgcggcttcgagacacacgcagccgagcaagccgccctgaacatcgccagatcctggctgttcctgcggagccaggagtacaagaaataccagacaaacaagacaaccggcaacaccgataagagagccttcgtcgagacctggcagtccttttaccggaagaagcttaaggaggtgtggaaacctgccgtgcggtctggcggatctggcggaggctccaccagccccaagaaaaagagaaaagtctaagctgccttctgcggggcttgccttctggccatgcccttcttctctcccttgcacctgtacctcttggtctttgaataaagcctgagtaggaaggctagcaaaaaaaaaaaaaaaaaaaaaaaaaaaaaaaaaaaaaaaaaaaaaaaaaaaaaaaaaaaaaaaaaaaaaaaaaaaaaaaa

SEQ ID NO: 10363 - RNA, 8787 nt, synthetic construct
  source 1..8787: mol_type = other RNA
aggaaataagagagaaaagaagagtaagaagaaatataagagccaccatggcccctaagaagaagcgtaaagtgagccggatgaaccacgaccaggagttcgacccccctaaggtgtaccctcccgtccccgccgagaagagaaagcccatccgggtcctgagcctgttcgatggcatcgccaccggtctgctggtgctgaaggacctgggcatccaggtggataggtacattgcctccgaggtgtgcgaggactccatcaccgtgggaatggtgcgtcatcagggcaagatcatgtacgtgggcgacgtgcggagcgtgacacagaagcatatccaggagtggggccctttcgacctggtgatcggcggcagcccttgcaatgacctgagcatcgtgaacccagcccggaagggcctgtacgagggaaccggcagactgttcttcgagttttacagactgctgcacgacgcccggcctaaggaaggcgacgaccggcccttcttttggctgttcgagaatgtggtggccatgggagtcagcgacaagcgggatattagccggttcctggagagcaaccccgtgatgatcgatgccaaggaagtgagcgccgcccaccgggccagatacttctggggcaatctgcctggcatgaacagacccctggccagcaccgtgaacgacaagctggagctgcaggagtgcctggagcacggccggatcgccaagttcagcaaggtgagaaccatcaccacccgaagcaacagcatcaaacaaggcaaggaccagcactttcctgtgttcatgaacgagaaggaggacatcctgtggtgtaccgagatggagagagtgttcgggttcccagtccactacacagatgtcagcaacatgtctagactggccagacagagactgctgggaagaagctggtccgtccctgtgatcagacacctgttcgcccctctgaaggagtacttcgcctgcgtgagcagcggcaacagcaacgccaacagccggggccccagcttctctagcggcctggtgccactgtccctgagagggagccacatgggccccatggagatctacaaaaccgtgagcgcctggaagcggcagcctgtgcgcgtgctgagcctgtttcggaatatcgataaagtcctgaaaagcctgggattcctggagagcggctctggctccggcggtggcaccctgaagtacgtggaggatgtgacaaacgtggtcagacgggatgtggagaagtggggccccttcgatctggtgtacggcagcacccaacccctgggcagctcttgtgaccggtgccctggctggtacatgtttcagttccaccggatcctgcagtacgccctgccgagacaggagtcccagcggccattcttttggattttcatggacaacttgctgctgaccgaggatgaccaggaaactaccactcggttcctgcagaccgaagccgtgaccctgcaggacgtgagaggccgggactaccagaacgccatgcgggtgtggtccaacatccctggactgaaaagcaagcacgcacctctgacccctaaagaagaggagtacctgcaggcccaggtgcggagcagaagcaagctggacgcccctaaggtggatctgctggtgaagaattgcctcctgcccctgagagagtacttcaagtatttcagccagaatagtctgcccctgggaggcagcggcggcggcttcgaggagctggtgaccttcgaggacgtggccgtgtacttcagcgagaacgagtggaccagcctggcccccacccagagggtgctgtacagggacgtgatgctggagaactacggcgccgtggccagcctggccgccttccccttccccaagcccgccctgatcagccagctggagaggggcgaggccccctggtgcaaggccccccagggcgccctggacggcgagggccccaggggcatcggcggcccaagcagcggcgcccctcctcccagcggcggcaggcggcccaagcagcggcgcccctcctcccagcggcggcagcccagccggctccccaacctctaccgaggagggcacctctgagtccgccacccccgagagcggccctggcacctccaccgagcccagcgagggcagcgcacccggcagccctgccggcagccccacctccacagaggagggaaccagcaccgagcccagcgaaggcagcgccccaggcaccagcaccgagcctagtgagcaggagattaaacggatcaacaagatcagaagaagacttgtgaaagacagcaacaccaagaaggccggcaagacaggccccatgaaaaccctgctggttagagtgatgacacccgatctgagagagcggctggaaaacctgagaaagaagcctgaaaatatcccccagcccatcagcaatacatctagagccaacctgaataagctgctgaccgattacaccgaaatgaagaaggcgatcctgcatgtgtactgggaagagttccagaaggaccctgtgggcctgatgagccgggtggcccagcctgccagcaagaagatcgatcagaacaagctgaaacctgagatggacgagaagggcaacctgaccaccgccggctttgcctgctctcagtgtggccagcccctgttcgtgtacaagctggagcaggtgtctgagaagggcaaggcttacaccaactacttcggacggtgcaatgtggccgagcacgaaaagctgatcctgctggcccagctgaagcccgagaaggatagcgacgaagccgtgacatatagcctgggaaagtttgggcagagggccctggatttctacagcattcatgtgaccaaggagtccacccaccccgtgaagcccctggcccagatcgccggaaacagatacgcctccggacctgtgggaaaggccctgagcgacgcatgtatgggcacaatcgcctccttcctgtctaagtaccaggacatcatcatcgaacaccagaaggtggtgaagggcaaccagaagagactggagagcctgcgggagctggccggcaaggaaaacctggaataccctagcgtgaccctgccacctcagcctcacaccaaggagggcgttgatgcctacaacgaagtgatcgcccgggtgcgaatgtgggtgaacctgaacctgtggcagaagctgaagctaagcagagatgatgccaagcctctgctgagactgaagggattcccttcctttcctctggtcgagagacaggccaacgaagtggactggtgggacatggtgtgtaacgtgaagaagctgatcaacgagaaaaaggaggatggcaaggtgttttggcagaatctggctggctacaagagacaggaagccctgagaccatacctgagcagcgaggaagatcggaagaagggaaagaaattcgctcggtaccagctgggcgacctgctgctgcacctggaaaagaagcacggcgaggactggggaaaggtgtacgacgaggcctgggagcggattgacaagaaagtggaaggcctgagcaagcacatcaagctggaagaggaacggagaagcgaggacgcccagagcaaggccgccctgaccgactggctgcgggctaaggccagcttcgtgatcgagggcctgaaggaggccgacaaggacgagttctgcagatgcgagctgaagctgcagaagtggtacggggacctgcggggaaagcccttcgccatcgaagccgagaacagcatcctggacatcagcggcttcagcaagcagtacaactgtgccttcatctggcagaaggacggcgtgaagaagctgaacctgtacctgatcatcaactacttcaagggcggcaagctgcggttcaagaagatcaaacctgaagccttcgaagccaacagattctacaccgtgatcaacaaaaagagcggcgagatcgtgcccatggaggtgaacttcaacttcgacgaccccaacctgatcatcctgcctctggcctttggcaagagacagggcagagaattcatctggaacgacctgctgtccctggaaaccggcagcctgaagctggccaacggaagagtgatcgagaagacactgtacaacagaagaacccggcaggatgagcctgccctgttcgtggccctgaccttcgagcggcgggaggtcctggactcctccaatatcaaaccaatgaacctgatcggcgtggcaagaggcgaaaacatccccgccgtgatcgccctgaccgaccccgagggctgcccactgagccggtttaaggatagcctgggaaacccaacccacatcctgagaatcggcgagagctataaggagaagcagcggaccatccaggccaagaaggaggtggagcagcggagagccggcggctacagccggaagtacgccagcaaagccaagaatctggcagacgatatggtgagaaacaccgctagagatctgctgtactacgccgtgacccaggatgccatgctgatcttcgccaacctgagccggggcttcggccggcagggcaagcggaccttcatggccgagagacagtacacacggatggaggactggctgaccgccaagctggcctacgagggcctgagcaagacctacctgtccaagacactggcccagtacacctccaagacatgcagcaactgtgggtttaccatcaccagcgccgactacgacagggtgctggagaagctgaagaagacagcaacaggctggatgaccacaattaacggcaaggagctgaaggtggagggccagattacctactacaacagatacaagagacagaacgtagtcaaggacctgtccgtcgagctggatagactgagcgaagaatctgtgaacaacgacatctcctcctggacaaagggcagaagcggagaagctctgagcctcctgaagaaaagattctcccatagacccgtgcaggagaagttcgtgtgcctgaactgcggcttcgagacacacgcagccgagcaagccgccctgaacatcgccagatcctggctgttcctgcggagccaggagtacaagaaataccagacaaacaagacaaccggcaacaccgataagagagccttcgtcgagacctggcagtccttttaccggaagaagcttaaggaggtgtggaaacctgccgtgcggtctggcggatctggcggaggctccaccagccccaagaaaaagagaaaagtctaagctgccttctgcggggcttgccttctggccatgcccttcttctctcccttgcacctgtacctcttggtctttgaataaagcctgagtaggaaggctagcaaaaaaaaaaaaaaaaaaaaaaaaaaaaaaaaaaaaaaaaaaaaaaaaaaaaaaaaaaaaaaaaaaaaaaaaaaaaaaaagcccagccggctccccaacctctaccgaggagggcacctctgagtccgccacccccgagagcggccctggcacctccaccgagcccagcgagggcagcgcacccggcagccctgccggcagccccacctccacagaggagggaaccagcaccgagcccagcgaaggcagcgccccaggcaccagcaccgagcctagtgagcaggagattaaacggatcaacaagatcagaagaagacttgtgaaagacagcaacaccaagaaggccggcaagacaggccccatgaaaaccctgctggttagagtgatgacacccgatctgagagagcggctggaaaacctgagaaagaagcctgaaaatatcccccagcccatcagcaatacatctagagccaacctgaataagctgctgaccgattacaccgaaatgaagaaggcgatcctgcatgtgtactgggaagagttccagaaggaccctgtgggcctgatgagccgggtggcccagcctgccagcaagaagatcgatcagaacaagctgaaacctgagatggacgagaagggcaacctgaccaccgccggctttgcctgctctcagtgtggccagcccctgttcgtgtacaagctggagcaggtgtctgagaagggcaaggcttacaccaactacttcggacggtgcaatgtggccgagcacgaaaagctgatcctgctggcccagctgaagcccgagaaggatagcgacgaagccgtgacatatagcctgggaaagtttgggcagagggccctggatttctacagcattcatgtgaccaaggagtccacccaccccgtgaagcccctggcccagatcgccggaaacagatacgcctccggacctgtgggaaaggccctgagcgacgcatgtatgggcacaatcgcctccttcctgtctaagtaccaggacatcatcatcgaacaccagaaggtggtgaagggcaaccagaagagactggagagcctgcgggagctggccggcaaggaaaacctggaataccctagcgtgaccctgccacctcagcctcacaccaaggagggcgttgatgcctacaacgaagtgatcgcccgggtgcgaatgtgggtgaacctgaacctgtggcagaagctgaagctaagcagagatgatgccaagcctctgctgagactgaagggattcccttcctttcctctggtcgagagacaggccaacgaagtggactggtgggacatggtgtgtaacgtgaagaagctgatcaacgagaaaaaggaggatggcaaggtgttttggcagaatctggctggctacaagagacaggaagccctgagaccatacctgagcagcgaggaagatcggaagaagggaaagaaattcgctcggtaccagctgggcgacctgctgctgcacctggaaaagaagcacggcgaggactggggaaaggtgtacgacgaggcctgggagcggattgacaagaaagtggaaggcctgagcaagcacatcaagctggaagaggaacggagaagcgaggacgcccagagcaaggccgccctgaccgactggctgcgggctaaggccagcttcgtgatcgagggcctgaaggaggccgacaaggacgagttctgcagatgcgagctgaagctgcagaagtggtacggggacctgcggggaaagcccttcgccatcgaagccgagaacagcatcctggacatcagcggcttcagcaagcagtacaactgtgccttcatctggcagaaggacggcgtgaagaagctgaacctgtacctgatcatcaactacttcaagggcggcaagctgcggttcaagaagatcaaacctgaagccttcgaagccaacagattctacaccgtgatcaacaaaaagagcggcgagatcgtgcccatggaggtgaacttcaacttcgacgaccccaacctgatcatcctgcctctggcctttggcaagagacagggcagagaattcatctggaacgacctgctgtccctggaaaccggcagcctgaagctggccaacggaagagtgatcgagaagacactgtacaacagaagaacccggcaggatgagcctgccctgttcgtggccctgaccttcgagcggcgggaggtcctggactcctccaatatcaaaccaatgaacctgatcggcgtggcaagaggcgaaaacatccccgccgtgatcgccctgaccgaccccgagggctgcccactgagccggtttaaggatagcctgggaaacccaacccacatcctgagaatcggcgagagctataaggagaagcagcggaccatccaggccaagaaggaggtggagcagcggagagccggcggctacagccggaagtacgccagcaaagccaagaatctggcagacgatatggtgagaaacaccgctagagatctgctgtactacgccgtgacccaggatgccatgctgatcttcgccaacctgagccggggcttcggccggcagggcaagcggaccttcatggccgagagacagtacacacggatggaggactggctgaccgccaagctggcctacgagggcctgagcaagacctacctgtccaagacactggcccagtacacctccaagacatgcagcaactgtgggtttaccatcaccagcgccgactacgacagggtgctggagaagctgaagaagacagcaacaggctggatgaccacaattaacggcaaggagctgaaggtggagggccagattacctactacaacagatacaagagacagaacgtagtcaaggacctgtccgtcgagctggatagactgagcgaagaatctgtgaacaacgacatctcctcctggacaaagggcagaagcggagaagctctgagcctcctgaagaaaagattctcccatagacccgtgcaggagaagttcgtgtgcctgaactgcggcttcgagacacacgcagccgagcaagccgccctgaacatcgccagatcctggctgttcctgcggagccaggagtacaagaaataccagacaaacaagacaaccggcaacaccgataagagagccttcgtcgagacctggcagtccttttaccggaagaagcttaaggaggtgtggaaacctgccgtgcggtctggcggatctggcggaggctccaccagccccaagaaaaagagaaaagtctaagctgccttctgcggggcttgccttctggccatgcccttcttctctcccttgcacctgtacctcttggtctttgaataaagcctgagtaggaaggctagcaaaaaaaaaaaaaaaaaaaaaaaaaaaaaaaaaaaaaaaaaaaaaaaaaaaaaaaaaaaaaaaaaaaaaaaaaaaaaaaa

SEQ ID NO: 10364 - RNA, 8787 nt, synthetic construct
  source 1..8787: mol_type = other RNA
aggaaataagagagaaaagaagagtaagaagaaatataagagccaccatggcccctaagaagaagcgtaaagtgagccggatgaaccacgaccaggagttcgacccccctaaggtgtaccctcccgtccccgccgagaagagaaagcccatccgggtcctgagcctgttcgatggcatcgccaccggtctgctggtgctgaaggacctgggcatccaggtggataggtacattgcctccgaggtgtgcgaggactccatcaccgtgggaatggtgcgtcatcagggcaagatcatgtacgtgggcgacgtgcggagcgtgacacagaagcatatccaggagtggggccctttcgacctggtgatcggcggcagcccttgcaatgacctgagcatcgtgaacccagcccggaagggcctgtacgagggaaccggcagactgttcttcgagttttacagactgctgcacgacgcccggcctaaggaaggcgacgaccggcccttcttttggctgttcgagaatgtggtggccatgggagtcagcgacaagcgggatattagccggttcctggagagcaaccccgtgatgatcgatgccaaggaagtgagcgccgcccaccgggccagatacttctggggcaatctgcctggcatgaacagacccctggccagcaccgtgaacgacaagctggagctgcaggagtgcctggagcacggccggatcgccaagttcagcaaggtgagaaccatcaccacccgaagcaacagcatcaaacaaggcaaggaccagcactttcctgtgttcatgaacgagaaggaggacatcctgtggtgtaccgagatggagagagtgttcgggttcccagtccactacacagatgtcagcaacatgtctagactggccagacagagactgctgggaagaagctggtccgtccctgtgatcagacacctgttcgcccctctgaaggagtacttcgcctgcgtgagcagcggcaacagcaacgccaacagccggggccccagcttctctagcggcctggtgccactgtccctgagagggagccacatgggccccatggagatctacaaaaccgtgagcgcctggaagcggcagcctgtgcgcgtgctgagcctgtttcggaatatcgataaagtcctgaaaagcctgggattcctggagagcggctctggctccggcggtggcaccctgaagtacgtggaggatgtgacaaacgtggtcagacgggatgtggagaagtggggccccttcgatctggtgtacggcagcacccaacccctgggcagctcttgtgaccggtgccctggctggtacatgtttcagttccaccggatcctgcagtacgccctgccgagacaggagtcccagcggccattcttttggattttcatggacaacttgctgctgaccgaggatgaccaggaaactaccactcggttcctgcagaccgaagccgtgaccctgcaggacgtgagaggccgggactaccagaacgccatgcgggtgtggtccaacatccctggactgaaaagcaagcacgcacctctgacccctaaagaagaggagtacctgcaggcccaggtgcggagcagaagcaagctggacgcccctaaggtggatctgctggtgaagaattgcctcctgcccctgagagagtacttcaagtatttcagccagaatagtctgcccctgggaggcagcggcggcggcccccaggagagcgtggccttcgacgacgtggccgtgtacttcaccaagaaggagtgggccatcatggtgcccgaccagagggccctgtacagggacgtgatgctggagaactacgaggccgtggccttcgtggccgtgccccccaccagcaagcccgccctggtgagccacctggagcagggcaaggagccctgcttcacccagccccagggcgtgctgagcaggagggactggagggccggcggcggcccaagcagcggcgcccctcctcccagcggcggcaggcggcccaagcagcggcgcccctcctcccagcggcggcagcccagccggctccccaacctctaccgaggagggcacctctgagtccgccacccccgagagcggccctggcacctccaccgagcccagcgagggcagcgcacccggcagccctgccggcagccccacctccacagaggagggaaccagcaccgagcccagcgaaggcagcgccccaggcaccagcaccgagcctagtgagcaggagattaaacggatcaacaagatcagaagaagacttgtgaaagacagcaacaccaagaaggccggcaagacaggccccatgaaaaccctgctggttagagtgatgacacccgatctgagagagcggctggaaaacctgagaaagaagcctgaaaatatcccccagcccatcagcaatacatctagagccaacctgaataagctgctgaccgattacaccgaaatgaagaaggcgatcctgcatgtgtactgggaagagttccagaaggaccctgtgggcctgatgagccgggtggcccagcctgccagcaagaagatcgatcagaacaagctgaaacctgagatggacgagaagggcaacctgaccaccgccggctttgcctgctctcagtgtggccagcccctgttcgtgtacaagctggagcaggtgtctgagaagggcaaggcttacaccaactacttcggacggtgcaatgtggccgagcacgaaaagctgatcctgctggcccagctgaagcccgagaaggatagcgacgaagccgtgacatatagcctgggaaagtttgggcagagggccctggatttctacagcattcatgtgaccaaggagtccacccaccccgtgaagcccctggcccagatcgccggaaacagatacgcctccggacctgtgggaaaggccctgagcgacgcatgtatgggcacaatcgcctccttcctgtctaagtaccaggacatcatcatcgaacaccagaaggtggtgaagggcaaccagaagagactggagagcctgcgggagctggccggcaaggaaaacctggaataccctagcgtgaccctgccacctcagcctcacaccaaggagggcgttgatgcctacaacgaagtgatcgcccgggtgcgaatgtgggtgaacctgaacctgtggcagaagctgaagctaagcagagatgatgccaagcctctgctgagactgaagggattcccttcctttcctctggtcgagagacaggccaacgaagtggactggtgggacatggtgtgtaacgtgaagaagctgatcaacgagaaaaaggaggatggcaaggtgttttggcagaatctggctggctacaagagacaggaagccctgagaccatacctgagcagcgaggaagatcggaagaagggaaagaaattcgctcggtaccagctgggcgacctgctgctgcacctggaaaagaagcacggcgaggactggggaaaggtgtacgacgaggcctgggagcggattgacaagaaagtggaaggcctgagcaagcacatcaagctggaagaggaacggagaagcgaggacgcccagagcaaggccgccctgaccgactggctgcgggctaaggccagcttcgtgatcgagggcctgaaggaggccgacaaggacgagttctgcagatgcgagctgaagctgcagaagtggtacggggacctgcggggaaagcccttcgccatcgaagccgagaacagcatcctggacatcagcggcttcagcaagcagtacaactgtgccttcatctggcagaaggacggcgtgaagaagctgaacctgtacctgatcatcaactacttcaagggcggcaagctgcggttcaagaagatcaaacctgaagccttcgaagccaacagattctacaccgtgatcaacaaaaagagcggcgagatcgtgcccatggaggtgaacttcaacttcgacgaccccaacctgatcatcctgcctctggcctttggcaagagacagggcagagaattcatctggaacgacctgctgtccctggaaaccggcagcctgaagctggccaacggaagagtgatcgagaagacactgtacaacagaagaacccggcaggatgagcctgccctgttcgtggccctgaccttcgagcggcgggaggtcctggactcctccaatatcaaaccaatgaacctgatcggcgtggcaagaggcgaaaacatccccgccgtgatcgccctgaccgaccccgagggctgcccactgagccggtttaaggatagcctgggaaacccaacccacatcctgagaatcggcgagagctataaggagaagcagcggaccatccaggccaagaaggaggtggagcagcggagagccggcggctacagccggaagtacgccagcaaagccaagaatctggcagacgatatggtgagaaacaccgctagagatctgctgtactacgccgtgacccaggatgccatgctgatcttcgccaacctgagccggggcttcggccggcagggcaagcggaccttcatggccgagagacagtacacacggatggaggactggctgaccgccaagctggcctacgagggcctgagcaagacctacctgtccaagacactggcccagtacacctccaagacatgcagcaactgtgggtttaccatcaccagcgccgactacgacagggtgctggagaagctgaagaagacagcaacaggctggatgaccacaattaacggcaaggagctgaaggtggagggccagattacctactacaacagatacaagagacagaacgtagtcaaggacctgtccgtcgagctggatagactgagcgaagaatctgtgaacaacgacatctcctcctggacaaagggcagaagcggagaagctctgagcctcctgaagaaaagattctcccatagacccgtgcaggagaagttcgtgtgcctgaactgcggcttcgagacacacgcagccgagcaagccgccctgaacatcgccagatcctggctgttcctgcggagccaggagtacaagaaataccagacaaacaagacaaccggcaacaccgataagagagccttcgtcgagacctggcagtccttttaccggaagaagcttaaggaggtgtggaaacctgccgtgcggtctggcggatctggcggaggctccaccagccccaagaaaaagagaaaagtctaagctgccttctgcggggcttgccttctggccatgcccttcttctctcccttgcacctgtacctcttggtctttgaataaagcctgagtaggaaggctagcaaaaaaaaaaaaaaaaaaaaaaaaaaaaaaaaaaaaaaaaaaaaaaaaaaaaaaaaaaaaaaaaaaaaaaaaaaaaaaaagcccagccggctccccaacctctaccgaggagggcacctctgagtccgccacccccgagagcggccctggcacctccaccgagcccagcgagggcagcgcacccggcagccctgccggcagccccacctccacagaggagggaaccagcaccgagcccagcgaaggcagcgccccaggcaccagcaccgagcctagtgagcaggagattaaacggatcaacaagatcagaagaagacttgtgaaagacagcaacaccaagaaggccggcaagacaggccccatgaaaaccctgctggttagagtgatgacacccgatctgagagagcggctggaaaacctgagaaagaagcctgaaaatatcccccagcccatcagcaatacatctagagccaacctgaataagctgctgaccgattacaccgaaatgaagaaggcgatcctgcatgtgtactgggaagagttccagaaggaccctgtgggcctgatgagccgggtggcccagcctgccagcaagaagatcgatcagaacaagctgaaacctgagatggacgagaagggcaacctgaccaccgccggctttgcctgctctcagtgtggccagcccctgttcgtgtacaagctggagcaggtgtctgagaagggcaaggcttacaccaactacttcggacggtgcaatgtggccgagcacgaaaagctgatcctgctggcccagctgaagcccgagaaggatagcgacgaagccgtgacatatagcctgggaaagtttgggcagagggccctggatttctacagcattcatgtgaccaaggagtccacccaccccgtgaagcccctggcccagatcgccggaaacagatacgcctccggacctgtgggaaaggccctgagcgacgcatgtatgggcacaatcgcctccttcctgtctaagtaccaggacatcatcatcgaacaccagaaggtggtgaagggcaaccagaagagactggagagcctgcgggagctggccggcaaggaaaacctggaataccctagcgtgaccctgccacctcagcctcacaccaaggagggcgttgatgcctacaacgaagtgatcgcccgggtgcgaatgtgggtgaacctgaacctgtggcagaagctgaagctaagcagagatgatgccaagcctctgctgagactgaagggattcccttcctttcctctggtcgagagacaggccaacgaagtggactggtgggacatggtgtgtaacgtgaagaagctgatcaacgagaaaaaggaggatggcaaggtgttttggcagaatctggctggctacaagagacaggaagccctgagaccatacctgagcagcgaggaagatcggaagaagggaaagaaattcgctcggtaccagctgggcgacctgctgctgcacctggaaaagaagcacggcgaggactggggaaaggtgtacgacgaggcctgggagcggattgacaagaaagtggaaggcctgagcaagcacatcaagctggaagaggaacggagaagcgaggacgcccagagcaaggccgccctgaccgactggctgcgggctaaggccagcttcgtgatcgagggcctgaaggaggccgacaaggacgagttctgcagatgcgagctgaagctgcagaagtggtacggggacctgcggggaaagcccttcgccatcgaagccgagaacagcatcctggacatcagcggcttcagcaagcagtacaactgtgccttcatctggcagaaggacggcgtgaagaagctgaacctgtacctgatcatcaactacttcaagggcggcaagctgcggttcaagaagatcaaacctgaagccttcgaagccaacagattctacaccgtgatcaacaaaaagagcggcgagatcgtgcccatggaggtgaacttcaacttcgacgaccccaacctgatcatcctgcctctggcctttggcaagagacagggcagagaattcatctggaacgacctgctgtccctggaaaccggcagcctgaagctggccaacggaagagtgatcgagaagacactgtacaacagaagaacccggcaggatgagcctgccctgttcgtggccctgaccttcgagcggcgggaggtcctggactcctccaatatcaaaccaatgaacctgatcggcgtggcaagaggcgaaaacatccccgccgtgatcgccctgaccgaccccgagggctgcccactgagccggtttaaggatagcctgggaaacccaacccacatcctgagaatcggcgagagctataaggagaagcagcggaccatccaggccaagaaggaggtggagcagcggagagccggcggctacagccggaagtacgccagcaaagccaagaatctggcagacgatatggtgagaaacaccgctagagatctgctgtactacgccgtgacccaggatgccatgctgatcttcgccaacctgagccggggcttcggccggcagggcaagcggaccttcatggccgagagacagtacacacggatggaggactggctgaccgccaagctggcctacgagggcctgagcaagacctacctgtccaagacactggcccagtacacctccaagacatgcagcaactgtgggtttaccatcaccagcgccgactacgacagggtgctggagaagctgaagaagacagcaacaggctggatgaccacaattaacggcaaggagctgaaggtggagggccagattacctactacaacagatacaagagacagaacgtagtcaaggacctgtccgtcgagctggatagactgagcgaagaatctgtgaacaacgacatctcctcctggacaaagggcagaagcggagaagctctgagcctcctgaagaaaagattctcccatagacccgtgcaggagaagttcgtgtgcctgaactgcggcttcgagacacacgcagccgagcaagccgccctgaacatcgccagatcctggctgttcctgcggagccaggagtacaagaaataccagacaaacaagacaaccggcaacaccgataagagagccttcgtcgagacctggcagtccttttaccggaagaagcttaaggaggtgtggaaacctgccgtgcggtctggcggatctggcggaggctccaccagccccaagaaaaagagaaaagtctaagctgccttctgcggggcttgccttctggccatgcccttcttctctcccttgcacctgtacctcttggtctttgaataaagcctgagtaggaaggctagcaaaaaaaaaaaaaaaaaaaaaaaaaaaaaaaaaaaaaaaaaaaaaaaaaaaaaaaaaaaaaaaaaaaaaaaaaaaaaaaa

SEQ ID NO: 10365 - RNA, 8787 nt, synthetic construct
  source 1..8787: mol_type = other RNA
aggaaataagagagaaaagaagagtaagaagaaatataagagccaccatggcccctaagaagaagcgtaaagtgagccggatgaaccacgaccaggagttcgacccccctaaggtgtaccctcccgtccccgccgagaagagaaagcccatccgggtcctgagcctgttcgatggcatcgccaccggtctgctggtgctgaaggacctgggcatccaggtggataggtacattgcctccgaggtgtgcgaggactccatcaccgtgggaatggtgcgtcatcagggcaagatcatgtacgtgggcgacgtgcggagcgtgacacagaagcatatccaggagtggggccctttcgacctggtgatcggcggcagcccttgcaatgacctgagcatcgtgaacccagcccggaagggcctgtacgagggaaccggcagactgttcttcgagttttacagactgctgcacgacgcccggcctaaggaaggcgacgaccggcccttcttttggctgttcgagaatgtggtggccatgggagtcagcgacaagcgggatattagccggttcctggagagcaaccccgtgatgatcgatgccaaggaagtgagcgccgcccaccgggccagatacttctggggcaatctgcctggcatgaacagacccctggccagcaccgtgaacgacaagctggagctgcaggagtgcctggagcacggccggatcgccaagttcagcaaggtgagaaccatcaccacccgaagcaacagcatcaaacaaggcaaggaccagcactttcctgtgttcatgaacgagaaggaggacatcctgtggtgtaccgagatggagagagtgttcgggttcccagtccactacacagatgtcagcaacatgtctagactggccagacagagactgctgggaagaagctggtccgtccctgtgatcagacacctgttcgcccctctgaaggagtacttcgcctgcgtgagcagcggcaacagcaacgccaacagccggggccccagcttctctagcggcctggtgccactgtccctgagagggagccacatgggccccatggagatctacaaaaccgtgagcgcctggaagcggcagcctgtgcgcgtgctgagcctgtttcggaatatcgataaagtcctgaaaagcctgggattcctggagagcggctctggctccggcggtggcaccctgaagtacgtggaggatgtgacaaacgtggtcagacgggatgtggagaagtggggccccttcgatctggtgtacggcagcacccaacccctgggcagctcttgtgaccggtgccctggctggtacatgtttcagttccaccggatcctgcagtacgccctgccgagacaggagtcccagcggccattcttttggattttcatggacaacttgctgctgaccgaggatgaccaggaaactaccactcggttcctgcagaccgaagccgtgaccctgcaggacgtgagaggccgggactaccagaacgccatgcgggtgtggtccaacatccctggactgaaaagcaagcacgcacctctgacccctaaagaagaggagtacctgcaggcccaggtgcggagcagaagcaagctggacgcccctaaggtggatctgctggtgaagaattgcctcctgcccctgagagagtacttcaagtatttcagccagaatagtctgcccctgggaggcagcggcggcggcagccaggagctggtggccttcgaggacgtgctggtggacttcacccccgaggagtggcagtacctgaacagcagccagaagaccctgtacagggaggtgatgctggagacctacagcaacctggtgagcgtggccggccagcaggacaccaagcccgacctgatcctgaagctggagctggagggcccctgcctggccgagaggaagatcagcgtgtggagcttccccgaggaggcctgccagggcggcccaagcagcggcgcccctcctcccagcggcggcaggcggcccaagcagcggcgcccctcctcccagcggcggcagcccagccggctccccaacctctaccgaggagggcacctctgagtccgccacccccgagagcggccctggcacctccaccgagcccagcgagggcagcgcacccggcagccctgccggcagccccacctccacagaggagggaaccagcaccgagcccagcgaaggcagcgccccaggcaccagcaccgagcctagtgagcaggagattaaacggatcaacaagatcagaagaagacttgtgaaagacagcaacaccaagaaggccggcaagacaggccccatgaaaaccctgctggttagagtgatgacacccgatctgagagagcggctggaaaacctgagaaagaagcctgaaaatatcccccagcccatcagcaatacatctagagccaacctgaataagctgctgaccgattacaccgaaatgaagaaggcgatcctgcatgtgtactgggaagagttccagaaggaccctgtgggcctgatgagccgggtggcccagcctgccagcaagaagatcgatcagaacaagctgaaacctgagatggacgagaagggcaacctgaccaccgccggctttgcctgctctcagtgtggccagcccctgttcgtgtacaagctggagcaggtgtctgagaagggcaaggcttacaccaactacttcggacggtgcaatgtggccgagcacgaaaagctgatcctgctggcccagctgaagcccgagaaggatagcgacgaagccgtgacatatagcctgggaaagtttgggcagagggccctggatttctacagcattcatgtgaccaaggagtccacccaccccgtgaagcccctggcccagatcgccggaaacagatacgcctccggacctgtgggaaaggccctgagcgacgcatgtatgggcacaatcgcctccttcctgtctaagtaccaggacatcatcatcgaacaccagaaggtggtgaagggcaaccagaagagactggagagcctgcgggagctggccggcaaggaaaacctggaataccctagcgtgaccctgccacctcagcctcacaccaaggagggcgttgatgcctacaacgaagtgatcgcccgggtgcgaatgtgggtgaacctgaacctgtggcagaagctgaagctaagcagagatgatgccaagcctctgctgagactgaagggattcccttcctttcctctggtcgagagacaggccaacgaagtggactggtgggacatggtgtgtaacgtgaagaagctgatcaacgagaaaaaggaggatggcaaggtgttttggcagaatctggctggctacaagagacaggaagccctgagaccatacctgagcagcgaggaagatcggaagaagggaaagaaattcgctcggtaccagctgggcgacctgctgctgcacctggaaaagaagcacggcgaggactggggaaaggtgtacgacgaggcctgggagcggattgacaagaaagtggaaggcctgagcaagcacatcaagctggaagaggaacggagaagcgaggacgcccagagcaaggccgccctgaccgactggctgcgggctaaggccagcttcgtgatcgagggcctgaaggaggccgacaaggacgagttctgcagatgcgagctgaagctgcagaagtggtacggggacctgcggggaaagcccttcgccatcgaagccgagaacagcatcctggacatcagcggcttcagcaagcagtacaactgtgccttcatctggcagaaggacggcgtgaagaagctgaacctgtacctgatcatcaactacttcaagggcggcaagctgcggttcaagaagatcaaacctgaagccttcgaagccaacagattctacaccgtgatcaacaaaaagagcggcgagatcgtgcccatggaggtgaacttcaacttcgacgaccccaacctgatcatcctgcctctggcctttggcaagagacagggcagagaattcatctggaacgacctgctgtccctggaaaccggcagcctgaagctggccaacggaagagtgatcgagaagacactgtacaacagaagaacccggcaggatgagcctgccctgttcgtggccctgaccttcgagcggcgggaggtcctggactcctccaatatcaaaccaatgaacctgatcggcgtggcaagaggcgaaaacatccccgccgtgatcgccctgaccgaccccgagggctgcccactgagccggtttaaggatagcctgggaaacccaacccacatcctgagaatcggcgagagctataaggagaagcagcggaccatccaggccaagaaggaggtggagcagcggagagccggcggctacagccggaagtacgccagcaaagccaagaatctggcagacgatatggtgagaaacaccgctagagatctgctgtactacgccgtgacccaggatgccatgctgatcttcgccaacctgagccggggcttcggccggcagggcaagcggaccttcatggccgagagacagtacacacggatggaggactggctgaccgccaagctggcctacgagggcctgagcaagacctacctgtccaagacactggcccagtacacctccaagacatgcagcaactgtgggtttaccatcaccagcgccgactacgacagggtgctggagaagctgaagaagacagcaacaggctggatgaccacaattaacggcaaggagctgaaggtggagggccagattacctactacaacagatacaagagacagaacgtagtcaaggacctgtccgtcgagctggatagactgagcgaagaatctgtgaacaacgacatctcctcctggacaaagggcagaagcggagaagctctgagcctcctgaagaaaagattctcccatagacccgtgcaggagaagttcgtgtgcctgaactgcggcttcgagacacacgcagccgagcaagccgccctgaacatcgccagatcctggctgttcctgcggagccaggagtacaagaaataccagacaaacaagacaaccggcaacaccgataagagagccttcgtcgagacctggcagtccttttaccggaagaagcttaaggaggtgtggaaacctgccgtgcggtctggcggatctggcggaggctccaccagccccaagaaaaagagaaaagtctaagctgccttctgcggggcttgccttctggccatgcccttcttctctcccttgcacctgtacctcttggtctttgaataaagcctgagtaggaaggctagcaaaaaaaaaaaaaaaaaaaaaaaaaaaaaaaaaaaaaaaaaaaaaaaaaaaaaaaaaaaaaaaaaaaaaaaaaaaaaaaagcccagccggctccccaacctctaccgaggagggcacctctgagtccgccacccccgagagcggccctggcacctccaccgagcccagcgagggcagcgcacccggcagccctgccggcagccccacctccacagaggagggaaccagcaccgagcccagcgaaggcagcgccccaggcaccagcaccgagcctagtgagcaggagattaaacggatcaacaagatcagaagaagacttgtgaaagacagcaacaccaagaaggccggcaagacaggccccatgaaaaccctgctggttagagtgatgacacccgatctgagagagcggctggaaaacctgagaaagaagcctgaaaatatcccccagcccatcagcaatacatctagagccaacctgaataagctgctgaccgattacaccgaaatgaagaaggcgatcctgcatgtgtactgggaagagttccagaaggaccctgtgggcctgatgagccgggtggcccagcctgccagcaagaagatcgatcagaacaagctgaaacctgagatggacgagaagggcaacctgaccaccgccggctttgcctgctctcagtgtggccagcccctgttcgtgtacaagctggagcaggtgtctgagaagggcaaggcttacaccaactacttcggacggtgcaatgtggccgagcacgaaaagctgatcctgctggcccagctgaagcccgagaaggatagcgacgaagccgtgacatatagcctgggaaagtttgggcagagggccctggatttctacagcattcatgtgaccaaggagtccacccaccccgtgaagcccctggcccagatcgccggaaacagatacgcctccggacctgtgggaaaggccctgagcgacgcatgtatgggcacaatcgcctccttcctgtctaagtaccaggacatcatcatcgaacaccagaaggtggtgaagggcaaccagaagagactggagagcctgcgggagctggccggcaaggaaaacctggaataccctagcgtgaccctgccacctcagcctcacaccaaggagggcgttgatgcctacaacgaagtgatcgcccgggtgcgaatgtgggtgaacctgaacctgtggcagaagctgaagctaagcagagatgatgccaagcctctgctgagactgaagggattcccttcctttcctctggtcgagagacaggccaacgaagtggactggtgggacatggtgtgtaacgtgaagaagctgatcaacgagaaaaaggaggatggcaaggtgttttggcagaatctggctggctacaagagacaggaagccctgagaccatacctgagcagcgaggaagatcggaagaagggaaagaaattcgctcggtaccagctgggcgacctgctgctgcacctggaaaagaagcacggcgaggactggggaaaggtgtacgacgaggcctgggagcggattgacaagaaagtggaaggcctgagcaagcacatcaagctggaagaggaacggagaagcgaggacgcccagagcaaggccgccctgaccgactggctgcgggctaaggccagcttcgtgatcgagggcctgaaggaggccgacaaggacgagttctgcagatgcgagctgaagctgcagaagtggtacggggacctgcggggaaagcccttcgccatcgaagccgagaacagcatcctggacatcagcggcttcagcaagcagtacaactgtgccttcatctggcagaaggacggcgtgaagaagctgaacctgtacctgatcatcaactacttcaagggcggcaagctgcggttcaagaagatcaaacctgaagccttcgaagccaacagattctacaccgtgatcaacaaaaagagcggcgagatcgtgcccatggaggtgaacttcaacttcgacgaccccaacctgatcatcctgcctctggcctttggcaagagacagggcagagaattcatctggaacgacctgctgtccctggaaaccggcagcctgaagctggccaacggaagagtgatcgagaagacactgtacaacagaagaacccggcaggatgagcctgccctgttcgtggccctgaccttcgagcggcgggaggtcctggactcctccaatatcaaaccaatgaacctgatcggcgtggcaagaggcgaaaacatccccgccgtgatcgccctgaccgaccccgagggctgcccactgagccggtttaaggatagcctgggaaacccaacccacatcctgagaatcggcgagagctataaggagaagcagcggaccatccaggccaagaaggaggtggagcagcggagagccggcggctacagccggaagtacgccagcaaagccaagaatctggcagacgatatggtgagaaacaccgctagagatctgctgtactacgccgtgacccaggatgccatgctgatcttcgccaacctgagccggggcttcggccggcagggcaagcggaccttcatggccgagagacagtacacacggatggaggactggctgaccgccaagctggcctacgagggcctgagcaagacctacctgtccaagacactggcccagtacacctccaagacatgcagcaactgtgggtttaccatcaccagcgccgactacgacagggtgctggagaagctgaagaagacagcaacaggctggatgaccacaattaacggcaaggagctgaaggtggagggccagattacctactacaacagatacaagagacagaacgtagtcaaggacctgtccgtcgagctggatagactgagcgaagaatctgtgaacaacgacatctcctcctggacaaagggcagaagcggagaagctctgagcctcctgaagaaaagattctcccatagacccgtgcaggagaagttcgtgtgcctgaactgcggcttcgagacacacgcagccgagcaagccgccctgaacatcgccagatcctggctgttcctgcggagccaggagtacaagaaataccagacaaacaagacaaccggcaacaccgataagagagccttcgtcgagacctggcagtccttttaccggaagaagcttaaggaggtgtggaaacctgccgtgcggtctggcggatctggcggaggctccaccagccccaagaaaaagagaaaagtctaagctgccttctgcggggcttgccttctggccatgcccttcttctctcccttgcacctgtacctcttggtctttgaataaagcctgagtaggaaggctagcaaaaaaaaaaaaaaaaaaaaaaaaaaaaaaaaaaaaaaaaaaaaaaaaaaaaaaaaaaaaaaaaaaaaaaaaaaaaaaaa

SEQ ID NO: 10366 - RNA, 8787 nt, synthetic construct
  source 1..8787: mol_type = other RNA
aggaaataagagagaaaagaagagtaagaagaaatataagagccaccatggcccctaagaagaagcgtaaagtgagccggatgaaccacgaccaggagttcgacccccctaaggtgtaccctcccgtccccgccgagaagagaaagcccatccgggtcctgagcctgttcgatggcatcgccaccggtctgctggtgctgaaggacctgggcatccaggtggataggtacattgcctccgaggtgtgcgaggactccatcaccgtgggaatggtgcgtcatcagggcaagatcatgtacgtgggcgacgtgcggagcgtgacacagaagcatatccaggagtggggccctttcgacctggtgatcggcggcagcccttgcaatgacctgagcatcgtgaacccagcccggaagggcctgtacgagggaaccggcagactgttcttcgagttttacagactgctgcacgacgcccggcctaaggaaggcgacgaccggcccttcttttggctgttcgagaatgtggtggccatgggagtcagcgacaagcgggatattagccggttcctggagagcaaccccgtgatgatcgatgccaaggaagtgagcgccgcccaccgggccagatacttctggggcaatctgcctggcatgaacagacccctggccagcaccgtgaacgacaagctggagctgcaggagtgcctggagcacggccggatcgccaagttcagcaaggtgagaaccatcaccacccgaagcaacagcatcaaacaaggcaaggaccagcactttcctgtgttcatgaacgagaaggaggacatcctgtggtgtaccgagatggagagagtgttcgggttcccagtccactacacagatgtcagcaacatgtctagactggccagacagagactgctgggaagaagctggtccgtccctgtgatcagacacctgttcgcccctctgaaggagtacttcgcctgcgtgagcagcggcaacagcaacgccaacagccggggccccagcttctctagcggcctggtgccactgtccctgagagggagccacatgggccccatggagatctacaaaaccgtgagcgcctggaagcggcagcctgtgcgcgtgctgagcctgtttcggaatatcgataaagtcctgaaaagcctgggattcctggagagcggctctggctccggcggtggcaccctgaagtacgtggaggatgtgacaaacgtggtcagacgggatgtggagaagtggggccccttcgatctggtgtacggcagcacccaacccctgggcagctcttgtgaccggtgccctggctggtacatgtttcagttccaccggatcctgcagtacgccctgccgagacaggagtcccagcggccattcttttggattttcatggacaacttgctgctgaccgaggatgaccaggaaactaccactcggttcctgcagaccgaagccgtgaccctgcaggacgtgagaggccgggactaccagaacgccatgcgggtgtggtccaacatccctggactgaaaagcaagcacgcacctctgacccctaaagaagaggagtacctgcaggcccaggtgcggagcagaagcaagctggacgcccctaaggtggatctgctggtgaagaattgcctcctgcccctgagagagtacttcaagtatttcagccagaatagtctgcccctgggaggcagcggcggcggcagcagcgtgaccttcgaggacgtggccgtgtacttcagccaggaggagtggaggttcctgaacaaggcccagaagcacctgtaccacgacgtgatgctggaggtgttcgccctgatcgccagcctgggcggcggccagggcgccctggaggccgccgcccccagcgagcagaacgtgagcggcggcggcagccagaaggcctacgcccaggactgcagcctggacaccaaccccggccagaccggcggcccaagcagcggcgcccctcctcccagcggcggcaggcggcccaagcagcggcgcccctcctcccagcggcggcagcccagccggctccccaacctctaccgaggagggcacctctgagtccgccacccccgagagcggccctggcacctccaccgagcccagcgagggcagcgcacccggcagccctgccggcagccccacctccacagaggagggaaccagcaccgagcccagcgaaggcagcgccccaggcaccagcaccgagcctagtgagcaggagattaaacggatcaacaagatcagaagaagacttgtgaaagacagcaacaccaagaaggccggcaagacaggccccatgaaaaccctgctggttagagtgatgacacccgatctgagagagcggctggaaaacctgagaaagaagcctgaaaatatcccccagcccatcagcaatacatctagagccaacctgaataagctgctgaccgattacaccgaaatgaagaaggcgatcctgcatgtgtactgggaagagttccagaaggaccctgtgggcctgatgagccgggtggcccagcctgccagcaagaagatcgatcagaacaagctgaaacctgagatggacgagaagggcaacctgaccaccgccggctttgcctgctctcagtgtggccagcccctgttcgtgtacaagctggagcaggtgtctgagaagggcaaggcttacaccaactacttcggacggtgcaatgtggccgagcacgaaaagctgatcctgctggcccagctgaagcccgagaaggatagcgacgaagccgtgacatatagcctgggaaagtttgggcagagggccctggatttctacagcattcatgtgaccaaggagtccacccaccccgtgaagcccctggcccagatcgccggaaacagatacgcctccggacctgtgggaaaggccctgagcgacgcatgtatgggcacaatcgcctccttcctgtctaagtaccaggacatcatcatcgaacaccagaaggtggtgaagggcaaccagaagagactggagagcctgcgggagctggccggcaaggaaaacctggaataccctagcgtgaccctgccacctcagcctcacaccaaggagggcgttgatgcctacaacgaagtgatcgcccgggtgcgaatgtgggtgaacctgaacctgtggcagaagctgaagctaagcagagatgatgccaagcctctgctgagactgaagggattcccttcctttcctctggtcgagagacaggccaacgaagtggactggtgggacatggtgtgtaacgtgaagaagctgatcaacgagaaaaaggaggatggcaaggtgttttggcagaatctggctggctacaagagacaggaagccctgagaccatacctgagcagcgaggaagatcggaagaagggaaagaaattcgctcggtaccagctgggcgacctgctgctgcacctggaaaagaagcacggcgaggactggggaaaggtgtacgacgaggcctgggagcggattgacaagaaagtggaaggcctgagcaagcacatcaagctggaagaggaacggagaagcgaggacgcccagagcaaggccgccctgaccgactggctgcgggctaaggccagcttcgtgatcgagggcctgaaggaggccgacaaggacgagttctgcagatgcgagctgaagctgcagaagtggtacggggacctgcggggaaagcccttcgccatcgaagccgagaacagcatcctggacatcagcggcttcagcaagcagtacaactgtgccttcatctggcagaaggacggcgtgaagaagctgaacctgtacctgatcatcaactacttcaagggcggcaagctgcggttcaagaagatcaaacctgaagccttcgaagccaacagattctacaccgtgatcaacaaaaagagcggcgagatcgtgcccatggaggtgaacttcaacttcgacgaccccaacctgatcatcctgcctctggcctttggcaagagacagggcagagaattcatctggaacgacctgctgtccctggaaaccggcagcctgaagctggccaacggaagagtgatcgagaagacactgtacaacagaagaacccggcaggatgagcctgccctgttcgtggccctgaccttcgagcggcgggaggtcctggactcctccaatatcaaaccaatgaacctgatcggcgtggcaagaggcgaaaacatccccgccgtgatcgccctgaccgaccccgagggctgcccactgagccggtttaaggatagcctgggaaacccaacccacatcctgagaatcggcgagagctataaggagaagcagcggaccatccaggccaagaaggaggtggagcagcggagagccggcggctacagccggaagtacgccagcaaagccaagaatctggcagacgatatggtgagaaacaccgctagagatctgctgtactacgccgtgacccaggatgccatgctgatcttcgccaacctgagccggggcttcggccggcagggcaagcggaccttcatggccgagagacagtacacacggatggaggactggctgaccgccaagctggcctacgagggcctgagcaagacctacctgtccaagacactggcccagtacacctccaagacatgcagcaactgtgggtttaccatcaccagcgccgactacgacagggtgctggagaagctgaagaagacagcaacaggctggatgaccacaattaacggcaaggagctgaaggtggagggccagattacctactacaacagatacaagagacagaacgtagtcaaggacctgtccgtcgagctggatagactgagcgaagaatctgtgaacaacgacatctcctcctggacaaagggcagaagcggagaagctctgagcctcctgaagaaaagattctcccatagacccgtgcaggagaagttcgtgtgcctgaactgcggcttcgagacacacgcagccgagcaagccgccctgaacatcgccagatcctggctgttcctgcggagccaggagtacaagaaataccagacaaacaagacaaccggcaacaccgataagagagccttcgtcgagacctggcagtccttttaccggaagaagcttaaggaggtgtggaaacctgccgtgcggtctggcggatctggcggaggctccaccagccccaagaaaaagagaaaagtctaagctgccttctgcggggcttgccttctggccatgcccttcttctctcccttgcacctgtacctcttggtctttgaataaagcctgagtaggaaggctagcaaaaaaaaaaaaaaaaaaaaaaaaaaaaaaaaaaaaaaaaaaaaaaaaaaaaaaaaaaaaaaaaaaaaaaaaaaaaaaaagcccagccggctccccaacctctaccgaggagggcacctctgagtccgccacccccgagagcggccctggcacctccaccgagcccagcgagggcagcgcacccggcagccctgccggcagccccacctccacagaggagggaaccagcaccgagcccagcgaaggcagcgccccaggcaccagcaccgagcctagtgagcaggagattaaacggatcaacaagatcagaagaagacttgtgaaagacagcaacaccaagaaggccggcaagacaggccccatgaaaaccctgctggttagagtgatgacacccgatctgagagagcggctggaaaacctgagaaagaagcctgaaaatatcccccagcccatcagcaatacatctagagccaacctgaataagctgctgaccgattacaccgaaatgaagaaggcgatcctgcatgtgtactgggaagagttccagaaggaccctgtgggcctgatgagccgggtggcccagcctgccagcaagaagatcgatcagaacaagctgaaacctgagatggacgagaagggcaacctgaccaccgccggctttgcctgctctcagtgtggccagcccctgttcgtgtacaagctggagcaggtgtctgagaagggcaaggcttacaccaactacttcggacggtgcaatgtggccgagcacgaaaagctgatcctgctggcccagctgaagcccgagaaggatagcgacgaagccgtgacatatagcctgggaaagtttgggcagagggccctggatttctacagcattcatgtgaccaaggagtccacccaccccgtgaagcccctggcccagatcgccggaaacagatacgcctccggacctgtgggaaaggccctgagcgacgcatgtatgggcacaatcgcctccttcctgtctaagtaccaggacatcatcatcgaacaccagaaggtggtgaagggcaaccagaagagactggagagcctgcgggagctggccggcaaggaaaacctggaataccctagcgtgaccctgccacctcagcctcacaccaaggagggcgttgatgcctacaacgaagtgatcgcccgggtgcgaatgtgggtgaacctgaacctgtggcagaagctgaagctaagcagagatgatgccaagcctctgctgagactgaagggattcccttcctttcctctggtcgagagacaggccaacgaagtggactggtgggacatggtgtgtaacgtgaagaagctgatcaacgagaaaaaggaggatggcaaggtgttttggcagaatctggctggctacaagagacaggaagccctgagaccatacctgagcagcgaggaagatcggaagaagggaaagaaattcgctcggtaccagctgggcgacctgctgctgcacctggaaaagaagcacggcgaggactggggaaaggtgtacgacgaggcctgggagcggattgacaagaaagtggaaggcctgagcaagcacatcaagctggaagaggaacggagaagcgaggacgcccagagcaaggccgccctgaccgactggctgcgggctaaggccagcttcgtgatcgagggcctgaaggaggccgacaaggacgagttctgcagatgcgagctgaagctgcagaagtggtacggggacctgcggggaaagcccttcgccatcgaagccgagaacagcatcctggacatcagcggcttcagcaagcagtacaactgtgccttcatctggcagaaggacggcgtgaagaagctgaacctgtacctgatcatcaactacttcaagggcggcaagctgcggttcaagaagatcaaacctgaagccttcgaagccaacagattctacaccgtgatcaacaaaaagagcggcgagatcgtgcccatggaggtgaacttcaacttcgacgaccccaacctgatcatcctgcctctggcctttggcaagagacagggcagagaattcatctggaacgacctgctgtccctggaaaccggcagcctgaagctggccaacggaagagtgatcgagaagacactgtacaacagaagaacccggcaggatgagcctgccctgttcgtggccctgaccttcgagcggcgggaggtcctggactcctccaatatcaaaccaatgaacctgatcggcgtggcaagaggcgaaaacatccccgccgtgatcgccctgaccgaccccgagggctgcccactgagccggtttaaggatagcctgggaaacccaacccacatcctgagaatcggcgagagctataaggagaagcagcggaccatccaggccaagaaggaggtggagcagcggagagccggcggctacagccggaagtacgccagcaaagccaagaatctggcagacgatatggtgagaaacaccgctagagatctgctgtactacgccgtgacccaggatgccatgctgatcttcgccaacctgagccggggcttcggccggcagggcaagcggaccttcatggccgagagacagtacacacggatggaggactggctgaccgccaagctggcctacgagggcctgagcaagacctacctgtccaagacactggcccagtacacctccaagacatgcagcaactgtgggtttaccatcaccagcgccgactacgacagggtgctggagaagctgaagaagacagcaacaggctggatgaccacaattaacggcaaggagctgaaggtggagggccagattacctactacaacagatacaagagacagaacgtagtcaaggacctgtccgtcgagctggatagactgagcgaagaatctgtgaacaacgacatctcctcctggacaaagggcagaagcggagaagctctgagcctcctgaagaaaagattctcccatagacccgtgcaggagaagttcgtgtgcctgaactgcggcttcgagacacacgcagccgagcaagccgccctgaacatcgccagatcctggctgttcctgcggagccaggagtacaagaaataccagacaaacaagacaaccggcaacaccgataagagagccttcgtcgagacctggcagtccttttaccggaagaagcttaaggaggtgtggaaacctgccgtgcggtctggcggatctggcggaggctccaccagccccaagaaaaagagaaaagtctaagctgccttctgcggggcttgccttctggccatgcccttcttctctcccttgcacctgtacctcttggtctttgaataaagcctgagtaggaaggctagcaaaaaaaaaaaaaaaaaaaaaaaaaaaaaaaaaaaaaaaaaaaaaaaaaaaaaaaaaaaaaaaaaaaaaaaaaaaaaaaa

SEQ ID NO: 10367 - RNA, 8787 nt, synthetic construct
  source 1..8787: mol_type = other RNA
aggaaataagagagaaaagaagagtaagaagaaatataagagccaccatggcccctaagaagaagcgtaaagtgagccggatgaaccacgaccaggagttcgacccccctaaggtgtaccctcccgtccccgccgagaagagaaagcccatccgggtcctgagcctgttcgatggcatcgccaccggtctgctggtgctgaaggacctgggcatccaggtggataggtacattgcctccgaggtgtgcgaggactccatcaccgtgggaatggtgcgtcatcagggcaagatcatgtacgtgggcgacgtgcggagcgtgacacagaagcatatccaggagtggggccctttcgacctggtgatcggcggcagcccttgcaatgacctgagcatcgtgaacccagcccggaagggcctgtacgagggaaccggcagactgttcttcgagttttacagactgctgcacgacgcccggcctaaggaaggcgacgaccggcccttcttttggctgttcgagaatgtggtggccatgggagtcagcgacaagcgggatattagccggttcctggagagcaaccccgtgatgatcgatgccaaggaagtgagcgccgcccaccgggccagatacttctggggcaatctgcctggcatgaacagacccctggccagcaccgtgaacgacaagctggagctgcaggagtgcctggagcacggccggatcgccaagttcagcaaggtgagaaccatcaccacccgaagcaacagcatcaaacaaggcaaggaccagcactttcctgtgttcatgaacgagaaggaggacatcctgtggtgtaccgagatggagagagtgttcgggttcccagtccactacacagatgtcagcaacatgtctagactggccagacagagactgctgggaagaagctggtccgtccctgtgatcagacacctgttcgcccctctgaaggagtacttcgcctgcgtgagcagcggcaacagcaacgccaacagccggggccccagcttctctagcggcctggtgccactgtccctgagagggagccacatgggccccatggagatctacaaaaccgtgagcgcctggaagcggcagcctgtgcgcgtgctgagcctgtttcggaatatcgataaagtcctgaaaagcctgggattcctggagagcggctctggctccggcggtggcaccctgaagtacgtggaggatgtgacaaacgtggtcagacgggatgtggagaagtggggccccttcgatctggtgtacggcagcacccaacccctgggcagctcttgtgaccggtgccctggctggtacatgtttcagttccaccggatcctgcagtacgccctgccgagacaggagtcccagcggccattcttttggattttcatggacaacttgctgctgaccgaggatgaccaggaaactaccactcggttcctgcagaccgaagccgtgaccctgcaggacgtgagaggccgggactaccagaacgccatgcgggtgtggtccaacatccctggactgaaaagcaagcacgcacctctgacccctaaagaagaggagtacctgcaggcccaggtgcggagcagaagcaagctggacgcccctaaggtggatctgctggtgaagaattgcctcctgcccctgagagagtacttcaagtatttcagccagaatagtctgcccctgggaggcagcggcggcggcgtgaaggaggtggtgaccctgcaggacgtggccgtggacttcacctgggaggagtggaggctgctgagccccccccagaaggagctgtacagggaggtgatgctggagaacgcccagaacctgctgagcgtgggcctgcccgcccccctggaggacgtgctgagctacctggagcagaggaagggcccctggatgctggagcagaagaggctgaggagctgctgccccggcgagatcaggctgggcggcccaagcagcggcgcccctcctcccagcggcggcaggcggcccaagcagcggcgcccctcctcccagcggcggcagcccagccggctccccaacctctaccgaggagggcacctctgagtccgccacccccgagagcggccctggcacctccaccgagcccagcgagggcagcgcacccggcagccctgccggcagccccacctccacagaggagggaaccagcaccgagcccagcgaaggcagcgccccaggcaccagcaccgagcctagtgagcaggagattaaacggatcaacaagatcagaagaagacttgtgaaagacagcaacaccaagaaggccggcaagacaggccccatgaaaaccctgctggttagagtgatgacacccgatctgagagagcggctggaaaacctgagaaagaagcctgaaaatatcccccagcccatcagcaatacatctagagccaacctgaataagctgctgaccgattacaccgaaatgaagaaggcgatcctgcatgtgtactgggaagagttccagaaggaccctgtgggcctgatgagccgggtggcccagcctgccagcaagaagatcgatcagaacaagctgaaacctgagatggacgagaagggcaacctgaccaccgccggctttgcctgctctcagtgtggccagcccctgttcgtgtacaagctggagcaggtgtctgagaagggcaaggcttacaccaactacttcggacggtgcaatgtggccgagcacgaaaagctgatcctgctggcccagctgaagcccgagaaggatagcgacgaagccgtgacatatagcctgggaaagtttgggcagagggccctggatttctacagcattcatgtgaccaaggagtccacccaccccgtgaagcccctggcccagatcgccggaaacagatacgcctccggacctgtgggaaaggccctgagcgacgcatgtatgggcacaatcgcctccttcctgtctaagtaccaggacatcatcatcgaacaccagaaggtggtgaagggcaaccagaagagactggagagcctgcgggagctggccggcaaggaaaacctggaataccctagcgtgaccctgccacctcagcctcacaccaaggagggcgttgatgcctacaacgaagtgatcgcccgggtgcgaatgtgggtgaacctgaacctgtggcagaagctgaagctaagcagagatgatgccaagcctctgctgagactgaagggattcccttcctttcctctggtcgagagacaggccaacgaagtggactggtgggacatggtgtgtaacgtgaagaagctgatcaacgagaaaaaggaggatggcaaggtgttttggcagaatctggctggctacaagagacaggaagccctgagaccatacctgagcagcgaggaagatcggaagaagggaaagaaattcgctcggtaccagctgggcgacctgctgctgcacctggaaaagaagcacggcgaggactggggaaaggtgtacgacgaggcctgggagcggattgacaagaaagtggaaggcctgagcaagcacatcaagctggaagaggaacggagaagcgaggacgcccagagcaaggccgccctgaccgactggctgcgggctaaggccagcttcgtgatcgagggcctgaaggaggccgacaaggacgagttctgcagatgcgagctgaagctgcagaagtggtacggggacctgcggggaaagcccttcgccatcgaagccgagaacagcatcctggacatcagcggcttcagcaagcagtacaactgtgccttcatctggcagaaggacggcgtgaagaagctgaacctgtacctgatcatcaactacttcaagggcggcaagctgcggttcaagaagatcaaacctgaagccttcgaagccaacagattctacaccgtgatcaacaaaaagagcggcgagatcgtgcccatggaggtgaacttcaacttcgacgaccccaacctgatcatcctgcctctggcctttggcaagagacagggcagagaattcatctggaacgacctgctgtccctggaaaccggcagcctgaagctggccaacggaagagtgatcgagaagacactgtacaacagaagaacccggcaggatgagcctgccctgttcgtggccctgaccttcgagcggcgggaggtcctggactcctccaatatcaaaccaatgaacctgatcggcgtggcaagaggcgaaaacatccccgccgtgatcgccctgaccgaccccgagggctgcccactgagccggtttaaggatagcctgggaaacccaacccacatcctgagaatcggcgagagctataaggagaagcagcggaccatccaggccaagaaggaggtggagcagcggagagccggcggctacagccggaagtacgccagcaaagccaagaatctggcagacgatatggtgagaaacaccgctagagatctgctgtactacgccgtgacccaggatgccatgctgatcttcgccaacctgagccggggcttcggccggcagggcaagcggaccttcatggccgagagacagtacacacggatggaggactggctgaccgccaagctggcctacgagggcctgagcaagacctacctgtccaagacactggcccagtacacctccaagacatgcagcaactgtgggtttaccatcaccagcgccgactacgacagggtgctggagaagctgaagaagacagcaacaggctggatgaccacaattaacggcaaggagctgaaggtggagggccagattacctactacaacagatacaagagacagaacgtagtcaaggacctgtccgtcgagctggatagactgagcgaagaatctgtgaacaacgacatctcctcctggacaaagggcagaagcggagaagctctgagcctcctgaagaaaagattctcccatagacccgtgcaggagaagttcgtgtgcctgaactgcggcttcgagacacacgcagccgagcaagccgccctgaacatcgccagatcctggctgttcctgcggagccaggagtacaagaaataccagacaaacaagacaaccggcaacaccgataagagagccttcgtcgagacctggcagtccttttaccggaagaagcttaaggaggtgtggaaacctgccgtgcggtctggcggatctggcggaggctccaccagccccaagaaaaagagaaaagtctaagctgccttctgcggggcttgccttctggccatgcccttcttctctcccttgcacctgtacctcttggtctttgaataaagcctgagtaggaaggctagcaaaaaaaaaaaaaaaaaaaaaaaaaaaaaaaaaaaaaaaaaaaaaaaaaaaaaaaaaaaaaaaaaaaaaaaaaaaaaaaagcccagccggctccccaacctctaccgaggagggcacctctgagtccgccacccccgagagcggccctggcacctccaccgagcccagcgagggcagcgcacccggcagccctgccggcagccccacctccacagaggagggaaccagcaccgagcccagcgaaggcagcgccccaggcaccagcaccgagcctagtgagcaggagattaaacggatcaacaagatcagaagaagacttgtgaaagacagcaacaccaagaaggccggcaagacaggccccatgaaaaccctgctggttagagtgatgacacccgatctgagagagcggctggaaaacctgagaaagaagcctgaaaatatcccccagcccatcagcaatacatctagagccaacctgaataagctgctgaccgattacaccgaaatgaagaaggcgatcctgcatgtgtactgggaagagttccagaaggaccctgtgggcctgatgagccgggtggcccagcctgccagcaagaagatcgatcagaacaagctgaaacctgagatggacgagaagggcaacctgaccaccgccggctttgcctgctctcagtgtggccagcccctgttcgtgtacaagctggagcaggtgtctgagaagggcaaggcttacaccaactacttcggacggtgcaatgtggccgagcacgaaaagctgatcctgctggcccagctgaagcccgagaaggatagcgacgaagccgtgacatatagcctgggaaagtttgggcagagggccctggatttctacagcattcatgtgaccaaggagtccacccaccccgtgaagcccctggcccagatcgccggaaacagatacgcctccggacctgtgggaaaggccctgagcgacgcatgtatgggcacaatcgcctccttcctgtctaagtaccaggacatcatcatcgaacaccagaaggtggtgaagggcaaccagaagagactggagagcctgcgggagctggccggcaaggaaaacctggaataccctagcgtgaccctgccacctcagcctcacaccaaggagggcgttgatgcctacaacgaagtgatcgcccgggtgcgaatgtgggtgaacctgaacctgtggcagaagctgaagctaagcagagatgatgccaagcctctgctgagactgaagggattcccttcctttcctctggtcgagagacaggccaacgaagtggactggtgggacatggtgtgtaacgtgaagaagctgatcaacgagaaaaaggaggatggcaaggtgttttggcagaatctggctggctacaagagacaggaagccctgagaccatacctgagcagcgaggaagatcggaagaagggaaagaaattcgctcggtaccagctgggcgacctgctgctgcacctggaaaagaagcacggcgaggactggggaaaggtgtacgacgaggcctgggagcggattgacaagaaagtggaaggcctgagcaagcacatcaagctggaagaggaacggagaagcgaggacgcccagagcaaggccgccctgaccgactggctgcgggctaaggccagcttcgtgatcgagggcctgaaggaggccgacaaggacgagttctgcagatgcgagctgaagctgcagaagtggtacggggacctgcggggaaagcccttcgccatcgaagccgagaacagcatcctggacatcagcggcttcagcaagcagtacaactgtgccttcatctggcagaaggacggcgtgaagaagctgaacctgtacctgatcatcaactacttcaagggcggcaagctgcggttcaagaagatcaaacctgaagccttcgaagccaacagattctacaccgtgatcaacaaaaagagcggcgagatcgtgcccatggaggtgaacttcaacttcgacgaccccaacctgatcatcctgcctctggcctttggcaagagacagggcagagaattcatctggaacgacctgctgtccctggaaaccggcagcctgaagctggccaacggaagagtgatcgagaagacactgtacaacagaagaacccggcaggatgagcctgccctgttcgtggccctgaccttcgagcggcgggaggtcctggactcctccaatatcaaaccaatgaacctgatcggcgtggcaagaggcgaaaacatccccgccgtgatcgccctgaccgaccccgagggctgcccactgagccggtttaaggatagcctgggaaacccaacccacatcctgagaatcggcgagagctataaggagaagcagcggaccatccaggccaagaaggaggtggagcagcggagagccggcggctacagccggaagtacgccagcaaagccaagaatctggcagacgatatggtgagaaacaccgctagagatctgctgtactacgccgtgacccaggatgccatgctgatcttcgccaacctgagccggggcttcggccggcagggcaagcggaccttcatggccgagagacagtacacacggatggaggactggctgaccgccaagctggcctacgagggcctgagcaagacctacctgtccaagacactggcccagtacacctccaagacatgcagcaactgtgggtttaccatcaccagcgccgactacgacagggtgctggagaagctgaagaagacagcaacaggctggatgaccacaattaacggcaaggagctgaaggtggagggccagattacctactacaacagatacaagagacagaacgtagtcaaggacctgtccgtcgagctggatagactgagcgaagaatctgtgaacaacgacatctcctcctggacaaagggcagaagcggagaagctctgagcctcctgaagaaaagattctcccatagacccgtgcaggagaagttcgtgtgcctgaactgcggcttcgagacacacgcagccgagcaagccgccctgaacatcgccagatcctggctgttcctgcggagccaggagtacaagaaataccagacaaacaagacaaccggcaacaccgataagagagccttcgtcgagacctggcagtccttttaccggaagaagcttaaggaggtgtggaaacctgccgtgcggtctggcggatctggcggaggctccaccagccccaagaaaaagagaaaagtctaagctgccttctgcggggcttgccttctggccatgcccttcttctctcccttgcacctgtacctcttggtctttgaataaagcctgagtaggaaggctagcaaaaaaaaaaaaaaaaaaaaaaaaaaaaaaaaaaaaaaaaaaaaaaaaaaaaaaaaaaaaaaaaaaaaaaaaaaaaaaaa

SEQ ID NO: 10368 - RNA, 8787 nt, synthetic construct
  source 1..8787: mol_type = other RNA
aggaaataagagagaaaagaagagtaagaagaaatataagagccaccatggcccctaagaagaagcgtaaagtgagccggatgaaccacgaccaggagttcgacccccctaaggtgtaccctcccgtccccgccgagaagagaaagcccatccgggtcctgagcctgttcgatggcatcgccaccggtctgctggtgctgaaggacctgggcatccaggtggataggtacattgcctccgaggtgtgcgaggactccatcaccgtgggaatggtgcgtcatcagggcaagatcatgtacgtgggcgacgtgcggagcgtgacacagaagcatatccaggagtggggccctttcgacctggtgatcggcggcagcccttgcaatgacctgagcatcgtgaacccagcccggaagggcctgtacgagggaaccggcagactgttcttcgagttttacagactgctgcacgacgcccggcctaaggaaggcgacgaccggcccttcttttggctgttcgagaatgtggtggccatgggagtcagcgacaagcgggatattagccggttcctggagagcaaccccgtgatgatcgatgccaaggaagtgagcgccgcccaccgggccagatacttctggggcaatctgcctggcatgaacagacccctggccagcaccgtgaacgacaagctggagctgcaggagtgcctggagcacggccggatcgccaagttcagcaaggtgagaaccatcaccacccgaagcaacagcatcaaacaaggcaaggaccagcactttcctgtgttcatgaacgagaaggaggacatcctgtggtgtaccgagatggagagagtgttcgggttcccagtccactacacagatgtcagcaacatgtctagactggccagacagagactgctgggaagaagctggtccgtccctgtgatcagacacctgttcgcccctctgaaggagtacttcgcctgcgtgagcagcggcaacagcaacgccaacagccggggccccagcttctctagcggcctggtgccactgtccctgagagggagccacatgggccccatggagatctacaaaaccgtgagcgcctggaagcggcagcctgtgcgcgtgctgagcctgtttcggaatatcgataaagtcctgaaaagcctgggattcctggagagcggctctggctccggcggtggcaccctgaagtacgtggaggatgtgacaaacgtggtcagacgggatgtggagaagtggggccccttcgatctggtgtacggcagcacccaacccctgggcagctcttgtgaccggtgccctggctggtacatgtttcagttccaccggatcctgcagtacgccctgccgagacaggagtcccagcggccattcttttggattttcatggacaacttgctgctgaccgaggatgaccaggaaactaccactcggttcctgcagaccgaagccgtgaccctgcaggacgtgagaggccgggactaccagaacgccatgcgggtgtggtccaacatccctggactgaaaagcaagcacgcacctctgacccctaaagaagaggagtacctgcaggcccaggtgcggagcagaagcaagctggacgcccctaaggtggatctgctggtgaagaattgcctcctgcccctgagagagtacttcaagtatttcagccagaatagtctgcccctgggaggcagcggcggcggcatgctgcagaccgcctggaggcaggagcccgtgaccttcgaggacgtggccgtgtacttcacccagaacgagtggaccagcctggaccccgtgcagagggccctgtacagggaggtgatgctggagaactacgccaacgtggccagcctggccttccccttcaccacccccgtgctggtgagccagctggagcagggcgagaggccctggggcctggacccctgggagcccgtgggcagggagggcggcccaagcagcggcgcccctcctcccagcggcggcaggcggcccaagcagcggcgcccctcctcccagcggcggcagcccagccggctccccaacctctaccgaggagggcacctctgagtccgccacccccgagagcggccctggcacctccaccgagcccagcgagggcagcgcacccggcagccctgccggcagccccacctccacagaggagggaaccagcaccgagcccagcgaaggcagcgccccaggcaccagcaccgagcctagtgagcaggagattaaacggatcaacaagatcagaagaagacttgtgaaagacagcaacaccaagaaggccggcaagacaggccccatgaaaaccctgctggttagagtgatgacacccgatctgagagagcggctggaaaacctgagaaagaagcctgaaaatatcccccagcccatcagcaatacatctagagccaacctgaataagctgctgaccgattacaccgaaatgaagaaggcgatcctgcatgtgtactgggaagagttccagaaggaccctgtgggcctgatgagccgggtggcccagcctgccagcaagaagatcgatcagaacaagctgaaacctgagatggacgagaagggcaacctgaccaccgccggctttgcctgctctcagtgtggccagcccctgttcgtgtacaagctggagcaggtgtctgagaagggcaaggcttacaccaactacttcggacggtgcaatgtggccgagcacgaaaagctgatcctgctggcccagctgaagcccgagaaggatagcgacgaagccgtgacatatagcctgggaaagtttgggcagagggccctggatttctacagcattcatgtgaccaaggagtccacccaccccgtgaagcccctggcccagatcgccggaaacagatacgcctccggacctgtgggaaaggccctgagcgacgcatgtatgggcacaatcgcctccttcctgtctaagtaccaggacatcatcatcgaacaccagaaggtggtgaagggcaaccagaagagactggagagcctgcgggagctggccggcaaggaaaacctggaataccctagcgtgaccctgccacctcagcctcacaccaaggagggcgttgatgcctacaacgaagtgatcgcccgggtgcgaatgtgggtgaacctgaacctgtggcagaagctgaagctaagcagagatgatgccaagcctctgctgagactgaagggattcccttcctttcctctggtcgagagacaggccaacgaagtggactggtgggacatggtgtgtaacgtgaagaagctgatcaacgagaaaaaggaggatggcaaggtgttttggcagaatctggctggctacaagagacaggaagccctgagaccatacctgagcagcgaggaagatcggaagaagggaaagaaattcgctcggtaccagctgggcgacctgctgctgcacctggaaaagaagcacggcgaggactggggaaaggtgtacgacgaggcctgggagcggattgacaagaaagtggaaggcctgagcaagcacatcaagctggaagaggaacggagaagcgaggacgcccagagcaaggccgccctgaccgactggctgcgggctaaggccagcttcgtgatcgagggcctgaaggaggccgacaaggacgagttctgcagatgcgagctgaagctgcagaagtggtacggggacctgcggggaaagcccttcgccatcgaagccgagaacagcatcctggacatcagcggcttcagcaagcagtacaactgtgccttcatctggcagaaggacggcgtgaagaagctgaacctgtacctgatcatcaactacttcaagggcggcaagctgcggttcaagaagatcaaacctgaagccttcgaagccaacagattctacaccgtgatcaacaaaaagagcggcgagatcgtgcccatggaggtgaacttcaacttcgacgaccccaacctgatcatcctgcctctggcctttggcaagagacagggcagagaattcatctggaacgacctgctgtccctggaaaccggcagcctgaagctggccaacggaagagtgatcgagaagacactgtacaacagaagaacccggcaggatgagcctgccctgttcgtggccctgaccttcgagcggcgggaggtcctggactcctccaatatcaaaccaatgaacctgatcggcgtggcaagaggcgaaaacatccccgccgtgatcgccctgaccgaccccgagggctgcccactgagccggtttaaggatagcctgggaaacccaacccacatcctgagaatcggcgagagctataaggagaagcagcggaccatccaggccaagaaggaggtggagcagcggagagccggcggctacagccggaagtacgccagcaaagccaagaatctggcagacgatatggtgagaaacaccgctagagatctgctgtactacgccgtgacccaggatgccatgctgatcttcgccaacctgagccggggcttcggccggcagggcaagcggaccttcatggccgagagacagtacacacggatggaggactggctgaccgccaagctggcctacgagggcctgagcaagacctacctgtccaagacactggcccagtacacctccaagacatgcagcaactgtgggtttaccatcaccagcgccgactacgacagggtgctggagaagctgaagaagacagcaacaggctggatgaccacaattaacggcaaggagctgaaggtggagggccagattacctactacaacagatacaagagacagaacgtagtcaaggacctgtccgtcgagctggatagactgagcgaagaatctgtgaacaacgacatctcctcctggacaaagggcagaagcggagaagctctgagcctcctgaagaaaagattctcccatagacccgtgcaggagaagttcgtgtgcctgaactgcggcttcgagacacacgcagccgagcaagccgccctgaacatcgccagatcctggctgttcctgcggagccaggagtacaagaaataccagacaaacaagacaaccggcaacaccgataagagagccttcgtcgagacctggcagtccttttaccggaagaagcttaaggaggtgtggaaacctgccgtgcggtctggcggatctggcggaggctccaccagccccaagaaaaagagaaaagtctaagctgccttctgcggggcttgccttctggccatgcccttcttctctcccttgcacctgtacctcttggtctttgaataaagcctgagtaggaaggctagcaaaaaaaaaaaaaaaaaaaaaaaaaaaaaaaaaaaaaaaaaaaaaaaaaaaaaaaaaaaaaaaaaaaaaaaaaaaaaaaagcccagccggctccccaacctctaccgaggagggcacctctgagtccgccacccccgagagcggccctggcacctccaccgagcccagcgagggcagcgcacccggcagccctgccggcagccccacctccacagaggagggaaccagcaccgagcccagcgaaggcagcgccccaggcaccagcaccgagcctagtgagcaggagattaaacggatcaacaagatcagaagaagacttgtgaaagacagcaacaccaagaaggccggcaagacaggccccatgaaaaccctgctggttagagtgatgacacccgatctgagagagcggctggaaaacctgagaaagaagcctgaaaatatcccccagcccatcagcaatacatctagagccaacctgaataagctgctgaccgattacaccgaaatgaagaaggcgatcctgcatgtgtactgggaagagttccagaaggaccctgtgggcctgatgagccgggtggcccagcctgccagcaagaagatcgatcagaacaagctgaaacctgagatggacgagaagggcaacctgaccaccgccggctttgcctgctctcagtgtggccagcccctgttcgtgtacaagctggagcaggtgtctgagaagggcaaggcttacaccaactacttcggacggtgcaatgtggccgagcacgaaaagctgatcctgctggcccagctgaagcccgagaaggatagcgacgaagccgtgacatatagcctgggaaagtttgggcagagggccctggatttctacagcattcatgtgaccaaggagtccacccaccccgtgaagcccctggcccagatcgccggaaacagatacgcctccggacctgtgggaaaggccctgagcgacgcatgtatgggcacaatcgcctccttcctgtctaagtaccaggacatcatcatcgaacaccagaaggtggtgaagggcaaccagaagagactggagagcctgcgggagctggccggcaaggaaaacctggaataccctagcgtgaccctgccacctcagcctcacaccaaggagggcgttgatgcctacaacgaagtgatcgcccgggtgcgaatgtgggtgaacctgaacctgtggcagaagctgaagctaagcagagatgatgccaagcctctgctgagactgaagggattcccttcctttcctctggtcgagagacaggccaacgaagtggactggtgggacatggtgtgtaacgtgaagaagctgatcaacgagaaaaaggaggatggcaaggtgttttggcagaatctggctggctacaagagacaggaagccctgagaccatacctgagcagcgaggaagatcggaagaagggaaagaaattcgctcggtaccagctgggcgacctgctgctgcacctggaaaagaagcacggcgaggactggggaaaggtgtacgacgaggcctgggagcggattgacaagaaagtggaaggcctgagcaagcacatcaagctggaagaggaacggagaagcgaggacgcccagagcaaggccgccctgaccgactggctgcgggctaaggccagcttcgtgatcgagggcctgaaggaggccgacaaggacgagttctgcagatgcgagctgaagctgcagaagtggtacggggacctgcggggaaagcccttcgccatcgaagccgagaacagcatcctggacatcagcggcttcagcaagcagtacaactgtgccttcatctggcagaaggacggcgtgaagaagctgaacctgtacctgatcatcaactacttcaagggcggcaagctgcggttcaagaagatcaaacctgaagccttcgaagccaacagattctacaccgtgatcaacaaaaagagcggcgagatcgtgcccatggaggtgaacttcaacttcgacgaccccaacctgatcatcctgcctctggcctttggcaagagacagggcagagaattcatctggaacgacctgctgtccctggaaaccggcagcctgaagctggccaacggaagagtgatcgagaagacactgtacaacagaagaacccggcaggatgagcctgccctgttcgtggccctgaccttcgagcggcgggaggtcctggactcctccaatatcaaaccaatgaacctgatcggcgtggcaagaggcgaaaacatccccgccgtgatcgccctgaccgaccccgagggctgcccactgagccggtttaaggatagcctgggaaacccaacccacatcctgagaatcggcgagagctataaggagaagcagcggaccatccaggccaagaaggaggtggagcagcggagagccggcggctacagccggaagtacgccagcaaagccaagaatctggcagacgatatggtgagaaacaccgctagagatctgctgtactacgccgtgacccaggatgccatgctgatcttcgccaacctgagccggggcttcggccggcagggcaagcggaccttcatggccgagagacagtacacacggatggaggactggctgaccgccaagctggcctacgagggcctgagcaagacctacctgtccaagacactggcccagtacacctccaagacatgcagcaactgtgggtttaccatcaccagcgccgactacgacagggtgctggagaagctgaagaagacagcaacaggctggatgaccacaattaacggcaaggagctgaaggtggagggccagattacctactacaacagatacaagagacagaacgtagtcaaggacctgtccgtcgagctggatagactgagcgaagaatctgtgaacaacgacatctcctcctggacaaagggcagaagcggagaagctctgagcctcctgaagaaaagattctcccatagacccgtgcaggagaagttcgtgtgcctgaactgcggcttcgagacacacgcagccgagcaagccgccctgaacatcgccagatcctggctgttcctgcggagccaggagtacaagaaataccagacaaacaagacaaccggcaacaccgataagagagccttcgtcgagacctggcagtccttttaccggaagaagcttaaggaggtgtggaaacctgccgtgcggtctggcggatctggcggaggctccaccagccccaagaaaaagagaaaagtctaagctgccttctgcggggcttgccttctggccatgcccttcttctctcccttgcacctgtacctcttggtctttgaataaagcctgagtaggaaggctagcaaaaaaaaaaaaaaaaaaaaaaaaaaaaaaaaaaaaaaaaaaaaaaaaaaaaaaaaaaaaaaaaaaaaaaaaaaaaaaaa

SEQ ID NO: 10369 - RNA, 8787 nt, synthetic construct
  source 1..8787: mol_type = other RNA
aggaaataagagagaaaagaagagtaagaagaaatataagagccaccatggcccctaagaagaagcgtaaagtgagccggatgaaccacgaccaggagttcgacccccctaaggtgtaccctcccgtccccgccgagaagagaaagcccatccgggtcctgagcctgttcgatggcatcgccaccggtctgctggtgctgaaggacctgggcatccaggtggataggtacattgcctccgaggtgtgcgaggactccatcaccgtgggaatggtgcgtcatcagggcaagatcatgtacgtgggcgacgtgcggagcgtgacacagaagcatatccaggagtggggccctttcgacctggtgatcggcggcagcccttgcaatgacctgagcatcgtgaacccagcccggaagggcctgtacgagggaaccggcagactgttcttcgagttttacagactgctgcacgacgcccggcctaaggaaggcgacgaccggcccttcttttggctgttcgagaatgtggtggccatgggagtcagcgacaagcgggatattagccggttcctggagagcaaccccgtgatgatcgatgccaaggaagtgagcgccgcccaccgggccagatacttctggggcaatctgcctggcatgaacagacccctggccagcaccgtgaacgacaagctggagctgcaggagtgcctggagcacggccggatcgccaagttcagcaaggtgagaaccatcaccacccgaagcaacagcatcaaacaaggcaaggaccagcactttcctgtgttcatgaacgagaaggaggacatcctgtggtgtaccgagatggagagagtgttcgggttcccagtccactacacagatgtcagcaacatgtctagactggccagacagagactgctgggaagaagctggtccgtccctgtgatcagacacctgttcgcccctctgaaggagtacttcgcctgcgtgagcagcggcaacagcaacgccaacagccggggccccagcttctctagcggcctggtgccactgtccctgagagggagccacatgggccccatggagatctacaaaaccgtgagcgcctggaagcggcagcctgtgcgcgtgctgagcctgtttcggaatatcgataaagtcctgaaaagcctgggattcctggagagcggctctggctccggcggtggcaccctgaagtacgtggaggatgtgacaaacgtggtcagacgggatgtggagaagtggggccccttcgatctggtgtacggcagcacccaacccctgggcagctcttgtgaccggtgccctggctggtacatgtttcagttccaccggatcctgcagtacgccctgccgagacaggagtcccagcggccattcttttggattttcatggacaacttgctgctgaccgaggatgaccaggaaactaccactcggttcctgcagaccgaagccgtgaccctgcaggacgtgagaggccgggactaccagaacgccatgcgggtgtggtccaacatccctggactgaaaagcaagcacgcacctctgacccctaaagaagaggagtacctgcaggcccaggtgcggagcagaagcaagctggacgcccctaaggtggatctgctggtgaagaattgcctcctgcccctgagagagtacttcaagtatttcagccagaatagtctgcccctgggaggcagcggcggcggcagccagggcaccgtgagcttcaaggacgtggccgtgaacttcacccaggaggagtggcagtacctggacctgccccagagggacctgtacaaggacgtgatgctggagaactacaccaacctgatcagcgtgggctaccagaccaccaagcccagcgtgatccacaagctggagcagggcgaggagccctggatggtggagagggagatccccaactggagctacgccgaggagacctggcagggcggcccaagcagcggcgcccctcctcccagcggcggcaggcggcccaagcagcggcgcccctcctcccagcggcggcagcccagccggctccccaacctctaccgaggagggcacctctgagtccgccacccccgagagcggccctggcacctccaccgagcccagcgagggcagcgcacccggcagccctgccggcagccccacctccacagaggagggaaccagcaccgagcccagcgaaggcagcgccccaggcaccagcaccgagcctagtgagcaggagattaaacggatcaacaagatcagaagaagacttgtgaaagacagcaacaccaagaaggccggcaagacaggccccatgaaaaccctgctggttagagtgatgacacccgatctgagagagcggctggaaaacctgagaaagaagcctgaaaatatcccccagcccatcagcaatacatctagagccaacctgaataagctgctgaccgattacaccgaaatgaagaaggcgatcctgcatgtgtactgggaagagttccagaaggaccctgtgggcctgatgagccgggtggcccagcctgccagcaagaagatcgatcagaacaagctgaaacctgagatggacgagaagggcaacctgaccaccgccggctttgcctgctctcagtgtggccagcccctgttcgtgtacaagctggagcaggtgtctgagaagggcaaggcttacaccaactacttcggacggtgcaatgtggccgagcacgaaaagctgatcctgctggcccagctgaagcccgagaaggatagcgacgaagccgtgacatatagcctgggaaagtttgggcagagggccctggatttctacagcattcatgtgaccaaggagtccacccaccccgtgaagcccctggcccagatcgccggaaacagatacgcctccggacctgtgggaaaggccctgagcgacgcatgtatgggcacaatcgcctccttcctgtctaagtaccaggacatcatcatcgaacaccagaaggtggtgaagggcaaccagaagagactggagagcctgcgggagctggccggcaaggaaaacctggaataccctagcgtgaccctgccacctcagcctcacaccaaggagggcgttgatgcctacaacgaagtgatcgcccgggtgcgaatgtgggtgaacctgaacctgtggcagaagctgaagctaagcagagatgatgccaagcctctgctgagactgaagggattcccttcctttcctctggtcgagagacaggccaacgaagtggactggtgggacatggtgtgtaacgtgaagaagctgatcaacgagaaaaaggaggatggcaaggtgttttggcagaatctggctggctacaagagacaggaagccctgagaccatacctgagcagcgaggaagatcggaagaagggaaagaaattcgctcggtaccagctgggcgacctgctgctgcacctggaaaagaagcacggcgaggactggggaaaggtgtacgacgaggcctgggagcggattgacaagaaagtggaaggcctgagcaagcacatcaagctggaagaggaacggagaagcgaggacgcccagagcaaggccgccctgaccgactggctgcgggctaaggccagcttcgtgatcgagggcctgaaggaggccgacaaggacgagttctgcagatgcgagctgaagctgcagaagtggtacggggacctgcggggaaagcccttcgccatcgaagccgagaacagcatcctggacatcagcggcttcagcaagcagtacaactgtgccttcatctggcagaaggacggcgtgaagaagctgaacctgtacctgatcatcaactacttcaagggcggcaagctgcggttcaagaagatcaaacctgaagccttcgaagccaacagattctacaccgtgatcaacaaaaagagcggcgagatcgtgcccatggaggtgaacttcaacttcgacgaccccaacctgatcatcctgcctctggcctttggcaagagacagggcagagaattcatctggaacgacctgctgtccctggaaaccggcagcctgaagctggccaacggaagagtgatcgagaagacactgtacaacagaagaacccggcaggatgagcctgccctgttcgtggccctgaccttcgagcggcgggaggtcctggactcctccaatatcaaaccaatgaacctgatcggcgtggcaagaggcgaaaacatccccgccgtgatcgccctgaccgaccccgagggctgcccactgagccggtttaaggatagcctgggaaacccaacccacatcctgagaatcggcgagagctataaggagaagcagcggaccatccaggccaagaaggaggtggagcagcggagagccggcggctacagccggaagtacgccagcaaagccaagaatctggcagacgatatggtgagaaacaccgctagagatctgctgtactacgccgtgacccaggatgccatgctgatcttcgccaacctgagccggggcttcggccggcagggcaagcggaccttcatggccgagagacagtacacacggatggaggactggctgaccgccaagctggcctacgagggcctgagcaagacctacctgtccaagacactggcccagtacacctccaagacatgcagcaactgtgggtttaccatcaccagcgccgactacgacagggtgctggagaagctgaagaagacagcaacaggctggatgaccacaattaacggcaaggagctgaaggtggagggccagattacctactacaacagatacaagagacagaacgtagtcaaggacctgtccgtcgagctggatagactgagcgaagaatctgtgaacaacgacatctcctcctggacaaagggcagaagcggagaagctctgagcctcctgaagaaaagattctcccatagacccgtgcaggagaagttcgtgtgcctgaactgcggcttcgagacacacgcagccgagcaagccgccctgaacatcgccagatcctggctgttcctgcggagccaggagtacaagaaataccagacaaacaagacaaccggcaacaccgataagagagccttcgtcgagacctggcagtccttttaccggaagaagcttaaggaggtgtggaaacctgccgtgcggtctggcggatctggcggaggctccaccagccccaagaaaaagagaaaagtctaagctgccttctgcggggcttgccttctggccatgcccttcttctctcccttgcacctgtacctcttggtctttgaataaagcctgagtaggaaggctagcaaaaaaaaaaaaaaaaaaaaaaaaaaaaaaaaaaaaaaaaaaaaaaaaaaaaaaaaaaaaaaaaaaaaaaaaaaaaaaaagcccagccggctccccaacctctaccgaggagggcacctctgagtccgccacccccgagagcggccctggcacctccaccgagcccagcgagggcagcgcacccggcagccctgccggcagccccacctccacagaggagggaaccagcaccgagcccagcgaaggcagcgccccaggcaccagcaccgagcctagtgagcaggagattaaacggatcaacaagatcagaagaagacttgtgaaagacagcaacaccaagaaggccggcaagacaggccccatgaaaaccctgctggttagagtgatgacacccgatctgagagagcggctggaaaacctgagaaagaagcctgaaaatatcccccagcccatcagcaatacatctagagccaacctgaataagctgctgaccgattacaccgaaatgaagaaggcgatcctgcatgtgtactgggaagagttccagaaggaccctgtgggcctgatgagccgggtggcccagcctgccagcaagaagatcgatcagaacaagctgaaacctgagatggacgagaagggcaacctgaccaccgccggctttgcctgctctcagtgtggccagcccctgttcgtgtacaagctggagcaggtgtctgagaagggcaaggcttacaccaactacttcggacggtgcaatgtggccgagcacgaaaagctgatcctgctggcccagctgaagcccgagaaggatagcgacgaagccgtgacatatagcctgggaaagtttgggcagagggccctggatttctacagcattcatgtgaccaaggagtccacccaccccgtgaagcccctggcccagatcgccggaaacagatacgcctccggacctgtgggaaaggccctgagcgacgcatgtatgggcacaatcgcctccttcctgtctaagtaccaggacatcatcatcgaacaccagaaggtggtgaagggcaaccagaagagactggagagcctgcgggagctggccggcaaggaaaacctggaataccctagcgtgaccctgccacctcagcctcacaccaaggagggcgttgatgcctacaacgaagtgatcgcccgggtgcgaatgtgggtgaacctgaacctgtggcagaagctgaagctaagcagagatgatgccaagcctctgctgagactgaagggattcccttcctttcctctggtcgagagacaggccaacgaagtggactggtgggacatggtgtgtaacgtgaagaagctgatcaacgagaaaaaggaggatggcaaggtgttttggcagaatctggctggctacaagagacaggaagccctgagaccatacctgagcagcgaggaagatcggaagaagggaaagaaattcgctcggtaccagctgggcgacctgctgctgcacctggaaaagaagcacggcgaggactggggaaaggtgtacgacgaggcctgggagcggattgacaagaaagtggaaggcctgagcaagcacatcaagctggaagaggaacggagaagcgaggacgcccagagcaaggccgccctgaccgactggctgcgggctaaggccagcttcgtgatcgagggcctgaaggaggccgacaaggacgagttctgcagatgcgagctgaagctgcagaagtggtacggggacctgcggggaaagcccttcgccatcgaagccgagaacagcatcctggacatcagcggcttcagcaagcagtacaactgtgccttcatctggcagaaggacggcgtgaagaagctgaacctgtacctgatcatcaactacttcaagggcggcaagctgcggttcaagaagatcaaacctgaagccttcgaagccaacagattctacaccgtgatcaacaaaaagagcggcgagatcgtgcccatggaggtgaacttcaacttcgacgaccccaacctgatcatcctgcctctggcctttggcaagagacagggcagagaattcatctggaacgacctgctgtccctggaaaccggcagcctgaagctggccaacggaagagtgatcgagaagacactgtacaacagaagaacccggcaggatgagcctgccctgttcgtggccctgaccttcgagcggcgggaggtcctggactcctccaatatcaaaccaatgaacctgatcggcgtggcaagaggcgaaaacatccccgccgtgatcgccctgaccgaccccgagggctgcccactgagccggtttaaggatagcctgggaaacccaacccacatcctgagaatcggcgagagctataaggagaagcagcggaccatccaggccaagaaggaggtggagcagcggagagccggcggctacagccggaagtacgccagcaaagccaagaatctggcagacgatatggtgagaaacaccgctagagatctgctgtactacgccgtgacccaggatgccatgctgatcttcgccaacctgagccggggcttcggccggcagggcaagcggaccttcatggccgagagacagtacacacggatggaggactggctgaccgccaagctggcctacgagggcctgagcaagacctacctgtccaagacactggcccagtacacctccaagacatgcagcaactgtgggtttaccatcaccagcgccgactacgacagggtgctggagaagctgaagaagacagcaacaggctggatgaccacaattaacggcaaggagctgaaggtggagggccagattacctactacaacagatacaagagacagaacgtagtcaaggacctgtccgtcgagctggatagactgagcgaagaatctgtgaacaacgacatctcctcctggacaaagggcagaagcggagaagctctgagcctcctgaagaaaagattctcccatagacccgtgcaggagaagttcgtgtgcctgaactgcggcttcgagacacacgcagccgagcaagccgccctgaacatcgccagatcctggctgttcctgcggagccaggagtacaagaaataccagacaaacaagacaaccggcaacaccgataagagagccttcgtcgagacctggcagtccttttaccggaagaagcttaaggaggtgtggaaacctgccgtgcggtctggcggatctggcggaggctccaccagccccaagaaaaagagaaaagtctaagctgccttctgcggggcttgccttctggccatgcccttcttctctcccttgcacctgtacctcttggtctttgaataaagcctgagtaggaaggctagcaaaaaaaaaaaaaaaaaaaaaaaaaaaaaaaaaaaaaaaaaaaaaaaaaaaaaaaaaaaaaaaaaaaaaaaaaaaaaaaa

SEQ ID NO: 10370 - RNA, 8787 nt, synthetic construct
  source 1..8787: mol_type = other RNA
aggaaataagagagaaaagaagagtaagaagaaatataagagccaccatggcccctaagaagaagcgtaaagtgagccggatgaaccacgaccaggagttcgacccccctaaggtgtaccctcccgtccccgccgagaagagaaagcccatccgggtcctgagcctgttcgatggcatcgccaccggtctgctggtgctgaaggacctgggcatccaggtggataggtacattgcctccgaggtgtgcgaggactccatcaccgtgggaatggtgcgtcatcagggcaagatcatgtacgtgggcgacgtgcggagcgtgacacagaagcatatccaggagtggggccctttcgacctggtgatcggcggcagcccttgcaatgacctgagcatcgtgaacccagcccggaagggcctgtacgagggaaccggcagactgttcttcgagttttacagactgctgcacgacgcccggcctaaggaaggcgacgaccggcccttcttttggctgttcgagaatgtggtggccatgggagtcagcgacaagcgggatattagccggttcctggagagcaaccccgtgatgatcgatgccaaggaagtgagcgccgcccaccgggccagatacttctggggcaatctgcctggcatgaacagacccctggccagcaccgtgaacgacaagctggagctgcaggagtgcctggagcacggccggatcgccaagttcagcaaggtgagaaccatcaccacccgaagcaacagcatcaaacaaggcaaggaccagcactttcctgtgttcatgaacgagaaggaggacatcctgtggtgtaccgagatggagagagtgttcgggttcccagtccactacacagatgtcagcaacatgtctagactggccagacagagactgctgggaagaagctggtccgtccctgtgatcagacacctgttcgcccctctgaaggagtacttcgcctgcgtgagcagcggcaacagcaacgccaacagccggggccccagcttctctagcggcctggtgccactgtccctgagagggagccacatgggccccatggagatctacaaaaccgtgagcgcctggaagcggcagcctgtgcgcgtgctgagcctgtttcggaatatcgataaagtcctgaaaagcctgggattcctggagagcggctctggctccggcggtggcaccctgaagtacgtggaggatgtgacaaacgtggtcagacgggatgtggagaagtggggccccttcgatctggtgtacggcagcacccaacccctgggcagctcttgtgaccggtgccctggctggtacatgtttcagttccaccggatcctgcagtacgccctgccgagacaggagtcccagcggccattcttttggattttcatggacaacttgctgctgaccgaggatgaccaggaaactaccactcggttcctgcagaccgaagccgtgaccctgcaggacgtgagaggccgggactaccagaacgccatgcgggtgtggtccaacatccctggactgaaaagcaagcacgcacctctgacccctaaagaagaggagtacctgcaggcccaggtgcggagcagaagcaagctggacgcccctaaggtggatctgctggtgaagaattgcctcctgcccctgagagagtacttcaagtatttcagccagaatagtctgcccctgggaggcagcggcggcggcccccccagcctggtgaccttcggcgacgtggccatcgacttcagccaggaggagtgggagtggctgaacagcgcccagaggaccctgtacaggaacgtgatgctggagaactacaggaacctggccagcctgggcctgtgcggcagcaagcccgacatgatcagcagcctggagcagaggagggagccctggatcaccaagaggaagctgaccaggggcaggtgccccgacctgaaggccgtgggcggcccaagcagcggcgcccctcctcccagcggcggcaggcggcccaagcagcggcgcccctcctcccagcggcggcagcccagccggctccccaacctctaccgaggagggcacctctgagtccgccacccccgagagcggccctggcacctccaccgagcccagcgagggcagcgcacccggcagccctgccggcagccccacctccacagaggagggaaccagcaccgagcccagcgaaggcagcgccccaggcaccagcaccgagcctagtgagcaggagattaaacggatcaacaagatcagaagaagacttgtgaaagacagcaacaccaagaaggccggcaagacaggccccatgaaaaccctgctggttagagtgatgacacccgatctgagagagcggctggaaaacctgagaaagaagcctgaaaatatcccccagcccatcagcaatacatctagagccaacctgaataagctgctgaccgattacaccgaaatgaagaaggcgatcctgcatgtgtactgggaagagttccagaaggaccctgtgggcctgatgagccgggtggcccagcctgccagcaagaagatcgatcagaacaagctgaaacctgagatggacgagaagggcaacctgaccaccgccggctttgcctgctctcagtgtggccagcccctgttcgtgtacaagctggagcaggtgtctgagaagggcaaggcttacaccaactacttcggacggtgcaatgtggccgagcacgaaaagctgatcctgctggcccagctgaagcccgagaaggatagcgacgaagccgtgacatatagcctgggaaagtttgggcagagggccctggatttctacagcattcatgtgaccaaggagtccacccaccccgtgaagcccctggcccagatcgccggaaacagatacgcctccggacctgtgggaaaggccctgagcgacgcatgtatgggcacaatcgcctccttcctgtctaagtaccaggacatcatcatcgaacaccagaaggtggtgaagggcaaccagaagagactggagagcctgcgggagctggccggcaaggaaaacctggaataccctagcgtgaccctgccacctcagcctcacaccaaggagggcgttgatgcctacaacgaagtgatcgcccgggtgcgaatgtgggtgaacctgaacctgtggcagaagctgaagctaagcagagatgatgccaagcctctgctgagactgaagggattcccttcctttcctctggtcgagagacaggccaacgaagtggactggtgggacatggtgtgtaacgtgaagaagctgatcaacgagaaaaaggaggatggcaaggtgttttggcagaatctggctggctacaagagacaggaagccctgagaccatacctgagcagcgaggaagatcggaagaagggaaagaaattcgctcggtaccagctgggcgacctgctgctgcacctggaaaagaagcacggcgaggactggggaaaggtgtacgacgaggcctgggagcggattgacaagaaagtggaaggcctgagcaagcacatcaagctggaagaggaacggagaagcgaggacgcccagagcaaggccgccctgaccgactggctgcgggctaaggccagcttcgtgatcgagggcctgaaggaggccgacaaggacgagttctgcagatgcgagctgaagctgcagaagtggtacggggacctgcggggaaagcccttcgccatcgaagccgagaacagcatcctggacatcagcggcttcagcaagcagtacaactgtgccttcatctggcagaaggacggcgtgaagaagctgaacctgtacctgatcatcaactacttcaagggcggcaagctgcggttcaagaagatcaaacctgaagccttcgaagccaacagattctacaccgtgatcaacaaaaagagcggcgagatcgtgcccatggaggtgaacttcaacttcgacgaccccaacctgatcatcctgcctctggcctttggcaagagacagggcagagaattcatctggaacgacctgctgtccctggaaaccggcagcctgaagctggccaacggaagagtgatcgagaagacactgtacaacagaagaacccggcaggatgagcctgccctgttcgtggccctgaccttcgagcggcgggaggtcctggactcctccaatatcaaaccaatgaacctgatcggcgtggcaagaggcgaaaacatccccgccgtgatcgccctgaccgaccccgagggctgcccactgagccggtttaaggatagcctgggaaacccaacccacatcctgagaatcggcgagagctataaggagaagcagcggaccatccaggccaagaaggaggtggagcagcggagagccggcggctacagccggaagtacgccagcaaagccaagaatctggcagacgatatggtgagaaacaccgctagagatctgctgtactacgccgtgacccaggatgccatgctgatcttcgccaacctgagccggggcttcggccggcagggcaagcggaccttcatggccgagagacagtacacacggatggaggactggctgaccgccaagctggcctacgagggcctgagcaagacctacctgtccaagacactggcccagtacacctccaagacatgcagcaactgtgggtttaccatcaccagcgccgactacgacagggtgctggagaagctgaagaagacagcaacaggctggatgaccacaattaacggcaaggagctgaaggtggagggccagattacctactacaacagatacaagagacagaacgtagtcaaggacctgtccgtcgagctggatagactgagcgaagaatctgtgaacaacgacatctcctcctggacaaagggcagaagcggagaagctctgagcctcctgaagaaaagattctcccatagacccgtgcaggagaagttcgtgtgcctgaactgcggcttcgagacacacgcagccgagcaagccgccctgaacatcgccagatcctggctgttcctgcggagccaggagtacaagaaataccagacaaacaagacaaccggcaacaccgataagagagccttcgtcgagacctggcagtccttttaccggaagaagcttaaggaggtgtggaaacctgccgtgcggtctggcggatctggcggaggctccaccagccccaagaaaaagagaaaagtctaagctgccttctgcggggcttgccttctggccatgcccttcttctctcccttgcacctgtacctcttggtctttgaataaagcctgagtaggaaggctagcaaaaaaaaaaaaaaaaaaaaaaaaaaaaaaaaaaaaaaaaaaaaaaaaaaaaaaaaaaaaaaaaaaaaaaaaaaaaaaaagcccagccggctccccaacctctaccgaggagggcacctctgagtccgccacccccgagagcggccctggcacctccaccgagcccagcgagggcagcgcacccggcagccctgccggcagccccacctccacagaggagggaaccagcaccgagcccagcgaaggcagcgccccaggcaccagcaccgagcctagtgagcaggagattaaacggatcaacaagatcagaagaagacttgtgaaagacagcaacaccaagaaggccggcaagacaggccccatgaaaaccctgctggttagagtgatgacacccgatctgagagagcggctggaaaacctgagaaagaagcctgaaaatatcccccagcccatcagcaatacatctagagccaacctgaataagctgctgaccgattacaccgaaatgaagaaggcgatcctgcatgtgtactgggaagagttccagaaggaccctgtgggcctgatgagccgggtggcccagcctgccagcaagaagatcgatcagaacaagctgaaacctgagatggacgagaagggcaacctgaccaccgccggctttgcctgctctcagtgtggccagcccctgttcgtgtacaagctggagcaggtgtctgagaagggcaaggcttacaccaactacttcggacggtgcaatgtggccgagcacgaaaagctgatcctgctggcccagctgaagcccgagaaggatagcgacgaagccgtgacatatagcctgggaaagtttgggcagagggccctggatttctacagcattcatgtgaccaaggagtccacccaccccgtgaagcccctggcccagatcgccggaaacagatacgcctccggacctgtgggaaaggccctgagcgacgcatgtatgggcacaatcgcctccttcctgtctaagtaccaggacatcatcatcgaacaccagaaggtggtgaagggcaaccagaagagactggagagcctgcgggagctggccggcaaggaaaacctggaataccctagcgtgaccctgccacctcagcctcacaccaaggagggcgttgatgcctacaacgaagtgatcgcccgggtgcgaatgtgggtgaacctgaacctgtggcagaagctgaagctaagcagagatgatgccaagcctctgctgagactgaagggattcccttcctttcctctggtcgagagacaggccaacgaagtggactggtgggacatggtgtgtaacgtgaagaagctgatcaacgagaaaaaggaggatggcaaggtgttttggcagaatctggctggctacaagagacaggaagccctgagaccatacctgagcagcgaggaagatcggaagaagggaaagaaattcgctcggtaccagctgggcgacctgctgctgcacctggaaaagaagcacggcgaggactggggaaaggtgtacgacgaggcctgggagcggattgacaagaaagtggaaggcctgagcaagcacatcaagctggaagaggaacggagaagcgaggacgcccagagcaaggccgccctgaccgactggctgcgggctaaggccagcttcgtgatcgagggcctgaaggaggccgacaaggacgagttctgcagatgcgagctgaagctgcagaagtggtacggggacctgcggggaaagcccttcgccatcgaagccgagaacagcatcctggacatcagcggcttcagcaagcagtacaactgtgccttcatctggcagaaggacggcgtgaagaagctgaacctgtacctgatcatcaactacttcaagggcggcaagctgcggttcaagaagatcaaacctgaagccttcgaagccaacagattctacaccgtgatcaacaaaaagagcggcgagatcgtgcccatggaggtgaacttcaacttcgacgaccccaacctgatcatcctgcctctggcctttggcaagagacagggcagagaattcatctggaacgacctgctgtccctggaaaccggcagcctgaagctggccaacggaagagtgatcgagaagacactgtacaacagaagaacccggcaggatgagcctgccctgttcgtggccctgaccttcgagcggcgggaggtcctggactcctccaatatcaaaccaatgaacctgatcggcgtggcaagaggcgaaaacatccccgccgtgatcgccctgaccgaccccgagggctgcccactgagccggtttaaggatagcctgggaaacccaacccacatcctgagaatcggcgagagctataaggagaagcagcggaccatccaggccaagaaggaggtggagcagcggagagccggcggctacagccggaagtacgccagcaaagccaagaatctggcagacgatatggtgagaaacaccgctagagatctgctgtactacgccgtgacccaggatgccatgctgatcttcgccaacctgagccggggcttcggccggcagggcaagcggaccttcatggccgagagacagtacacacggatggaggactggctgaccgccaagctggcctacgagggcctgagcaagacctacctgtccaagacactggcccagtacacctccaagacatgcagcaactgtgggtttaccatcaccagcgccgactacgacagggtgctggagaagctgaagaagacagcaacaggctggatgaccacaattaacggcaaggagctgaaggtggagggccagattacctactacaacagatacaagagacagaacgtagtcaaggacctgtccgtcgagctggatagactgagcgaagaatctgtgaacaacgacatctcctcctggacaaagggcagaagcggagaagctctgagcctcctgaagaaaagattctcccatagacccgtgcaggagaagttcgtgtgcctgaactgcggcttcgagacacacgcagccgagcaagccgccctgaacatcgccagatcctggctgttcctgcggagccaggagtacaagaaataccagacaaacaagacaaccggcaacaccgataagagagccttcgtcgagacctggcagtccttttaccggaagaagcttaaggaggtgtggaaacctgccgtgcggtctggcggatctggcggaggctccaccagccccaagaaaaagagaaaagtctaagctgccttctgcggggcttgccttctggccatgcccttcttctctcccttgcacctgtacctcttggtctttgaataaagcctgagtaggaaggctagcaaaaaaaaaaaaaaaaaaaaaaaaaaaaaaaaaaaaaaaaaaaaaaaaaaaaaaaaaaaaaaaaaaaaaaaaaaaaaaaa

SEQ ID NO: 10371 - RNA, 8787 nt, synthetic construct
  source 1..8787: mol_type = other RNA
aggaaataagagagaaaagaagagtaagaagaaatataagagccaccatggcccctaagaagaagcgtaaagtgagccggatgaaccacgaccaggagttcgacccccctaaggtgtaccctcccgtccccgccgagaagagaaagcccatccgggtcctgagcctgttcgatggcatcgccaccggtctgctggtgctgaaggacctgggcatccaggtggataggtacattgcctccgaggtgtgcgaggactccatcaccgtgggaatggtgcgtcatcagggcaagatcatgtacgtgggcgacgtgcggagcgtgacacagaagcatatccaggagtggggccctttcgacctggtgatcggcggcagcccttgcaatgacctgagcatcgtgaacccagcccggaagggcctgtacgagggaaccggcagactgttcttcgagttttacagactgctgcacgacgcccggcctaaggaaggcgacgaccggcccttcttttggctgttcgagaatgtggtggccatgggagtcagcgacaagcgggatattagccggttcctggagagcaaccccgtgatgatcgatgccaaggaagtgagcgccgcccaccgggccagatacttctggggcaatctgcctggcatgaacagacccctggccagcaccgtgaacgacaagctggagctgcaggagtgcctggagcacggccggatcgccaagttcagcaaggtgagaaccatcaccacccgaagcaacagcatcaaacaaggcaaggaccagcactttcctgtgttcatgaacgagaaggaggacatcctgtggtgtaccgagatggagagagtgttcgggttcccagtccactacacagatgtcagcaacatgtctagactggccagacagagactgctgggaagaagctggtccgtccctgtgatcagacacctgttcgcccctctgaaggagtacttcgcctgcgtgagcagcggcaacagcaacgccaacagccggggccccagcttctctagcggcctggtgccactgtccctgagagggagccacatgggccccatggagatctacaaaaccgtgagcgcctggaagcggcagcctgtgcgcgtgctgagcctgtttcggaatatcgataaagtcctgaaaagcctgggattcctggagagcggctctggctccggcggtggcaccctgaagtacgtggaggatgtgacaaacgtggtcagacgggatgtggagaagtggggccccttcgatctggtgtacggcagcacccaacccctgggcagctcttgtgaccggtgccctggctggtacatgtttcagttccaccggatcctgcagtacgccctgccgagacaggagtcccagcggccattcttttggattttcatggacaacttgctgctgaccgaggatgaccaggaaactaccactcggttcctgcagaccgaagccgtgaccctgcaggacgtgagaggccgggactaccagaacgccatgcgggtgtggtccaacatccctggactgaaaagcaagcacgcacctctgacccctaaagaagaggagtacctgcaggcccaggtgcggagcagaagcaagctggacgcccctaaggtggatctgctggtgaagaattgcctcctgcccctgagagagtacttcaagtatttcagccagaatagtctgcccctgggaggcagcggcggcggcatgagggtgaccttcgaggacatcgccgtgagcttcagccaggaggagtgggagtacctggacgaggagcagaaggagctgtacagggaggtgatgaaggagaactaccagaccctgatcagcctgggcgccggcagcctgaccttcacccccgagatcatcagccacatcgagaggggcgaggagccctacagcagggacgagcccggcagcggcgagagggagcccggcaagagcaggtgcggcggcccaagcagcggcgcccctcctcccagcggcggcaggcggcccaagcagcggcgcccctcctcccagcggcggcagcccagccggctccccaacctctaccgaggagggcacctctgagtccgccacccccgagagcggccctggcacctccaccgagcccagcgagggcagcgcacccggcagccctgccggcagccccacctccacagaggagggaaccagcaccgagcccagcgaaggcagcgccccaggcaccagcaccgagcctagtgagcaggagattaaacggatcaacaagatcagaagaagacttgtgaaagacagcaacaccaagaaggccggcaagacaggccccatgaaaaccctgctggttagagtgatgacacccgatctgagagagcggctggaaaacctgagaaagaagcctgaaaatatcccccagcccatcagcaatacatctagagccaacctgaataagctgctgaccgattacaccgaaatgaagaaggcgatcctgcatgtgtactgggaagagttccagaaggaccctgtgggcctgatgagccgggtggcccagcctgccagcaagaagatcgatcagaacaagctgaaacctgagatggacgagaagggcaacctgaccaccgccggctttgcctgctctcagtgtggccagcccctgttcgtgtacaagctggagcaggtgtctgagaagggcaaggcttacaccaactacttcggacggtgcaatgtggccgagcacgaaaagctgatcctgctggcccagctgaagcccgagaaggatagcgacgaagccgtgacatatagcctgggaaagtttgggcagagggccctggatttctacagcattcatgtgaccaaggagtccacccaccccgtgaagcccctggcccagatcgccggaaacagatacgcctccggacctgtgggaaaggccctgagcgacgcatgtatgggcacaatcgcctccttcctgtctaagtaccaggacatcatcatcgaacaccagaaggtggtgaagggcaaccagaagagactggagagcctgcgggagctggccggcaaggaaaacctggaataccctagcgtgaccctgccacctcagcctcacaccaaggagggcgttgatgcctacaacgaagtgatcgcccgggtgcgaatgtgggtgaacctgaacctgtggcagaagctgaagctaagcagagatgatgccaagcctctgctgagactgaagggattcccttcctttcctctggtcgagagacaggccaacgaagtggactggtgggacatggtgtgtaacgtgaagaagctgatcaacgagaaaaaggaggatggcaaggtgttttggcagaatctggctggctacaagagacaggaagccctgagaccatacctgagcagcgaggaagatcggaagaagggaaagaaattcgctcggtaccagctgggcgacctgctgctgcacctggaaaagaagcacggcgaggactggggaaaggtgtacgacgaggcctgggagcggattgacaagaaagtggaaggcctgagcaagcacatcaagctggaagaggaacggagaagcgaggacgcccagagcaaggccgccctgaccgactggctgcgggctaaggccagcttcgtgatcgagggcctgaaggaggccgacaaggacgagttctgcagatgcgagctgaagctgcagaagtggtacggggacctgcggggaaagcccttcgccatcgaagccgagaacagcatcctggacatcagcggcttcagcaagcagtacaactgtgccttcatctggcagaaggacggcgtgaagaagctgaacctgtacctgatcatcaactacttcaagggcggcaagctgcggttcaagaagatcaaacctgaagccttcgaagccaacagattctacaccgtgatcaacaaaaagagcggcgagatcgtgcccatggaggtgaacttcaacttcgacgaccccaacctgatcatcctgcctctggcctttggcaagagacagggcagagaattcatctggaacgacctgctgtccctggaaaccggcagcctgaagctggccaacggaagagtgatcgagaagacactgtacaacagaagaacccggcaggatgagcctgccctgttcgtggccctgaccttcgagcggcgggaggtcctggactcctccaatatcaaaccaatgaacctgatcggcgtggcaagaggcgaaaacatccccgccgtgatcgccctgaccgaccccgagggctgcccactgagccggtttaaggatagcctgggaaacccaacccacatcctgagaatcggcgagagctataaggagaagcagcggaccatccaggccaagaaggaggtggagcagcggagagccggcggctacagccggaagtacgccagcaaagccaagaatctggcagacgatatggtgagaaacaccgctagagatctgctgtactacgccgtgacccaggatgccatgctgatcttcgccaacctgagccggggcttcggccggcagggcaagcggaccttcatggccgagagacagtacacacggatggaggactggctgaccgccaagctggcctacgagggcctgagcaagacctacctgtccaagacactggcccagtacacctccaagacatgcagcaactgtgggtttaccatcaccagcgccgactacgacagggtgctggagaagctgaagaagacagcaacaggctggatgaccacaattaacggcaaggagctgaaggtggagggccagattacctactacaacagatacaagagacagaacgtagtcaaggacctgtccgtcgagctggatagactgagcgaagaatctgtgaacaacgacatctcctcctggacaaagggcagaagcggagaagctctgagcctcctgaagaaaagattctcccatagacccgtgcaggagaagttcgtgtgcctgaactgcggcttcgagacacacgcagccgagcaagccgccctgaacatcgccagatcctggctgttcctgcggagccaggagtacaagaaataccagacaaacaagacaaccggcaacaccgataagagagccttcgtcgagacctggcagtccttttaccggaagaagcttaaggaggtgtggaaacctgccgtgcggtctggcggatctggcggaggctccaccagccccaagaaaaagagaaaagtctaagctgccttctgcggggcttgccttctggccatgcccttcttctctcccttgcacctgtacctcttggtctttgaataaagcctgagtaggaaggctagcaaaaaaaaaaaaaaaaaaaaaaaaaaaaaaaaaaaaaaaaaaaaaaaaaaaaaaaaaaaaaaaaaaaaaaaaaaaaaaaagcccagccggctccccaacctctaccgaggagggcacctctgagtccgccacccccgagagcggccctggcacctccaccgagcccagcgagggcagcgcacccggcagccctgccggcagccccacctccacagaggagggaaccagcaccgagcccagcgaaggcagcgccccaggcaccagcaccgagcctagtgagcaggagattaaacggatcaacaagatcagaagaagacttgtgaaagacagcaacaccaagaaggccggcaagacaggccccatgaaaaccctgctggttagagtgatgacacccgatctgagagagcggctggaaaacctgagaaagaagcctgaaaatatcccccagcccatcagcaatacatctagagccaacctgaataagctgctgaccgattacaccgaaatgaagaaggcgatcctgcatgtgtactgggaagagttccagaaggaccctgtgggcctgatgagccgggtggcccagcctgccagcaagaagatcgatcagaacaagctgaaacctgagatggacgagaagggcaacctgaccaccgccggctttgcctgctctcagtgtggccagcccctgttcgtgtacaagctggagcaggtgtctgagaagggcaaggcttacaccaactacttcggacggtgcaatgtggccgagcacgaaaagctgatcctgctggcccagctgaagcccgagaaggatagcgacgaagccgtgacatatagcctgggaaagtttgggcagagggccctggatttctacagcattcatgtgaccaaggagtccacccaccccgtgaagcccctggcccagatcgccggaaacagatacgcctccggacctgtgggaaaggccctgagcgacgcatgtatgggcacaatcgcctccttcctgtctaagtaccaggacatcatcatcgaacaccagaaggtggtgaagggcaaccagaagagactggagagcctgcgggagctggccggcaaggaaaacctggaataccctagcgtgaccctgccacctcagcctcacaccaaggagggcgttgatgcctacaacgaagtgatcgcccgggtgcgaatgtgggtgaacctgaacctgtggcagaagctgaagctaagcagagatgatgccaagcctctgctgagactgaagggattcccttcctttcctctggtcgagagacaggccaacgaagtggactggtgggacatggtgtgtaacgtgaagaagctgatcaacgagaaaaaggaggatggcaaggtgttttggcagaatctggctggctacaagagacaggaagccctgagaccatacctgagcagcgaggaagatcggaagaagggaaagaaattcgctcggtaccagctgggcgacctgctgctgcacctggaaaagaagcacggcgaggactggggaaaggtgtacgacgaggcctgggagcggattgacaagaaagtggaaggcctgagcaagcacatcaagctggaagaggaacggagaagcgaggacgcccagagcaaggccgccctgaccgactggctgcgggctaaggccagcttcgtgatcgagggcctgaaggaggccgacaaggacgagttctgcagatgcgagctgaagctgcagaagtggtacggggacctgcggggaaagcccttcgccatcgaagccgagaacagcatcctggacatcagcggcttcagcaagcagtacaactgtgccttcatctggcagaaggacggcgtgaagaagctgaacctgtacctgatcatcaactacttcaagggcggcaagctgcggttcaagaagatcaaacctgaagccttcgaagccaacagattctacaccgtgatcaacaaaaagagcggcgagatcgtgcccatggaggtgaacttcaacttcgacgaccccaacctgatcatcctgcctctggcctttggcaagagacagggcagagaattcatctggaacgacctgctgtccctggaaaccggcagcctgaagctggccaacggaagagtgatcgagaagacactgtacaacagaagaacccggcaggatgagcctgccctgttcgtggccctgaccttcgagcggcgggaggtcctggactcctccaatatcaaaccaatgaacctgatcggcgtggcaagaggcgaaaacatccccgccgtgatcgccctgaccgaccccgagggctgcccactgagccggtttaaggatagcctgggaaacccaacccacatcctgagaatcggcgagagctataaggagaagcagcggaccatccaggccaagaaggaggtggagcagcggagagccggcggctacagccggaagtacgccagcaaagccaagaatctggcagacgatatggtgagaaacaccgctagagatctgctgtactacgccgtgacccaggatgccatgctgatcttcgccaacctgagccggggcttcggccggcagggcaagcggaccttcatggccgagagacagtacacacggatggaggactggctgaccgccaagctggcctacgagggcctgagcaagacctacctgtccaagacactggcccagtacacctccaagacatgcagcaactgtgggtttaccatcaccagcgccgactacgacagggtgctggagaagctgaagaagacagcaacaggctggatgaccacaattaacggcaaggagctgaaggtggagggccagattacctactacaacagatacaagagacagaacgtagtcaaggacctgtccgtcgagctggatagactgagcgaagaatctgtgaacaacgacatctcctcctggacaaagggcagaagcggagaagctctgagcctcctgaagaaaagattctcccatagacccgtgcaggagaagttcgtgtgcctgaactgcggcttcgagacacacgcagccgagcaagccgccctgaacatcgccagatcctggctgttcctgcggagccaggagtacaagaaataccagacaaacaagacaaccggcaacaccgataagagagccttcgtcgagacctggcagtccttttaccggaagaagcttaaggaggtgtggaaacctgccgtgcggtctggcggatctggcggaggctccaccagccccaagaaaaagagaaaagtctaagctgccttctgcggggcttgccttctggccatgcccttcttctctcccttgcacctgtacctcttggtctttgaataaagcctgagtaggaaggctagcaaaaaaaaaaaaaaaaaaaaaaaaaaaaaaaaaaaaaaaaaaaaaaaaaaaaaaaaaaaaaaaaaaaaaaaaaaaaaaaa

SEQ ID NO: 10372 - RNA, 8787 nt, synthetic construct
  source 1..8787: mol_type = other RNA
aggaaataagagagaaaagaagagtaagaagaaatataagagccaccatggcccctaagaagaagcgtaaagtgagccggatgaaccacgaccaggagttcgacccccctaaggtgtaccctcccgtccccgccgagaagagaaagcccatccgggtcctgagcctgttcgatggcatcgccaccggtctgctggtgctgaaggacctgggcatccaggtggataggtacattgcctccgaggtgtgcgaggactccatcaccgtgggaatggtgcgtcatcagggcaagatcatgtacgtgggcgacgtgcggagcgtgacacagaagcatatccaggagtggggccctttcgacctggtgatcggcggcagcccttgcaatgacctgagcatcgtgaacccagcccggaagggcctgtacgagggaaccggcagactgttcttcgagttttacagactgctgcacgacgcccggcctaaggaaggcgacgaccggcccttcttttggctgttcgagaatgtggtggccatgggagtcagcgacaagcgggatattagccggttcctggagagcaaccccgtgatgatcgatgccaaggaagtgagcgccgcccaccgggccagatacttctggggcaatctgcctggcatgaacagacccctggccagcaccgtgaacgacaagctggagctgcaggagtgcctggagcacggccggatcgccaagttcagcaaggtgagaaccatcaccacccgaagcaacagcatcaaacaaggcaaggaccagcactttcctgtgttcatgaacgagaaggaggacatcctgtggtgtaccgagatggagagagtgttcgggttcccagtccactacacagatgtcagcaacatgtctagactggccagacagagactgctgggaagaagctggtccgtccctgtgatcagacacctgttcgcccctctgaaggagtacttcgcctgcgtgagcagcggcaacagcaacgccaacagccggggccccagcttctctagcggcctggtgccactgtccctgagagggagccacatgggccccatggagatctacaaaaccgtgagcgcctggaagcggcagcctgtgcgcgtgctgagcctgtttcggaatatcgataaagtcctgaaaagcctgggattcctggagagcggctctggctccggcggtggcaccctgaagtacgtggaggatgtgacaaacgtggtcagacgggatgtggagaagtggggccccttcgatctggtgtacggcagcacccaacccctgggcagctcttgtgaccggtgccctggctggtacatgtttcagttccaccggatcctgcagtacgccctgccgagacaggagtcccagcggccattcttttggattttcatggacaacttgctgctgaccgaggatgaccaggaaactaccactcggttcctgcagaccgaagccgtgaccctgcaggacgtgagaggccgggactaccagaacgccatgcgggtgtggtccaacatccctggactgaaaagcaagcacgcacctctgacccctaaagaagaggagtacctgcaggcccaggtgcggagcagaagcaagctggacgcccctaaggtggatctgctggtgaagaattgcctcctgcccctgagagagtacttcaagtatttcagccagaatagtctgcccctgggaggcagcggcggcggccaggacctggtgaccttcaaggacgtgagcgtggacttcaccagggaggagtggatgaggctggaccacccccagagggccctgtacagggacgtgatgctggagaactacaggaacctggtgctggtgagcctgggccaccccatcagcaagcccgacgtgatcagcaggctggagcagggcggcgtgccctgggtgctgaagaagggcgccaccggcagggccttcagcgacagggagaccggcggcccaagcagcggcgcccctcctcccagcggcggcaggcggcccaagcagcggcgcccctcctcccagcggcggcagcccagccggctccccaacctctaccgaggagggcacctctgagtccgccacccccgagagcggccctggcacctccaccgagcccagcgagggcagcgcacccggcagccctgccggcagccccacctccacagaggagggaaccagcaccgagcccagcgaaggcagcgccccaggcaccagcaccgagcctagtgagcaggagattaaacggatcaacaagatcagaagaagacttgtgaaagacagcaacaccaagaaggccggcaagacaggccccatgaaaaccctgctggttagagtgatgacacccgatctgagagagcggctggaaaacctgagaaagaagcctgaaaatatcccccagcccatcagcaatacatctagagccaacctgaataagctgctgaccgattacaccgaaatgaagaaggcgatcctgcatgtgtactgggaagagttccagaaggaccctgtgggcctgatgagccgggtggcccagcctgccagcaagaagatcgatcagaacaagctgaaacctgagatggacgagaagggcaacctgaccaccgccggctttgcctgctctcagtgtggccagcccctgttcgtgtacaagctggagcaggtgtctgagaagggcaaggcttacaccaactacttcggacggtgcaatgtggccgagcacgaaaagctgatcctgctggcccagctgaagcccgagaaggatagcgacgaagccgtgacatatagcctgggaaagtttgggcagagggccctggatttctacagcattcatgtgaccaaggagtccacccaccccgtgaagcccctggcccagatcgccggaaacagatacgcctccggacctgtgggaaaggccctgagcgacgcatgtatgggcacaatcgcctccttcctgtctaagtaccaggacatcatcatcgaacaccagaaggtggtgaagggcaaccagaagagactggagagcctgcgggagctggccggcaaggaaaacctggaataccctagcgtgaccctgccacctcagcctcacaccaaggagggcgttgatgcctacaacgaagtgatcgcccgggtgcgaatgtgggtgaacctgaacctgtggcagaagctgaagctaagcagagatgatgccaagcctctgctgagactgaagggattcccttcctttcctctggtcgagagacaggccaacgaagtggactggtgggacatggtgtgtaacgtgaagaagctgatcaacgagaaaaaggaggatggcaaggtgttttggcagaatctggctggctacaagagacaggaagccctgagaccatacctgagcagcgaggaagatcggaagaagggaaagaaattcgctcggtaccagctgggcgacctgctgctgcacctggaaaagaagcacggcgaggactggggaaaggtgtacgacgaggcctgggagcggattgacaagaaagtggaaggcctgagcaagcacatcaagctggaagaggaacggagaagcgaggacgcccagagcaaggccgccctgaccgactggctgcgggctaaggccagcttcgtgatcgagggcctgaaggaggccgacaaggacgagttctgcagatgcgagctgaagctgcagaagtggtacggggacctgcggggaaagcccttcgccatcgaagccgagaacagcatcctggacatcagcggcttcagcaagcagtacaactgtgccttcatctggcagaaggacggcgtgaagaagctgaacctgtacctgatcatcaactacttcaagggcggcaagctgcggttcaagaagatcaaacctgaagccttcgaagccaacagattctacaccgtgatcaacaaaaagagcggcgagatcgtgcccatggaggtgaacttcaacttcgacgaccccaacctgatcatcctgcctctggcctttggcaagagacagggcagagaattcatctggaacgacctgctgtccctggaaaccggcagcctgaagctggccaacggaagagtgatcgagaagacactgtacaacagaagaacccggcaggatgagcctgccctgttcgtggccctgaccttcgagcggcgggaggtcctggactcctccaatatcaaaccaatgaacctgatcggcgtggcaagaggcgaaaacatccccgccgtgatcgccctgaccgaccccgagggctgcccactgagccggtttaaggatagcctgggaaacccaacccacatcctgagaatcggcgagagctataaggagaagcagcggaccatccaggccaagaaggaggtggagcagcggagagccggcggctacagccggaagtacgccagcaaagccaagaatctggcagacgatatggtgagaaacaccgctagagatctgctgtactacgccgtgacccaggatgccatgctgatcttcgccaacctgagccggggcttcggccggcagggcaagcggaccttcatggccgagagacagtacacacggatggaggactggctgaccgccaagctggcctacgagggcctgagcaagacctacctgtccaagacactggcccagtacacctccaagacatgcagcaactgtgggtttaccatcaccagcgccgactacgacagggtgctggagaagctgaagaagacagcaacaggctggatgaccacaattaacggcaaggagctgaaggtggagggccagattacctactacaacagatacaagagacagaacgtagtcaaggacctgtccgtcgagctggatagactgagcgaagaatctgtgaacaacgacatctcctcctggacaaagggcagaagcggagaagctctgagcctcctgaagaaaagattctcccatagacccgtgcaggagaagttcgtgtgcctgaactgcggcttcgagacacacgcagccgagcaagccgccctgaacatcgccagatcctggctgttcctgcggagccaggagtacaagaaataccagacaaacaagacaaccggcaacaccgataagagagccttcgtcgagacctggcagtccttttaccggaagaagcttaaggaggtgtggaaacctgccgtgcggtctggcggatctggcggaggctccaccagccccaagaaaaagagaaaagtctaagctgccttctgcggggcttgccttctggccatgcccttcttctctcccttgcacctgtacctcttggtctttgaataaagcctgagtaggaaggctagcaaaaaaaaaaaaaaaaaaaaaaaaaaaaaaaaaaaaaaaaaaaaaaaaaaaaaaaaaaaaaaaaaaaaaaaaaaaaaaaagcccagccggctccccaacctctaccgaggagggcacctctgagtccgccacccccgagagcggccctggcacctccaccgagcccagcgagggcagcgcacccggcagccctgccggcagccccacctccacagaggagggaaccagcaccgagcccagcgaaggcagcgccccaggcaccagcaccgagcctagtgagcaggagattaaacggatcaacaagatcagaagaagacttgtgaaagacagcaacaccaagaaggccggcaagacaggccccatgaaaaccctgctggttagagtgatgacacccgatctgagagagcggctggaaaacctgagaaagaagcctgaaaatatcccccagcccatcagcaatacatctagagccaacctgaataagctgctgaccgattacaccgaaatgaagaaggcgatcctgcatgtgtactgggaagagttccagaaggaccctgtgggcctgatgagccgggtggcccagcctgccagcaagaagatcgatcagaacaagctgaaacctgagatggacgagaagggcaacctgaccaccgccggctttgcctgctctcagtgtggccagcccctgttcgtgtacaagctggagcaggtgtctgagaagggcaaggcttacaccaactacttcggacggtgcaatgtggccgagcacgaaaagctgatcctgctggcccagctgaagcccgagaaggatagcgacgaagccgtgacatatagcctgggaaagtttgggcagagggccctggatttctacagcattcatgtgaccaaggagtccacccaccccgtgaagcccctggcccagatcgccggaaacagatacgcctccggacctgtgggaaaggccctgagcgacgcatgtatgggcacaatcgcctccttcctgtctaagtaccaggacatcatcatcgaacaccagaaggtggtgaagggcaaccagaagagactggagagcctgcgggagctggccggcaaggaaaacctggaataccctagcgtgaccctgccacctcagcctcacaccaaggagggcgttgatgcctacaacgaagtgatcgcccgggtgcgaatgtgggtgaacctgaacctgtggcagaagctgaagctaagcagagatgatgccaagcctctgctgagactgaagggattcccttcctttcctctggtcgagagacaggccaacgaagtggactggtgggacatggtgtgtaacgtgaagaagctgatcaacgagaaaaaggaggatggcaaggtgttttggcagaatctggctggctacaagagacaggaagccctgagaccatacctgagcagcgaggaagatcggaagaagggaaagaaattcgctcggtaccagctgggcgacctgctgctgcacctggaaaagaagcacggcgaggactggggaaaggtgtacgacgaggcctgggagcggattgacaagaaagtggaaggcctgagcaagcacatcaagctggaagaggaacggagaagcgaggacgcccagagcaaggccgccctgaccgactggctgcgggctaaggccagcttcgtgatcgagggcctgaaggaggccgacaaggacgagttctgcagatgcgagctgaagctgcagaagtggtacggggacctgcggggaaagcccttcgccatcgaagccgagaacagcatcctggacatcagcggcttcagcaagcagtacaactgtgccttcatctggcagaaggacggcgtgaagaagctgaacctgtacctgatcatcaactacttcaagggcggcaagctgcggttcaagaagatcaaacctgaagccttcgaagccaacagattctacaccgtgatcaacaaaaagagcggcgagatcgtgcccatggaggtgaacttcaacttcgacgaccccaacctgatcatcctgcctctggcctttggcaagagacagggcagagaattcatctggaacgacctgctgtccctggaaaccggcagcctgaagctggccaacggaagagtgatcgagaagacactgtacaacagaagaacccggcaggatgagcctgccctgttcgtggccctgaccttcgagcggcgggaggtcctggactcctccaatatcaaaccaatgaacctgatcggcgtggcaagaggcgaaaacatccccgccgtgatcgccctgaccgaccccgagggctgcccactgagccggtttaaggatagcctgggaaacccaacccacatcctgagaatcggcgagagctataaggagaagcagcggaccatccaggccaagaaggaggtggagcagcggagagccggcggctacagccggaagtacgccagcaaagccaagaatctggcagacgatatggtgagaaacaccgctagagatctgctgtactacgccgtgacccaggatgccatgctgatcttcgccaacctgagccggggcttcggccggcagggcaagcggaccttcatggccgagagacagtacacacggatggaggactggctgaccgccaagctggcctacgagggcctgagcaagacctacctgtccaagacactggcccagtacacctccaagacatgcagcaactgtgggtttaccatcaccagcgccgactacgacagggtgctggagaagctgaagaagacagcaacaggctggatgaccacaattaacggcaaggagctgaaggtggagggccagattacctactacaacagatacaagagacagaacgtagtcaaggacctgtccgtcgagctggatagactgagcgaagaatctgtgaacaacgacatctcctcctggacaaagggcagaagcggagaagctctgagcctcctgaagaaaagattctcccatagacccgtgcaggagaagttcgtgtgcctgaactgcggcttcgagacacacgcagccgagcaagccgccctgaacatcgccagatcctggctgttcctgcggagccaggagtacaagaaataccagacaaacaagacaaccggcaacaccgataagagagccttcgtcgagacctggcagtccttttaccggaagaagcttaaggaggtgtggaaacctgccgtgcggtctggcggatctggcggaggctccaccagccccaagaaaaagagaaaagtctaagctgccttctgcggggcttgccttctggccatgcccttcttctctcccttgcacctgtacctcttggtctttgaataaagcctgagtaggaaggctagcaaaaaaaaaaaaaaaaaaaaaaaaaaaaaaaaaaaaaaaaaaaaaaaaaaaaaaaaaaaaaaaaaaaaaaaaaaaaaaaa

SEQ ID NO: 10373 - RNA, 8787 nt, synthetic construct
  source 1..8787: mol_type = other RNA
aggaaataagagagaaaagaagagtaagaagaaatataagagccaccatggcccctaagaagaagcgtaaagtgagccggatgaaccacgaccaggagttcgacccccctaaggtgtaccctcccgtccccgccgagaagagaaagcccatccgggtcctgagcctgttcgatggcatcgccaccggtctgctggtgctgaaggacctgggcatccaggtggataggtacattgcctccgaggtgtgcgaggactccatcaccgtgggaatggtgcgtcatcagggcaagatcatgtacgtgggcgacgtgcggagcgtgacacagaagcatatccaggagtggggccctttcgacctggtgatcggcggcagcccttgcaatgacctgagcatcgtgaacccagcccggaagggcctgtacgagggaaccggcagactgttcttcgagttttacagactgctgcacgacgcccggcctaaggaaggcgacgaccggcccttcttttggctgttcgagaatgtggtggccatgggagtcagcgacaagcgggatattagccggttcctggagagcaaccccgtgatgatcgatgccaaggaagtgagcgccgcccaccgggccagatacttctggggcaatctgcctggcatgaacagacccctggccagcaccgtgaacgacaagctggagctgcaggagtgcctggagcacggccggatcgccaagttcagcaaggtgagaaccatcaccacccgaagcaacagcatcaaacaaggcaaggaccagcactttcctgtgttcatgaacgagaaggaggacatcctgtggtgtaccgagatggagagagtgttcgggttcccagtccactacacagatgtcagcaacatgtctagactggccagacagagactgctgggaagaagctggtccgtccctgtgatcagacacctgttcgcccctctgaaggagtacttcgcctgcgtgagcagcggcaacagcaacgccaacagccggggccccagcttctctagcggcctggtgccactgtccctgagagggagccacatgggccccatggagatctacaaaaccgtgagcgcctggaagcggcagcctgtgcgcgtgctgagcctgtttcggaatatcgataaagtcctgaaaagcctgggattcctggagagcggctctggctccggcggtggcaccctgaagtacgtggaggatgtgacaaacgtggtcagacgggatgtggagaagtggggccccttcgatctggtgtacggcagcacccaacccctgggcagctcttgtgaccggtgccctggctggtacatgtttcagttccaccggatcctgcagtacgccctgccgagacaggagtcccagcggccattcttttggattttcatggacaacttgctgctgaccgaggatgaccaggaaactaccactcggttcctgcagaccgaagccgtgaccctgcaggacgtgagaggccgggactaccagaacgccatgcgggtgtggtccaacatccctggactgaaaagcaagcacgcacctctgacccctaaagaagaggagtacctgcaggcccaggtgcggagcagaagcaagctggacgcccctaaggtggatctgctggtgaagaattgcctcctgcccctgagagagtacttcaagtatttcagccagaatagtctgcccctgggaggcagcggcggcggcgaccaggagagcctgaccctggaggacgtggccgtggacttcagcagggaggagtggcagctgctggcccccgcccagaaggacctgtacagggacgtgatgctggagaactacaggaacctggtgagcctgggctaccaggccagcacccccgacgccctgtgcatgctggagaggggcgagggcccctgggccaccggcgaggccgtgaggggcggcgccaggcccgagaccaggaaggtgggcggcccaagcagcggcgcccctcctcccagcggcggcaggcggcccaagcagcggcgcccctcctcccagcggcggcagcccagccggctccccaacctctaccgaggagggcacctctgagtccgccacccccgagagcggccctggcacctccaccgagcccagcgagggcagcgcacccggcagccctgccggcagccccacctccacagaggagggaaccagcaccgagcccagcgaaggcagcgccccaggcaccagcaccgagcctagtgagcaggagattaaacggatcaacaagatcagaagaagacttgtgaaagacagcaacaccaagaaggccggcaagacaggccccatgaaaaccctgctggttagagtgatgacacccgatctgagagagcggctggaaaacctgagaaagaagcctgaaaatatcccccagcccatcagcaatacatctagagccaacctgaataagctgctgaccgattacaccgaaatgaagaaggcgatcctgcatgtgtactgggaagagttccagaaggaccctgtgggcctgatgagccgggtggcccagcctgccagcaagaagatcgatcagaacaagctgaaacctgagatggacgagaagggcaacctgaccaccgccggctttgcctgctctcagtgtggccagcccctgttcgtgtacaagctggagcaggtgtctgagaagggcaaggcttacaccaactacttcggacggtgcaatgtggccgagcacgaaaagctgatcctgctggcccagctgaagcccgagaaggatagcgacgaagccgtgacatatagcctgggaaagtttgggcagagggccctggatttctacagcattcatgtgaccaaggagtccacccaccccgtgaagcccctggcccagatcgccggaaacagatacgcctccggacctgtgggaaaggccctgagcgacgcatgtatgggcacaatcgcctccttcctgtctaagtaccaggacatcatcatcgaacaccagaaggtggtgaagggcaaccagaagagactggagagcctgcgggagctggccggcaaggaaaacctggaataccctagcgtgaccctgccacctcagcctcacaccaaggagggcgttgatgcctacaacgaagtgatcgcccgggtgcgaatgtgggtgaacctgaacctgtggcagaagctgaagctaagcagagatgatgccaagcctctgctgagactgaagggattcccttcctttcctctggtcgagagacaggccaacgaagtggactggtgggacatggtgtgtaacgtgaagaagctgatcaacgagaaaaaggaggatggcaaggtgttttggcagaatctggctggctacaagagacaggaagccctgagaccatacctgagcagcgaggaagatcggaagaagggaaagaaattcgctcggtaccagctgggcgacctgctgctgcacctggaaaagaagcacggcgaggactggggaaaggtgtacgacgaggcctgggagcggattgacaagaaagtggaaggcctgagcaagcacatcaagctggaagaggaacggagaagcgaggacgcccagagcaaggccgccctgaccgactggctgcgggctaaggccagcttcgtgatcgagggcctgaaggaggccgacaaggacgagttctgcagatgcgagctgaagctgcagaagtggtacggggacctgcggggaaagcccttcgccatcgaagccgagaacagcatcctggacatcagcggcttcagcaagcagtacaactgtgccttcatctggcagaaggacggcgtgaagaagctgaacctgtacctgatcatcaactacttcaagggcggcaagctgcggttcaagaagatcaaacctgaagccttcgaagccaacagattctacaccgtgatcaacaaaaagagcggcgagatcgtgcccatggaggtgaacttcaacttcgacgaccccaacctgatcatcctgcctctggcctttggcaagagacagggcagagaattcatctggaacgacctgctgtccctggaaaccggcagcctgaagctggccaacggaagagtgatcgagaagacactgtacaacagaagaacccggcaggatgagcctgccctgttcgtggccctgaccttcgagcggcgggaggtcctggactcctccaatatcaaaccaatgaacctgatcggcgtggcaagaggcgaaaacatccccgccgtgatcgccctgaccgaccccgagggctgcccactgagccggtttaaggatagcctgggaaacccaacccacatcctgagaatcggcgagagctataaggagaagcagcggaccatccaggccaagaaggaggtggagcagcggagagccggcggctacagccggaagtacgccagcaaagccaagaatctggcagacgatatggtgagaaacaccgctagagatctgctgtactacgccgtgacccaggatgccatgctgatcttcgccaacctgagccggggcttcggccggcagggcaagcggaccttcatggccgagagacagtacacacggatggaggactggctgaccgccaagctggcctacgagggcctgagcaagacctacctgtccaagacactggcccagtacacctccaagacatgcagcaactgtgggtttaccatcaccagcgccgactacgacagggtgctggagaagctgaagaagacagcaacaggctggatgaccacaattaacggcaaggagctgaaggtggagggccagattacctactacaacagatacaagagacagaacgtagtcaaggacctgtccgtcgagctggatagactgagcgaagaatctgtgaacaacgacatctcctcctggacaaagggcagaagcggagaagctctgagcctcctgaagaaaagattctcccatagacccgtgcaggagaagttcgtgtgcctgaactgcggcttcgagacacacgcagccgagcaagccgccctgaacatcgccagatcctggctgttcctgcggagccaggagtacaagaaataccagacaaacaagacaaccggcaacaccgataagagagccttcgtcgagacctggcagtccttttaccggaagaagcttaaggaggtgtggaaacctgccgtgcggtctggcggatctggcggaggctccaccagccccaagaaaaagagaaaagtctaagctgccttctgcggggcttgccttctggccatgcccttcttctctcccttgcacctgtacctcttggtctttgaataaagcctgagtaggaaggctagcaaaaaaaaaaaaaaaaaaaaaaaaaaaaaaaaaaaaaaaaaaaaaaaaaaaaaaaaaaaaaaaaaaaaaaaaaaaaaaaagcccagccggctccccaacctctaccgaggagggcacctctgagtccgccacccccgagagcggccctggcacctccaccgagcccagcgagggcagcgcacccggcagccctgccggcagccccacctccacagaggagggaaccagcaccgagcccagcgaaggcagcgccccaggcaccagcaccgagcctagtgagcaggagattaaacggatcaacaagatcagaagaagacttgtgaaagacagcaacaccaagaaggccggcaagacaggccccatgaaaaccctgctggttagagtgatgacacccgatctgagagagcggctggaaaacctgagaaagaagcctgaaaatatcccccagcccatcagcaatacatctagagccaacctgaataagctgctgaccgattacaccgaaatgaagaaggcgatcctgcatgtgtactgggaagagttccagaaggaccctgtgggcctgatgagccgggtggcccagcctgccagcaagaagatcgatcagaacaagctgaaacctgagatggacgagaagggcaacctgaccaccgccggctttgcctgctctcagtgtggccagcccctgttcgtgtacaagctggagcaggtgtctgagaagggcaaggcttacaccaactacttcggacggtgcaatgtggccgagcacgaaaagctgatcctgctggcccagctgaagcccgagaaggatagcgacgaagccgtgacatatagcctgggaaagtttgggcagagggccctggatttctacagcattcatgtgaccaaggagtccacccaccccgtgaagcccctggcccagatcgccggaaacagatacgcctccggacctgtgggaaaggccctgagcgacgcatgtatgggcacaatcgcctccttcctgtctaagtaccaggacatcatcatcgaacaccagaaggtggtgaagggcaaccagaagagactggagagcctgcgggagctggccggcaaggaaaacctggaataccctagcgtgaccctgccacctcagcctcacaccaaggagggcgttgatgcctacaacgaagtgatcgcccgggtgcgaatgtgggtgaacctgaacctgtggcagaagctgaagctaagcagagatgatgccaagcctctgctgagactgaagggattcccttcctttcctctggtcgagagacaggccaacgaagtggactggtgggacatggtgtgtaacgtgaagaagctgatcaacgagaaaaaggaggatggcaaggtgttttggcagaatctggctggctacaagagacaggaagccctgagaccatacctgagcagcgaggaagatcggaagaagggaaagaaattcgctcggtaccagctgggcgacctgctgctgcacctggaaaagaagcacggcgaggactggggaaaggtgtacgacgaggcctgggagcggattgacaagaaagtggaaggcctgagcaagcacatcaagctggaagaggaacggagaagcgaggacgcccagagcaaggccgccctgaccgactggctgcgggctaaggccagcttcgtgatcgagggcctgaaggaggccgacaaggacgagttctgcagatgcgagctgaagctgcagaagtggtacggggacctgcggggaaagcccttcgccatcgaagccgagaacagcatcctggacatcagcggcttcagcaagcagtacaactgtgccttcatctggcagaaggacggcgtgaagaagctgaacctgtacctgatcatcaactacttcaagggcggcaagctgcggttcaagaagatcaaacctgaagccttcgaagccaacagattctacaccgtgatcaacaaaaagagcggcgagatcgtgcccatggaggtgaacttcaacttcgacgaccccaacctgatcatcctgcctctggcctttggcaagagacagggcagagaattcatctggaacgacctgctgtccctggaaaccggcagcctgaagctggccaacggaagagtgatcgagaagacactgtacaacagaagaacccggcaggatgagcctgccctgttcgtggccctgaccttcgagcggcgggaggtcctggactcctccaatatcaaaccaatgaacctgatcggcgtggcaagaggcgaaaacatccccgccgtgatcgccctgaccgaccccgagggctgcccactgagccggtttaaggatagcctgggaaacccaacccacatcctgagaatcggcgagagctataaggagaagcagcggaccatccaggccaagaaggaggtggagcagcggagagccggcggctacagccggaagtacgccagcaaagccaagaatctggcagacgatatggtgagaaacaccgctagagatctgctgtactacgccgtgacccaggatgccatgctgatcttcgccaacctgagccggggcttcggccggcagggcaagcggaccttcatggccgagagacagtacacacggatggaggactggctgaccgccaagctggcctacgagggcctgagcaagacctacctgtccaagacactggcccagtacacctccaagacatgcagcaactgtgggtttaccatcaccagcgccgactacgacagggtgctggagaagctgaagaagacagcaacaggctggatgaccacaattaacggcaaggagctgaaggtggagggccagattacctactacaacagatacaagagacagaacgtagtcaaggacctgtccgtcgagctggatagactgagcgaagaatctgtgaacaacgacatctcctcctggacaaagggcagaagcggagaagctctgagcctcctgaagaaaagattctcccatagacccgtgcaggagaagttcgtgtgcctgaactgcggcttcgagacacacgcagccgagcaagccgccctgaacatcgccagatcctggctgttcctgcggagccaggagtacaagaaataccagacaaacaagacaaccggcaacaccgataagagagccttcgtcgagacctggcagtccttttaccggaagaagcttaaggaggtgtggaaacctgccgtgcggtctggcggatctggcggaggctccaccagccccaagaaaaagagaaaagtctaagctgccttctgcggggcttgccttctggccatgcccttcttctctcccttgcacctgtacctcttggtctttgaataaagcctgagtaggaaggctagcaaaaaaaaaaaaaaaaaaaaaaaaaaaaaaaaaaaaaaaaaaaaaaaaaaaaaaaaaaaaaaaaaaaaaaaaaaaaaaaa

SEQ ID NO: 10374 - RNA, 8787 nt, synthetic construct
  source 1..8787: mol_type = other RNA
aggaaataagagagaaaagaagagtaagaagaaatataagagccaccatggcccctaagaagaagcgtaaagtgagccggatgaaccacgaccaggagttcgacccccctaaggtgtaccctcccgtccccgccgagaagagaaagcccatccgggtcctgagcctgttcgatggcatcgccaccggtctgctggtgctgaaggacctgggcatccaggtggataggtacattgcctccgaggtgtgcgaggactccatcaccgtgggaatggtgcgtcatcagggcaagatcatgtacgtgggcgacgtgcggagcgtgacacagaagcatatccaggagtggggccctttcgacctggtgatcggcggcagcccttgcaatgacctgagcatcgtgaacccagcccggaagggcctgtacgagggaaccggcagactgttcttcgagttttacagactgctgcacgacgcccggcctaaggaaggcgacgaccggcccttcttttggctgttcgagaatgtggtggccatgggagtcagcgacaagcgggatattagccggttcctggagagcaaccccgtgatgatcgatgccaaggaagtgagcgccgcccaccgggccagatacttctggggcaatctgcctggcatgaacagacccctggccagcaccgtgaacgacaagctggagctgcaggagtgcctggagcacggccggatcgccaagttcagcaaggtgagaaccatcaccacccgaagcaacagcatcaaacaaggcaaggaccagcactttcctgtgttcatgaacgagaaggaggacatcctgtggtgtaccgagatggagagagtgttcgggttcccagtccactacacagatgtcagcaacatgtctagactggccagacagagactgctgggaagaagctggtccgtccctgtgatcagacacctgttcgcccctctgaaggagtacttcgcctgcgtgagcagcggcaacagcaacgccaacagccggggccccagcttctctagcggcctggtgccactgtccctgagagggagccacatgggccccatggagatctacaaaaccgtgagcgcctggaagcggcagcctgtgcgcgtgctgagcctgtttcggaatatcgataaagtcctgaaaagcctgggattcctggagagcggctctggctccggcggtggcaccctgaagtacgtggaggatgtgacaaacgtggtcagacgggatgtggagaagtggggccccttcgatctggtgtacggcagcacccaacccctgggcagctcttgtgaccggtgccctggctggtacatgtttcagttccaccggatcctgcagtacgccctgccgagacaggagtcccagcggccattcttttggattttcatggacaacttgctgctgaccgaggatgaccaggaaactaccactcggttcctgcagaccgaagccgtgaccctgcaggacgtgagaggccgggactaccagaacgccatgcgggtgtggtccaacatccctggactgaaaagcaagcacgcacctctgacccctaaagaagaggagtacctgcaggcccaggtgcggagcagaagcaagctggacgcccctaaggtggatctgctggtgaagaattgcctcctgcccctgagagagtacttcaagtatttcagccagaatagtctgcccctgggaggcagcggcggcggccccaggggcctggtgaccttcaaggacgtggccgtggacttcacccaggaggagtggggcctgctggaccacaaccagaaggagctgtacaaggaggtgatgctggagaacgccaggaacctgctgagcctgggcctgcccgtgcccagggaggacgtgatcagctacttcgagcagagggaggccccctggatgctggagcaggagggcctgaggagcaggtgcctggagggcgagatcaggggcggcccaagcagcggcgcccctcctcccagcggcggcaggcggcccaagcagcggcgcccctcctcccagcggcggcagcccagccggctccccaacctctaccgaggagggcacctctgagtccgccacccccgagagcggccctggcacctccaccgagcccagcgagggcagcgcacccggcagccctgccggcagccccacctccacagaggagggaaccagcaccgagcccagcgaaggcagcgccccaggcaccagcaccgagcctagtgagcaggagattaaacggatcaacaagatcagaagaagacttgtgaaagacagcaacaccaagaaggccggcaagacaggccccatgaaaaccctgctggttagagtgatgacacccgatctgagagagcggctggaaaacctgagaaagaagcctgaaaatatcccccagcccatcagcaatacatctagagccaacctgaataagctgctgaccgattacaccgaaatgaagaaggcgatcctgcatgtgtactgggaagagttccagaaggaccctgtgggcctgatgagccgggtggcccagcctgccagcaagaagatcgatcagaacaagctgaaacctgagatggacgagaagggcaacctgaccaccgccggctttgcctgctctcagtgtggccagcccctgttcgtgtacaagctggagcaggtgtctgagaagggcaaggcttacaccaactacttcggacggtgcaatgtggccgagcacgaaaagctgatcctgctggcccagctgaagcccgagaaggatagcgacgaagccgtgacatatagcctgggaaagtttgggcagagggccctggatttctacagcattcatgtgaccaaggagtccacccaccccgtgaagcccctggcccagatcgccggaaacagatacgcctccggacctgtgggaaaggccctgagcgacgcatgtatgggcacaatcgcctccttcctgtctaagtaccaggacatcatcatcgaacaccagaaggtggtgaagggcaaccagaagagactggagagcctgcgggagctggccggcaaggaaaacctggaataccctagcgtgaccctgccacctcagcctcacaccaaggagggcgttgatgcctacaacgaagtgatcgcccgggtgcgaatgtgggtgaacctgaacctgtggcagaagctgaagctaagcagagatgatgccaagcctctgctgagactgaagggattcccttcctttcctctggtcgagagacaggccaacgaagtggactggtgggacatggtgtgtaacgtgaagaagctgatcaacgagaaaaaggaggatggcaaggtgttttggcagaatctggctggctacaagagacaggaagccctgagaccatacctgagcagcgaggaagatcggaagaagggaaagaaattcgctcggtaccagctgggcgacctgctgctgcacctggaaaagaagcacggcgaggactggggaaaggtgtacgacgaggcctgggagcggattgacaagaaagtggaaggcctgagcaagcacatcaagctggaagaggaacggagaagcgaggacgcccagagcaaggccgccctgaccgactggctgcgggctaaggccagcttcgtgatcgagggcctgaaggaggccgacaaggacgagttctgcagatgcgagctgaagctgcagaagtggtacggggacctgcggggaaagcccttcgccatcgaagccgagaacagcatcctggacatcagcggcttcagcaagcagtacaactgtgccttcatctggcagaaggacggcgtgaagaagctgaacctgtacctgatcatcaactacttcaagggcggcaagctgcggttcaagaagatcaaacctgaagccttcgaagccaacagattctacaccgtgatcaacaaaaagagcggcgagatcgtgcccatggaggtgaacttcaacttcgacgaccccaacctgatcatcctgcctctggcctttggcaagagacagggcagagaattcatctggaacgacctgctgtccctggaaaccggcagcctgaagctggccaacggaagagtgatcgagaagacactgtacaacagaagaacccggcaggatgagcctgccctgttcgtggccctgaccttcgagcggcgggaggtcctggactcctccaatatcaaaccaatgaacctgatcggcgtggcaagaggcgaaaacatccccgccgtgatcgccctgaccgaccccgagggctgcccactgagccggtttaaggatagcctgggaaacccaacccacatcctgagaatcggcgagagctataaggagaagcagcggaccatccaggccaagaaggaggtggagcagcggagagccggcggctacagccggaagtacgccagcaaagccaagaatctggcagacgatatggtgagaaacaccgctagagatctgctgtactacgccgtgacccaggatgccatgctgatcttcgccaacctgagccggggcttcggccggcagggcaagcggaccttcatggccgagagacagtacacacggatggaggactggctgaccgccaagctggcctacgagggcctgagcaagacctacctgtccaagacactggcccagtacacctccaagacatgcagcaactgtgggtttaccatcaccagcgccgactacgacagggtgctggagaagctgaagaagacagcaacaggctggatgaccacaattaacggcaaggagctgaaggtggagggccagattacctactacaacagatacaagagacagaacgtagtcaaggacctgtccgtcgagctggatagactgagcgaagaatctgtgaacaacgacatctcctcctggacaaagggcagaagcggagaagctctgagcctcctgaagaaaagattctcccatagacccgtgcaggagaagttcgtgtgcctgaactgcggcttcgagacacacgcagccgagcaagccgccctgaacatcgccagatcctggctgttcctgcggagccaggagtacaagaaataccagacaaacaagacaaccggcaacaccgataagagagccttcgtcgagacctggcagtccttttaccggaagaagcttaaggaggtgtggaaacctgccgtgcggtctggcggatctggcggaggctccaccagccccaagaaaaagagaaaagtctaagctgccttctgcggggcttgccttctggccatgcccttcttctctcccttgcacctgtacctcttggtctttgaataaagcctgagtaggaaggctagcaaaaaaaaaaaaaaaaaaaaaaaaaaaaaaaaaaaaaaaaaaaaaaaaaaaaaaaaaaaaaaaaaaaaaaaaaaaaaaaagcccagccggctccccaacctctaccgaggagggcacctctgagtccgccacccccgagagcggccctggcacctccaccgagcccagcgagggcagcgcacccggcagccctgccggcagccccacctccacagaggagggaaccagcaccgagcccagcgaaggcagcgccccaggcaccagcaccgagcctagtgagcaggagattaaacggatcaacaagatcagaagaagacttgtgaaagacagcaacaccaagaaggccggcaagacaggccccatgaaaaccctgctggttagagtgatgacacccgatctgagagagcggctggaaaacctgagaaagaagcctgaaaatatcccccagcccatcagcaatacatctagagccaacctgaataagctgctgaccgattacaccgaaatgaagaaggcgatcctgcatgtgtactgggaagagttccagaaggaccctgtgggcctgatgagccgggtggcccagcctgccagcaagaagatcgatcagaacaagctgaaacctgagatggacgagaagggcaacctgaccaccgccggctttgcctgctctcagtgtggccagcccctgttcgtgtacaagctggagcaggtgtctgagaagggcaaggcttacaccaactacttcggacggtgcaatgtggccgagcacgaaaagctgatcctgctggcccagctgaagcccgagaaggatagcgacgaagccgtgacatatagcctgggaaagtttgggcagagggccctggatttctacagcattcatgtgaccaaggagtccacccaccccgtgaagcccctggcccagatcgccggaaacagatacgcctccggacctgtgggaaaggccctgagcgacgcatgtatgggcacaatcgcctccttcctgtctaagtaccaggacatcatcatcgaacaccagaaggtggtgaagggcaaccagaagagactggagagcctgcgggagctggccggcaaggaaaacctggaataccctagcgtgaccctgccacctcagcctcacaccaaggagggcgttgatgcctacaacgaagtgatcgcccgggtgcgaatgtgggtgaacctgaacctgtggcagaagctgaagctaagcagagatgatgccaagcctctgctgagactgaagggattcccttcctttcctctggtcgagagacaggccaacgaagtggactggtgggacatggtgtgtaacgtgaagaagctgatcaacgagaaaaaggaggatggcaaggtgttttggcagaatctggctggctacaagagacaggaagccctgagaccatacctgagcagcgaggaagatcggaagaagggaaagaaattcgctcggtaccagctgggcgacctgctgctgcacctggaaaagaagcacggcgaggactggggaaaggtgtacgacgaggcctgggagcggattgacaagaaagtggaaggcctgagcaagcacatcaagctggaagaggaacggagaagcgaggacgcccagagcaaggccgccctgaccgactggctgcgggctaaggccagcttcgtgatcgagggcctgaaggaggccgacaaggacgagttctgcagatgcgagctgaagctgcagaagtggtacggggacctgcggggaaagcccttcgccatcgaagccgagaacagcatcctggacatcagcggcttcagcaagcagtacaactgtgccttcatctggcagaaggacggcgtgaagaagctgaacctgtacctgatcatcaactacttcaagggcggcaagctgcggttcaagaagatcaaacctgaagccttcgaagccaacagattctacaccgtgatcaacaaaaagagcggcgagatcgtgcccatggaggtgaacttcaacttcgacgaccccaacctgatcatcctgcctctggcctttggcaagagacagggcagagaattcatctggaacgacctgctgtccctggaaaccggcagcctgaagctggccaacggaagagtgatcgagaagacactgtacaacagaagaacccggcaggatgagcctgccctgttcgtggccctgaccttcgagcggcgggaggtcctggactcctccaatatcaaaccaatgaacctgatcggcgtggcaagaggcgaaaacatccccgccgtgatcgccctgaccgaccccgagggctgcccactgagccggtttaaggatagcctgggaaacccaacccacatcctgagaatcggcgagagctataaggagaagcagcggaccatccaggccaagaaggaggtggagcagcggagagccggcggctacagccggaagtacgccagcaaagccaagaatctggcagacgatatggtgagaaacaccgctagagatctgctgtactacgccgtgacccaggatgccatgctgatcttcgccaacctgagccggggcttcggccggcagggcaagcggaccttcatggccgagagacagtacacacggatggaggactggctgaccgccaagctggcctacgagggcctgagcaagacctacctgtccaagacactggcccagtacacctccaagacatgcagcaactgtgggtttaccatcaccagcgccgactacgacagggtgctggagaagctgaagaagacagcaacaggctggatgaccacaattaacggcaaggagctgaaggtggagggccagattacctactacaacagatacaagagacagaacgtagtcaaggacctgtccgtcgagctggatagactgagcgaagaatctgtgaacaacgacatctcctcctggacaaagggcagaagcggagaagctctgagcctcctgaagaaaagattctcccatagacccgtgcaggagaagttcgtgtgcctgaactgcggcttcgagacacacgcagccgagcaagccgccctgaacatcgccagatcctggctgttcctgcggagccaggagtacaagaaataccagacaaacaagacaaccggcaacaccgataagagagccttcgtcgagacctggcagtccttttaccggaagaagcttaaggaggtgtggaaacctgccgtgcggtctggcggatctggcggaggctccaccagccccaagaaaaagagaaaagtctaagctgccttctgcggggcttgccttctggccatgcccttcttctctcccttgcacctgtacctcttggtctttgaataaagcctgagtaggaaggctagcaaaaaaaaaaaaaaaaaaaaaaaaaaaaaaaaaaaaaaaaaaaaaaaaaaaaaaaaaaaaaaaaaaaaaaaaaaaaaaaa

SEQ ID NO: 10375 - RNA, 8787 nt, synthetic construct
  source 1..8787: mol_type = other RNA
aggaaataagagagaaaagaagagtaagaagaaatataagagccaccatggcccctaagaagaagcgtaaagtgagccggatgaaccacgaccaggagttcgacccccctaaggtgtaccctcccgtccccgccgagaagagaaagcccatccgggtcctgagcctgttcgatggcatcgccaccggtctgctggtgctgaaggacctgggcatccaggtggataggtacattgcctccgaggtgtgcgaggactccatcaccgtgggaatggtgcgtcatcagggcaagatcatgtacgtgggcgacgtgcggagcgtgacacagaagcatatccaggagtggggccctttcgacctggtgatcggcggcagcccttgcaatgacctgagcatcgtgaacccagcccggaagggcctgtacgagggaaccggcagactgttcttcgagttttacagactgctgcacgacgcccggcctaaggaaggcgacgaccggcccttcttttggctgttcgagaatgtggtggccatgggagtcagcgacaagcgggatattagccggttcctggagagcaaccccgtgatgatcgatgccaaggaagtgagcgccgcccaccgggccagatacttctggggcaatctgcctggcatgaacagacccctggccagcaccgtgaacgacaagctggagctgcaggagtgcctggagcacggccggatcgccaagttcagcaaggtgagaaccatcaccacccgaagcaacagcatcaaacaaggcaaggaccagcactttcctgtgttcatgaacgagaaggaggacatcctgtggtgtaccgagatggagagagtgttcgggttcccagtccactacacagatgtcagcaacatgtctagactggccagacagagactgctgggaagaagctggtccgtccctgtgatcagacacctgttcgcccctctgaaggagtacttcgcctgcgtgagcagcggcaacagcaacgccaacagccggggccccagcttctctagcggcctggtgccactgtccctgagagggagccacatgggccccatggagatctacaaaaccgtgagcgcctggaagcggcagcctgtgcgcgtgctgagcctgtttcggaatatcgataaagtcctgaaaagcctgggattcctggagagcggctctggctccggcggtggcaccctgaagtacgtggaggatgtgacaaacgtggtcagacgggatgtggagaagtggggccccttcgatctggtgtacggcagcacccaacccctgggcagctcttgtgaccggtgccctggctggtacatgtttcagttccaccggatcctgcagtacgccctgccgagacaggagtcccagcggccattcttttggattttcatggacaacttgctgctgaccgaggatgaccaggaaactaccactcggttcctgcagaccgaagccgtgaccctgcaggacgtgagaggccgggactaccagaacgccatgcgggtgtggtccaacatccctggactgaaaagcaagcacgcacctctgacccctaaagaagaggagtacctgcaggcccaggtgcggagcagaagcaagctggacgcccctaaggtggatctgctggtgaagaattgcctcctgcccctgagagagtacttcaagtatttcagccagaatagtctgcccctgggaggcagcggcggcggcatggacgccgtgaccttcatggacgtgcacgtgaacttcagccaggaggagtgggccctgctgaaccccagccagaagagcctgtacaaggacgtgatgctggagacctactggaacctgacctgcatcggctacgagtgggaggaccacaacagcgaggagtgctgccagagcagcaggaggcacggcaggtacttcaacagcagccagtacagcacctgcaaggccaagggctacggcaagggcggcccaagcagcggcgcccctcctcccagcggcggcaggcggcccaagcagcggcgcccctcctcccagcggcggcagcccagccggctccccaacctctaccgaggagggcacctctgagtccgccacccccgagagcggccctggcacctccaccgagcccagcgagggcagcgcacccggcagccctgccggcagccccacctccacagaggagggaaccagcaccgagcccagcgaaggcagcgccccaggcaccagcaccgagcctagtgagcaggagattaaacggatcaacaagatcagaagaagacttgtgaaagacagcaacaccaagaaggccggcaagacaggccccatgaaaaccctgctggttagagtgatgacacccgatctgagagagcggctggaaaacctgagaaagaagcctgaaaatatcccccagcccatcagcaatacatctagagccaacctgaataagctgctgaccgattacaccgaaatgaagaaggcgatcctgcatgtgtactgggaagagttccagaaggaccctgtgggcctgatgagccgggtggcccagcctgccagcaagaagatcgatcagaacaagctgaaacctgagatggacgagaagggcaacctgaccaccgccggctttgcctgctctcagtgtggccagcccctgttcgtgtacaagctggagcaggtgtctgagaagggcaaggcttacaccaactacttcggacggtgcaatgtggccgagcacgaaaagctgatcctgctggcccagctgaagcccgagaaggatagcgacgaagccgtgacatatagcctgggaaagtttgggcagagggccctggatttctacagcattcatgtgaccaaggagtccacccaccccgtgaagcccctggcccagatcgccggaaacagatacgcctccggacctgtgggaaaggccctgagcgacgcatgtatgggcacaatcgcctccttcctgtctaagtaccaggacatcatcatcgaacaccagaaggtggtgaagggcaaccagaagagactggagagcctgcgggagctggccggcaaggaaaacctggaataccctagcgtgaccctgccacctcagcctcacaccaaggagggcgttgatgcctacaacgaagtgatcgcccgggtgcgaatgtgggtgaacctgaacctgtggcagaagctgaagctaagcagagatgatgccaagcctctgctgagactgaagggattcccttcctttcctctggtcgagagacaggccaacgaagtggactggtgggacatggtgtgtaacgtgaagaagctgatcaacgagaaaaaggaggatggcaaggtgttttggcagaatctggctggctacaagagacaggaagccctgagaccatacctgagcagcgaggaagatcggaagaagggaaagaaattcgctcggtaccagctgggcgacctgctgctgcacctggaaaagaagcacggcgaggactggggaaaggtgtacgacgaggcctgggagcggattgacaagaaagtggaaggcctgagcaagcacatcaagctggaagaggaacggagaagcgaggacgcccagagcaaggccgccctgaccgactggctgcgggctaaggccagcttcgtgatcgagggcctgaaggaggccgacaaggacgagttctgcagatgcgagctgaagctgcagaagtggtacggggacctgcggggaaagcccttcgccatcgaagccgagaacagcatcctggacatcagcggcttcagcaagcagtacaactgtgccttcatctggcagaaggacggcgtgaagaagctgaacctgtacctgatcatcaactacttcaagggcggcaagctgcggttcaagaagatcaaacctgaagccttcgaagccaacagattctacaccgtgatcaacaaaaagagcggcgagatcgtgcccatggaggtgaacttcaacttcgacgaccccaacctgatcatcctgcctctggcctttggcaagagacagggcagagaattcatctggaacgacctgctgtccctggaaaccggcagcctgaagctggccaacggaagagtgatcgagaagacactgtacaacagaagaacccggcaggatgagcctgccctgttcgtggccctgaccttcgagcggcgggaggtcctggactcctccaatatcaaaccaatgaacctgatcggcgtggcaagaggcgaaaacatccccgccgtgatcgccctgaccgaccccgagggctgcccactgagccggtttaaggatagcctgggaaacccaacccacatcctgagaatcggcgagagctataaggagaagcagcggaccatccaggccaagaaggaggtggagcagcggagagccggcggctacagccggaagtacgccagcaaagccaagaatctggcagacgatatggtgagaaacaccgctagagatctgctgtactacgccgtgacccaggatgccatgctgatcttcgccaacctgagccggggcttcggccggcagggcaagcggaccttcatggccgagagacagtacacacggatggaggactggctgaccgccaagctggcctacgagggcctgagcaagacctacctgtccaagacactggcccagtacacctccaagacatgcagcaactgtgggtttaccatcaccagcgccgactacgacagggtgctggagaagctgaagaagacagcaacaggctggatgaccacaattaacggcaaggagctgaaggtggagggccagattacctactacaacagatacaagagacagaacgtagtcaaggacctgtccgtcgagctggatagactgagcgaagaatctgtgaacaacgacatctcctcctggacaaagggcagaagcggagaagctctgagcctcctgaagaaaagattctcccatagacccgtgcaggagaagttcgtgtgcctgaactgcggcttcgagacacacgcagccgagcaagccgccctgaacatcgccagatcctggctgttcctgcggagccaggagtacaagaaataccagacaaacaagacaaccggcaacaccgataagagagccttcgtcgagacctggcagtccttttaccggaagaagcttaaggaggtgtggaaacctgccgtgcggtctggcggatctggcggaggctccaccagccccaagaaaaagagaaaagtctaagctgccttctgcggggcttgccttctggccatgcccttcttctctcccttgcacctgtacctcttggtctttgaataaagcctgagtaggaaggctagcaaaaaaaaaaaaaaaaaaaaaaaaaaaaaaaaaaaaaaaaaaaaaaaaaaaaaaaaaaaaaaaaaaaaaaaaaaaaaaaagcccagccggctccccaacctctaccgaggagggcacctctgagtccgccacccccgagagcggccctggcacctccaccgagcccagcgagggcagcgcacccggcagccctgccggcagccccacctccacagaggagggaaccagcaccgagcccagcgaaggcagcgccccaggcaccagcaccgagcctagtgagcaggagattaaacggatcaacaagatcagaagaagacttgtgaaagacagcaacaccaagaaggccggcaagacaggccccatgaaaaccctgctggttagagtgatgacacccgatctgagagagcggctggaaaacctgagaaagaagcctgaaaatatcccccagcccatcagcaatacatctagagccaacctgaataagctgctgaccgattacaccgaaatgaagaaggcgatcctgcatgtgtactgggaagagttccagaaggaccctgtgggcctgatgagccgggtggcccagcctgccagcaagaagatcgatcagaacaagctgaaacctgagatggacgagaagggcaacctgaccaccgccggctttgcctgctctcagtgtggccagcccctgttcgtgtacaagctggagcaggtgtctgagaagggcaaggcttacaccaactacttcggacggtgcaatgtggccgagcacgaaaagctgatcctgctggcccagctgaagcccgagaaggatagcgacgaagccgtgacatatagcctgggaaagtttgggcagagggccctggatttctacagcattcatgtgaccaaggagtccacccaccccgtgaagcccctggcccagatcgccggaaacagatacgcctccggacctgtgggaaaggccctgagcgacgcatgtatgggcacaatcgcctccttcctgtctaagtaccaggacatcatcatcgaacaccagaaggtggtgaagggcaaccagaagagactggagagcctgcgggagctggccggcaaggaaaacctggaataccctagcgtgaccctgccacctcagcctcacaccaaggagggcgttgatgcctacaacgaagtgatcgcccgggtgcgaatgtgggtgaacctgaacctgtggcagaagctgaagctaagcagagatgatgccaagcctctgctgagactgaagggattcccttcctttcctctggtcgagagacaggccaacgaagtggactggtgggacatggtgtgtaacgtgaagaagctgatcaacgagaaaaaggaggatggcaaggtgttttggcagaatctggctggctacaagagacaggaagccctgagaccatacctgagcagcgaggaagatcggaagaagggaaagaaattcgctcggtaccagctgggcgacctgctgctgcacctggaaaagaagcacggcgaggactggggaaaggtgtacgacgaggcctgggagcggattgacaagaaagtggaaggcctgagcaagcacatcaagctggaagaggaacggagaagcgaggacgcccagagcaaggccgccctgaccgactggctgcgggctaaggccagcttcgtgatcgagggcctgaaggaggccgacaaggacgagttctgcagatgcgagctgaagctgcagaagtggtacggggacctgcggggaaagcccttcgccatcgaagccgagaacagcatcctggacatcagcggcttcagcaagcagtacaactgtgccttcatctggcagaaggacggcgtgaagaagctgaacctgtacctgatcatcaactacttcaagggcggcaagctgcggttcaagaagatcaaacctgaagccttcgaagccaacagattctacaccgtgatcaacaaaaagagcggcgagatcgtgcccatggaggtgaacttcaacttcgacgaccccaacctgatcatcctgcctctggcctttggcaagagacagggcagagaattcatctggaacgacctgctgtccctggaaaccggcagcctgaagctggccaacggaagagtgatcgagaagacactgtacaacagaagaacccggcaggatgagcctgccctgttcgtggccctgaccttcgagcggcgggaggtcctggactcctccaatatcaaaccaatgaacctgatcggcgtggcaagaggcgaaaacatccccgccgtgatcgccctgaccgaccccgagggctgcccactgagccggtttaaggatagcctgggaaacccaacccacatcctgagaatcggcgagagctataaggagaagcagcggaccatccaggccaagaaggaggtggagcagcggagagccggcggctacagccggaagtacgccagcaaagccaagaatctggcagacgatatggtgagaaacaccgctagagatctgctgtactacgccgtgacccaggatgccatgctgatcttcgccaacctgagccggggcttcggccggcagggcaagcggaccttcatggccgagagacagtacacacggatggaggactggctgaccgccaagctggcctacgagggcctgagcaagacctacctgtccaagacactggcccagtacacctccaagacatgcagcaactgtgggtttaccatcaccagcgccgactacgacagggtgctggagaagctgaagaagacagcaacaggctggatgaccacaattaacggcaaggagctgaaggtggagggccagattacctactacaacagatacaagagacagaacgtagtcaaggacctgtccgtcgagctggatagactgagcgaagaatctgtgaacaacgacatctcctcctggacaaagggcagaagcggagaagctctgagcctcctgaagaaaagattctcccatagacccgtgcaggagaagttcgtgtgcctgaactgcggcttcgagacacacgcagccgagcaagccgccctgaacatcgccagatcctggctgttcctgcggagccaggagtacaagaaataccagacaaacaagacaaccggcaacaccgataagagagccttcgtcgagacctggcagtccttttaccggaagaagcttaaggaggtgtggaaacctgccgtgcggtctggcggatctggcggaggctccaccagccccaagaaaaagagaaaagtctaagctgccttctgcggggcttgccttctggccatgcccttcttctctcccttgcacctgtacctcttggtctttgaataaagcctgagtaggaaggctagcaaaaaaaaaaaaaaaaaaaaaaaaaaaaaaaaaaaaaaaaaaaaaaaaaaaaaaaaaaaaaaaaaaaaaaaaaaaaaaaa

SEQ ID NO: 10376 - RNA, 8787 nt, synthetic construct
  source 1..8787: mol_type = other RNA
aggaaataagagagaaaagaagagtaagaagaaatataagagccaccatggcccctaagaagaagcgtaaagtgagccggatgaaccacgaccaggagttcgacccccctaaggtgtaccctcccgtccccgccgagaagagaaagcccatccgggtcctgagcctgttcgatggcatcgccaccggtctgctggtgctgaaggacctgggcatccaggtggataggtacattgcctccgaggtgtgcgaggactccatcaccgtgggaatggtgcgtcatcagggcaagatcatgtacgtgggcgacgtgcggagcgtgacacagaagcatatccaggagtggggccctttcgacctggtgatcggcggcagcccttgcaatgacctgagcatcgtgaacccagcccggaagggcctgtacgagggaaccggcagactgttcttcgagttttacagactgctgcacgacgcccggcctaaggaaggcgacgaccggcccttcttttggctgttcgagaatgtggtggccatgggagtcagcgacaagcgggatattagccggttcctggagagcaaccccgtgatgatcgatgccaaggaagtgagcgccgcccaccgggccagatacttctggggcaatctgcctggcatgaacagacccctggccagcaccgtgaacgacaagctggagctgcaggagtgcctggagcacggccggatcgccaagttcagcaaggtgagaaccatcaccacccgaagcaacagcatcaaacaaggcaaggaccagcactttcctgtgttcatgaacgagaaggaggacatcctgtggtgtaccgagatggagagagtgttcgggttcccagtccactacacagatgtcagcaacatgtctagactggccagacagagactgctgggaagaagctggtccgtccctgtgatcagacacctgttcgcccctctgaaggagtacttcgcctgcgtgagcagcggcaacagcaacgccaacagccggggccccagcttctctagcggcctggtgccactgtccctgagagggagccacatgggccccatggagatctacaaaaccgtgagcgcctggaagcggcagcctgtgcgcgtgctgagcctgtttcggaatatcgataaagtcctgaaaagcctgggattcctggagagcggctctggctccggcggtggcaccctgaagtacgtggaggatgtgacaaacgtggtcagacgggatgtggagaagtggggccccttcgatctggtgtacggcagcacccaacccctgggcagctcttgtgaccggtgccctggctggtacatgtttcagttccaccggatcctgcagtacgccctgccgagacaggagtcccagcggccattcttttggattttcatggacaacttgctgctgaccgaggatgaccaggaaactaccactcggttcctgcagaccgaagccgtgaccctgcaggacgtgagaggccgggactaccagaacgccatgcgggtgtggtccaacatccctggactgaaaagcaagcacgcacctctgacccctaaagaagaggagtacctgcaggcccaggtgcggagcagaagcaagctggacgcccctaaggtggatctgctggtgaagaattgcctcctgcccctgagagagtacttcaagtatttcagccagaatagtctgcccctgggaggcagcggcggcggcttccaggagagcgtgaccttcaaggacgtggccgtggacttcacccaggaggagtgggcccagctggaccccccccagaggaacctgtacagggacgtgatgctggagaactacgagcacttcgtgttcctgggcctgcccgtggccaagcccgaggtgatcagccagctggagaggggcgaggtgcccctgttccccgagcagcccgagttcagcaccagcatctgccccgacagcctgaacggcggcccaagcagcggcgcccctcctcccagcggcggcaggcggcccaagcagcggcgcccctcctcccagcggcggcagcccagccggctccccaacctctaccgaggagggcacctctgagtccgccacccccgagagcggccctggcacctccaccgagcccagcgagggcagcgcacccggcagccctgccggcagccccacctccacagaggagggaaccagcaccgagcccagcgaaggcagcgccccaggcaccagcaccgagcctagtgagcaggagattaaacggatcaacaagatcagaagaagacttgtgaaagacagcaacaccaagaaggccggcaagacaggccccatgaaaaccctgctggttagagtgatgacacccgatctgagagagcggctggaaaacctgagaaagaagcctgaaaatatcccccagcccatcagcaatacatctagagccaacctgaataagctgctgaccgattacaccgaaatgaagaaggcgatcctgcatgtgtactgggaagagttccagaaggaccctgtgggcctgatgagccgggtggcccagcctgccagcaagaagatcgatcagaacaagctgaaacctgagatggacgagaagggcaacctgaccaccgccggctttgcctgctctcagtgtggccagcccctgttcgtgtacaagctggagcaggtgtctgagaagggcaaggcttacaccaactacttcggacggtgcaatgtggccgagcacgaaaagctgatcctgctggcccagctgaagcccgagaaggatagcgacgaagccgtgacatatagcctgggaaagtttgggcagagggccctggatttctacagcattcatgtgaccaaggagtccacccaccccgtgaagcccctggcccagatcgccggaaacagatacgcctccggacctgtgggaaaggccctgagcgacgcatgtatgggcacaatcgcctccttcctgtctaagtaccaggacatcatcatcgaacaccagaaggtggtgaagggcaaccagaagagactggagagcctgcgggagctggccggcaaggaaaacctggaataccctagcgtgaccctgccacctcagcctcacaccaaggagggcgttgatgcctacaacgaagtgatcgcccgggtgcgaatgtgggtgaacctgaacctgtggcagaagctgaagctaagcagagatgatgccaagcctctgctgagactgaagggattcccttcctttcctctggtcgagagacaggccaacgaagtggactggtgggacatggtgtgtaacgtgaagaagctgatcaacgagaaaaaggaggatggcaaggtgttttggcagaatctggctggctacaagagacaggaagccctgagaccatacctgagcagcgaggaagatcggaagaagggaaagaaattcgctcggtaccagctgggcgacctgctgctgcacctggaaaagaagcacggcgaggactggggaaaggtgtacgacgaggcctgggagcggattgacaagaaagtggaaggcctgagcaagcacatcaagctggaagaggaacggagaagcgaggacgcccagagcaaggccgccctgaccgactggctgcgggctaaggccagcttcgtgatcgagggcctgaaggaggccgacaaggacgagttctgcagatgcgagctgaagctgcagaagtggtacggggacctgcggggaaagcccttcgccatcgaagccgagaacagcatcctggacatcagcggcttcagcaagcagtacaactgtgccttcatctggcagaaggacggcgtgaagaagctgaacctgtacctgatcatcaactacttcaagggcggcaagctgcggttcaagaagatcaaacctgaagccttcgaagccaacagattctacaccgtgatcaacaaaaagagcggcgagatcgtgcccatggaggtgaacttcaacttcgacgaccccaacctgatcatcctgcctctggcctttggcaagagacagggcagagaattcatctggaacgacctgctgtccctggaaaccggcagcctgaagctggccaacggaagagtgatcgagaagacactgtacaacagaagaacccggcaggatgagcctgccctgttcgtggccctgaccttcgagcggcgggaggtcctggactcctccaatatcaaaccaatgaacctgatcggcgtggcaagaggcgaaaacatccccgccgtgatcgccctgaccgaccccgagggctgcccactgagccggtttaaggatagcctgggaaacccaacccacatcctgagaatcggcgagagctataaggagaagcagcggaccatccaggccaagaaggaggtggagcagcggagagccggcggctacagccggaagtacgccagcaaagccaagaatctggcagacgatatggtgagaaacaccgctagagatctgctgtactacgccgtgacccaggatgccatgctgatcttcgccaacctgagccggggcttcggccggcagggcaagcggaccttcatggccgagagacagtacacacggatggaggactggctgaccgccaagctggcctacgagggcctgagcaagacctacctgtccaagacactggcccagtacacctccaagacatgcagcaactgtgggtttaccatcaccagcgccgactacgacagggtgctggagaagctgaagaagacagcaacaggctggatgaccacaattaacggcaaggagctgaaggtggagggccagattacctactacaacagatacaagagacagaacgtagtcaaggacctgtccgtcgagctggatagactgagcgaagaatctgtgaacaacgacatctcctcctggacaaagggcagaagcggagaagctctgagcctcctgaagaaaagattctcccatagacccgtgcaggagaagttcgtgtgcctgaactgcggcttcgagacacacgcagccgagcaagccgccctgaacatcgccagatcctggctgttcctgcggagccaggagtacaagaaataccagacaaacaagacaaccggcaacaccgataagagagccttcgtcgagacctggcagtccttttaccggaagaagcttaaggaggtgtggaaacctgccgtgcggtctggcggatctggcggaggctccaccagccccaagaaaaagagaaaagtctaagctgccttctgcggggcttgccttctggccatgcccttcttctctcccttgcacctgtacctcttggtctttgaataaagcctgagtaggaaggctagcaaaaaaaaaaaaaaaaaaaaaaaaaaaaaaaaaaaaaaaaaaaaaaaaaaaaaaaaaaaaaaaaaaaaaaaaaaaaaaaagcccagccggctccccaacctctaccgaggagggcacctctgagtccgccacccccgagagcggccctggcacctccaccgagcccagcgagggcagcgcacccggcagccctgccggcagccccacctccacagaggagggaaccagcaccgagcccagcgaaggcagcgccccaggcaccagcaccgagcctagtgagcaggagattaaacggatcaacaagatcagaagaagacttgtgaaagacagcaacaccaagaaggccggcaagacaggccccatgaaaaccctgctggttagagtgatgacacccgatctgagagagcggctggaaaacctgagaaagaagcctgaaaatatcccccagcccatcagcaatacatctagagccaacctgaataagctgctgaccgattacaccgaaatgaagaaggcgatcctgcatgtgtactgggaagagttccagaaggaccctgtgggcctgatgagccgggtggcccagcctgccagcaagaagatcgatcagaacaagctgaaacctgagatggacgagaagggcaacctgaccaccgccggctttgcctgctctcagtgtggccagcccctgttcgtgtacaagctggagcaggtgtctgagaagggcaaggcttacaccaactacttcggacggtgcaatgtggccgagcacgaaaagctgatcctgctggcccagctgaagcccgagaaggatagcgacgaagccgtgacatatagcctgggaaagtttgggcagagggccctggatttctacagcattcatgtgaccaaggagtccacccaccccgtgaagcccctggcccagatcgccggaaacagatacgcctccggacctgtgggaaaggccctgagcgacgcatgtatgggcacaatcgcctccttcctgtctaagtaccaggacatcatcatcgaacaccagaaggtggtgaagggcaaccagaagagactggagagcctgcgggagctggccggcaaggaaaacctggaataccctagcgtgaccctgccacctcagcctcacaccaaggagggcgttgatgcctacaacgaagtgatcgcccgggtgcgaatgtgggtgaacctgaacctgtggcagaagctgaagctaagcagagatgatgccaagcctctgctgagactgaagggattcccttcctttcctctggtcgagagacaggccaacgaagtggactggtgggacatggtgtgtaacgtgaagaagctgatcaacgagaaaaaggaggatggcaaggtgttttggcagaatctggctggctacaagagacaggaagccctgagaccatacctgagcagcgaggaagatcggaagaagggaaagaaattcgctcggtaccagctgggcgacctgctgctgcacctggaaaagaagcacggcgaggactggggaaaggtgtacgacgaggcctgggagcggattgacaagaaagtggaaggcctgagcaagcacatcaagctggaagaggaacggagaagcgaggacgcccagagcaaggccgccctgaccgactggctgcgggctaaggccagcttcgtgatcgagggcctgaaggaggccgacaaggacgagttctgcagatgcgagctgaagctgcagaagtggtacggggacctgcggggaaagcccttcgccatcgaagccgagaacagcatcctggacatcagcggcttcagcaagcagtacaactgtgccttcatctggcagaaggacggcgtgaagaagctgaacctgtacctgatcatcaactacttcaagggcggcaagctgcggttcaagaagatcaaacctgaagccttcgaagccaacagattctacaccgtgatcaacaaaaagagcggcgagatcgtgcccatggaggtgaacttcaacttcgacgaccccaacctgatcatcctgcctctggcctttggcaagagacagggcagagaattcatctggaacgacctgctgtccctggaaaccggcagcctgaagctggccaacggaagagtgatcgagaagacactgtacaacagaagaacccggcaggatgagcctgccctgttcgtggccctgaccttcgagcggcgggaggtcctggactcctccaatatcaaaccaatgaacctgatcggcgtggcaagaggcgaaaacatccccgccgtgatcgccctgaccgaccccgagggctgcccactgagccggtttaaggatagcctgggaaacccaacccacatcctgagaatcggcgagagctataaggagaagcagcggaccatccaggccaagaaggaggtggagcagcggagagccggcggctacagccggaagtacgccagcaaagccaagaatctggcagacgatatggtgagaaacaccgctagagatctgctgtactacgccgtgacccaggatgccatgctgatcttcgccaacctgagccggggcttcggccggcagggcaagcggaccttcatggccgagagacagtacacacggatggaggactggctgaccgccaagctggcctacgagggcctgagcaagacctacctgtccaagacactggcccagtacacctccaagacatgcagcaactgtgggtttaccatcaccagcgccgactacgacagggtgctggagaagctgaagaagacagcaacaggctggatgaccacaattaacggcaaggagctgaaggtggagggccagattacctactacaacagatacaagagacagaacgtagtcaaggacctgtccgtcgagctggatagactgagcgaagaatctgtgaacaacgacatctcctcctggacaaagggcagaagcggagaagctctgagcctcctgaagaaaagattctcccatagacccgtgcaggagaagttcgtgtgcctgaactgcggcttcgagacacacgcagccgagcaagccgccctgaacatcgccagatcctggctgttcctgcggagccaggagtacaagaaataccagacaaacaagacaaccggcaacaccgataagagagccttcgtcgagacctggcagtccttttaccggaagaagcttaaggaggtgtggaaacctgccgtgcggtctggcggatctggcggaggctccaccagccccaagaaaaagagaaaagtctaagctgccttctgcggggcttgccttctggccatgcccttcttctctcccttgcacctgtacctcttggtctttgaataaagcctgagtaggaaggctagcaaaaaaaaaaaaaaaaaaaaaaaaaaaaaaaaaaaaaaaaaaaaaaaaaaaaaaaaaaaaaaaaaaaaaaaaaaaaaaaa

SEQ ID NO: 10377 - RNA, 8787 nt, synthetic construct
  source 1..8787: mol_type = other RNA
aggaaataagagagaaaagaagagtaagaagaaatataagagccaccatggcccctaagaagaagcgtaaagtgagccggatgaaccacgaccaggagttcgacccccctaaggtgtaccctcccgtccccgccgagaagagaaagcccatccgggtcctgagcctgttcgatggcatcgccaccggtctgctggtgctgaaggacctgggcatccaggtggataggtacattgcctccgaggtgtgcgaggactccatcaccgtgggaatggtgcgtcatcagggcaagatcatgtacgtgggcgacgtgcggagcgtgacacagaagcatatccaggagtggggccctttcgacctggtgatcggcggcagcccttgcaatgacctgagcatcgtgaacccagcccggaagggcctgtacgagggaaccggcagactgttcttcgagttttacagactgctgcacgacgcccggcctaaggaaggcgacgaccggcccttcttttggctgttcgagaatgtggtggccatgggagtcagcgacaagcgggatattagccggttcctggagagcaaccccgtgatgatcgatgccaaggaagtgagcgccgcccaccgggccagatacttctggggcaatctgcctggcatgaacagacccctggccagcaccgtgaacgacaagctggagctgcaggagtgcctggagcacggccggatcgccaagttcagcaaggtgagaaccatcaccacccgaagcaacagcatcaaacaaggcaaggaccagcactttcctgtgttcatgaacgagaaggaggacatcctgtggtgtaccgagatggagagagtgttcgggttcccagtccactacacagatgtcagcaacatgtctagactggccagacagagactgctgggaagaagctggtccgtccctgtgatcagacacctgttcgcccctctgaaggagtacttcgcctgcgtgagcagcggcaacagcaacgccaacagccggggccccagcttctctagcggcctggtgccactgtccctgagagggagccacatgggccccatggagatctacaaaaccgtgagcgcctggaagcggcagcctgtgcgcgtgctgagcctgtttcggaatatcgataaagtcctgaaaagcctgggattcctggagagcggctctggctccggcggtggcaccctgaagtacgtggaggatgtgacaaacgtggtcagacgggatgtggagaagtggggccccttcgatctggtgtacggcagcacccaacccctgggcagctcttgtgaccggtgccctggctggtacatgtttcagttccaccggatcctgcagtacgccctgccgagacaggagtcccagcggccattcttttggattttcatggacaacttgctgctgaccgaggatgaccaggaaactaccactcggttcctgcagaccgaagccgtgaccctgcaggacgtgagaggccgggactaccagaacgccatgcgggtgtggtccaacatccctggactgaaaagcaagcacgcacctctgacccctaaagaagaggagtacctgcaggcccaggtgcggagcagaagcaagctggacgcccctaaggtggatctgctggtgaagaattgcctcctgcccctgagagagtacttcaagtatttcagccagaatagtctgcccctgggaggcagcggcggcggcccccaggccagcgtgaccttcaaggacgtggccgtggacttcacctgggaggagtggaggctgctggaccccagccagaaggagctgttctgggaggtgatgctggagaactacaggaacctggtgtgcctgggcctggccgacagcaacaaggacgtgaggatcagcgagctggagagcggcgagccccactggatccccaccggcggcgtgctgaggagctgctggcccggctgggagagcggcggcccaagcagcggcgcccctcctcccagcggcggcaggcggcccaagcagcggcgcccctcctcccagcggcggcagcccagccggctccccaacctctaccgaggagggcacctctgagtccgccacccccgagagcggccctggcacctccaccgagcccagcgagggcagcgcacccggcagccctgccggcagccccacctccacagaggagggaaccagcaccgagcccagcgaaggcagcgccccaggcaccagcaccgagcctagtgagcaggagattaaacggatcaacaagatcagaagaagacttgtgaaagacagcaacaccaagaaggccggcaagacaggccccatgaaaaccctgctggttagagtgatgacacccgatctgagagagcggctggaaaacctgagaaagaagcctgaaaatatcccccagcccatcagcaatacatctagagccaacctgaataagctgctgaccgattacaccgaaatgaagaaggcgatcctgcatgtgtactgggaagagttccagaaggaccctgtgggcctgatgagccgggtggcccagcctgccagcaagaagatcgatcagaacaagctgaaacctgagatggacgagaagggcaacctgaccaccgccggctttgcctgctctcagtgtggccagcccctgttcgtgtacaagctggagcaggtgtctgagaagggcaaggcttacaccaactacttcggacggtgcaatgtggccgagcacgaaaagctgatcctgctggcccagctgaagcccgagaaggatagcgacgaagccgtgacatatagcctgggaaagtttgggcagagggccctggatttctacagcattcatgtgaccaaggagtccacccaccccgtgaagcccctggcccagatcgccggaaacagatacgcctccggacctgtgggaaaggccctgagcgacgcatgtatgggcacaatcgcctccttcctgtctaagtaccaggacatcatcatcgaacaccagaaggtggtgaagggcaaccagaagagactggagagcctgcgggagctggccggcaaggaaaacctggaataccctagcgtgaccctgccacctcagcctcacaccaaggagggcgttgatgcctacaacgaagtgatcgcccgggtgcgaatgtgggtgaacctgaacctgtggcagaagctgaagctaagcagagatgatgccaagcctctgctgagactgaagggattcccttcctttcctctggtcgagagacaggccaacgaagtggactggtgggacatggtgtgtaacgtgaagaagctgatcaacgagaaaaaggaggatggcaaggtgttttggcagaatctggctggctacaagagacaggaagccctgagaccatacctgagcagcgaggaagatcggaagaagggaaagaaattcgctcggtaccagctgggcgacctgctgctgcacctggaaaagaagcacggcgaggactggggaaaggtgtacgacgaggcctgggagcggattgacaagaaagtggaaggcctgagcaagcacatcaagctggaagaggaacggagaagcgaggacgcccagagcaaggccgccctgaccgactggctgcgggctaaggccagcttcgtgatcgagggcctgaaggaggccgacaaggacgagttctgcagatgcgagctgaagctgcagaagtggtacggggacctgcggggaaagcccttcgccatcgaagccgagaacagcatcctggacatcagcggcttcagcaagcagtacaactgtgccttcatctggcagaaggacggcgtgaagaagctgaacctgtacctgatcatcaactacttcaagggcggcaagctgcggttcaagaagatcaaacctgaagccttcgaagccaacagattctacaccgtgatcaacaaaaagagcggcgagatcgtgcccatggaggtgaacttcaacttcgacgaccccaacctgatcatcctgcctctggcctttggcaagagacagggcagagaattcatctggaacgacctgctgtccctggaaaccggcagcctgaagctggccaacggaagagtgatcgagaagacactgtacaacagaagaacccggcaggatgagcctgccctgttcgtggccctgaccttcgagcggcgggaggtcctggactcctccaatatcaaaccaatgaacctgatcggcgtggcaagaggcgaaaacatccccgccgtgatcgccctgaccgaccccgagggctgcccactgagccggtttaaggatagcctgggaaacccaacccacatcctgagaatcggcgagagctataaggagaagcagcggaccatccaggccaagaaggaggtggagcagcggagagccggcggctacagccggaagtacgccagcaaagccaagaatctggcagacgatatggtgagaaacaccgctagagatctgctgtactacgccgtgacccaggatgccatgctgatcttcgccaacctgagccggggcttcggccggcagggcaagcggaccttcatggccgagagacagtacacacggatggaggactggctgaccgccaagctggcctacgagggcctgagcaagacctacctgtccaagacactggcccagtacacctccaagacatgcagcaactgtgggtttaccatcaccagcgccgactacgacagggtgctggagaagctgaagaagacagcaacaggctggatgaccacaattaacggcaaggagctgaaggtggagggccagattacctactacaacagatacaagagacagaacgtagtcaaggacctgtccgtcgagctggatagactgagcgaagaatctgtgaacaacgacatctcctcctggacaaagggcagaagcggagaagctctgagcctcctgaagaaaagattctcccatagacccgtgcaggagaagttcgtgtgcctgaactgcggcttcgagacacacgcagccgagcaagccgccctgaacatcgccagatcctggctgttcctgcggagccaggagtacaagaaataccagacaaacaagacaaccggcaacaccgataagagagccttcgtcgagacctggcagtccttttaccggaagaagcttaaggaggtgtggaaacctgccgtgcggtctggcggatctggcggaggctccaccagccccaagaaaaagagaaaagtctaagctgccttctgcggggcttgccttctggccatgcccttcttctctcccttgcacctgtacctcttggtctttgaataaagcctgagtaggaaggctagcaaaaaaaaaaaaaaaaaaaaaaaaaaaaaaaaaaaaaaaaaaaaaaaaaaaaaaaaaaaaaaaaaaaaaaaaaaaaaaaagcccagccggctccccaacctctaccgaggagggcacctctgagtccgccacccccgagagcggccctggcacctccaccgagcccagcgagggcagcgcacccggcagccctgccggcagccccacctccacagaggagggaaccagcaccgagcccagcgaaggcagcgccccaggcaccagcaccgagcctagtgagcaggagattaaacggatcaacaagatcagaagaagacttgtgaaagacagcaacaccaagaaggccggcaagacaggccccatgaaaaccctgctggttagagtgatgacacccgatctgagagagcggctggaaaacctgagaaagaagcctgaaaatatcccccagcccatcagcaatacatctagagccaacctgaataagctgctgaccgattacaccgaaatgaagaaggcgatcctgcatgtgtactgggaagagttccagaaggaccctgtgggcctgatgagccgggtggcccagcctgccagcaagaagatcgatcagaacaagctgaaacctgagatggacgagaagggcaacctgaccaccgccggctttgcctgctctcagtgtggccagcccctgttcgtgtacaagctggagcaggtgtctgagaagggcaaggcttacaccaactacttcggacggtgcaatgtggccgagcacgaaaagctgatcctgctggcccagctgaagcccgagaaggatagcgacgaagccgtgacatatagcctgggaaagtttgggcagagggccctggatttctacagcattcatgtgaccaaggagtccacccaccccgtgaagcccctggcccagatcgccggaaacagatacgcctccggacctgtgggaaaggccctgagcgacgcatgtatgggcacaatcgcctccttcctgtctaagtaccaggacatcatcatcgaacaccagaaggtggtgaagggcaaccagaagagactggagagcctgcgggagctggccggcaaggaaaacctggaataccctagcgtgaccctgccacctcagcctcacaccaaggagggcgttgatgcctacaacgaagtgatcgcccgggtgcgaatgtgggtgaacctgaacctgtggcagaagctgaagctaagcagagatgatgccaagcctctgctgagactgaagggattcccttcctttcctctggtcgagagacaggccaacgaagtggactggtgggacatggtgtgtaacgtgaagaagctgatcaacgagaaaaaggaggatggcaaggtgttttggcagaatctggctggctacaagagacaggaagccctgagaccatacctgagcagcgaggaagatcggaagaagggaaagaaattcgctcggtaccagctgggcgacctgctgctgcacctggaaaagaagcacggcgaggactggggaaaggtgtacgacgaggcctgggagcggattgacaagaaagtggaaggcctgagcaagcacatcaagctggaagaggaacggagaagcgaggacgcccagagcaaggccgccctgaccgactggctgcgggctaaggccagcttcgtgatcgagggcctgaaggaggccgacaaggacgagttctgcagatgcgagctgaagctgcagaagtggtacggggacctgcggggaaagcccttcgccatcgaagccgagaacagcatcctggacatcagcggcttcagcaagcagtacaactgtgccttcatctggcagaaggacggcgtgaagaagctgaacctgtacctgatcatcaactacttcaagggcggcaagctgcggttcaagaagatcaaacctgaagccttcgaagccaacagattctacaccgtgatcaacaaaaagagcggcgagatcgtgcccatggaggtgaacttcaacttcgacgaccccaacctgatcatcctgcctctggcctttggcaagagacagggcagagaattcatctggaacgacctgctgtccctggaaaccggcagcctgaagctggccaacggaagagtgatcgagaagacactgtacaacagaagaacccggcaggatgagcctgccctgttcgtggccctgaccttcgagcggcgggaggtcctggactcctccaatatcaaaccaatgaacctgatcggcgtggcaagaggcgaaaacatccccgccgtgatcgccctgaccgaccccgagggctgcccactgagccggtttaaggatagcctgggaaacccaacccacatcctgagaatcggcgagagctataaggagaagcagcggaccatccaggccaagaaggaggtggagcagcggagagccggcggctacagccggaagtacgccagcaaagccaagaatctggcagacgatatggtgagaaacaccgctagagatctgctgtactacgccgtgacccaggatgccatgctgatcttcgccaacctgagccggggcttcggccggcagggcaagcggaccttcatggccgagagacagtacacacggatggaggactggctgaccgccaagctggcctacgagggcctgagcaagacctacctgtccaagacactggcccagtacacctccaagacatgcagcaactgtgggtttaccatcaccagcgccgactacgacagggtgctggagaagctgaagaagacagcaacaggctggatgaccacaattaacggcaaggagctgaaggtggagggccagattacctactacaacagatacaagagacagaacgtagtcaaggacctgtccgtcgagctggatagactgagcgaagaatctgtgaacaacgacatctcctcctggacaaagggcagaagcggagaagctctgagcctcctgaagaaaagattctcccatagacccgtgcaggagaagttcgtgtgcctgaactgcggcttcgagacacacgcagccgagcaagccgccctgaacatcgccagatcctggctgttcctgcggagccaggagtacaagaaataccagacaaacaagacaaccggcaacaccgataagagagccttcgtcgagacctggcagtccttttaccggaagaagcttaaggaggtgtggaaacctgccgtgcggtctggcggatctggcggaggctccaccagccccaagaaaaagagaaaagtctaagctgccttctgcggggcttgccttctggccatgcccttcttctctcccttgcacctgtacctcttggtctttgaataaagcctgagtaggaaggctagcaaaaaaaaaaaaaaaaaaaaaaaaaaaaaaaaaaaaaaaaaaaaaaaaaaaaaaaaaaaaaaaaaaaaaaaaaaaaaaaa

SEQ ID NO: 10378 - RNA, 8787 nt, synthetic construct
  source 1..8787: mol_type = other RNA
aggaaataagagagaaaagaagagtaagaagaaatataagagccaccatggcccctaagaagaagcgtaaagtgagccggatgaaccacgaccaggagttcgacccccctaaggtgtaccctcccgtccccgccgagaagagaaagcccatccgggtcctgagcctgttcgatggcatcgccaccggtctgctggtgctgaaggacctgggcatccaggtggataggtacattgcctccgaggtgtgcgaggactccatcaccgtgggaatggtgcgtcatcagggcaagatcatgtacgtgggcgacgtgcggagcgtgacacagaagcatatccaggagtggggccctttcgacctggtgatcggcggcagcccttgcaatgacctgagcatcgtgaacccagcccggaagggcctgtacgagggaaccggcagactgttcttcgagttttacagactgctgcacgacgcccggcctaaggaaggcgacgaccggcccttcttttggctgttcgagaatgtggtggccatgggagtcagcgacaagcgggatattagccggttcctggagagcaaccccgtgatgatcgatgccaaggaagtgagcgccgcccaccgggccagatacttctggggcaatctgcctggcatgaacagacccctggccagcaccgtgaacgacaagctggagctgcaggagtgcctggagcacggccggatcgccaagttcagcaaggtgagaaccatcaccacccgaagcaacagcatcaaacaaggcaaggaccagcactttcctgtgttcatgaacgagaaggaggacatcctgtggtgtaccgagatggagagagtgttcgggttcccagtccactacacagatgtcagcaacatgtctagactggccagacagagactgctgggaagaagctggtccgtccctgtgatcagacacctgttcgcccctctgaaggagtacttcgcctgcgtgagcagcggcaacagcaacgccaacagccggggccccagcttctctagcggcctggtgccactgtccctgagagggagccacatgggccccatggagatctacaaaaccgtgagcgcctggaagcggcagcctgtgcgcgtgctgagcctgtttcggaatatcgataaagtcctgaaaagcctgggattcctggagagcggctctggctccggcggtggcaccctgaagtacgtggaggatgtgacaaacgtggtcagacgggatgtggagaagtggggccccttcgatctggtgtacggcagcacccaacccctgggcagctcttgtgaccggtgccctggctggtacatgtttcagttccaccggatcctgcagtacgccctgccgagacaggagtcccagcggccattcttttggattttcatggacaacttgctgctgaccgaggatgaccaggaaactaccactcggttcctgcagaccgaagccgtgaccctgcaggacgtgagaggccgggactaccagaacgccatgcgggtgtggtccaacatccctggactgaaaagcaagcacgcacctctgacccctaaagaagaggagtacctgcaggcccaggtgcggagcagaagcaagctggacgcccctaaggtggatctgctggtgaagaattgcctcctgcccctgagagagtacttcaagtatttcagccagaatagtctgcccctgggaggcagcggcggcggcagcaaggacctggtgaccttcggcgacgtggccgtgaacttcagccaggaggagtgggagtggctgaaccccgcccagaggaacctgtacaggagggtgatgctggagaactacaggagcctggtgagcctgggcgtgagcgtgagcaagcccgacgtgatcagcctgctggagcagggcaaggagccctggatggtgaagaaggagggcaccaggggcgcctgccccgactgggagtacgtgggcggcccaagcagcggcgcccctcctcccagcggcggcaggcggcccaagcagcggcgcccctcctcccagcggcggcagcccagccggctccccaacctctaccgaggagggcacctctgagtccgccacccccgagagcggccctggcacctccaccgagcccagcgagggcagcgcacccggcagccctgccggcagccccacctccacagaggagggaaccagcaccgagcccagcgaaggcagcgccccaggcaccagcaccgagcctagtgagcaggagattaaacggatcaacaagatcagaagaagacttgtgaaagacagcaacaccaagaaggccggcaagacaggccccatgaaaaccctgctggttagagtgatgacacccgatctgagagagcggctggaaaacctgagaaagaagcctgaaaatatcccccagcccatcagcaatacatctagagccaacctgaataagctgctgaccgattacaccgaaatgaagaaggcgatcctgcatgtgtactgggaagagttccagaaggaccctgtgggcctgatgagccgggtggcccagcctgccagcaagaagatcgatcagaacaagctgaaacctgagatggacgagaagggcaacctgaccaccgccggctttgcctgctctcagtgtggccagcccctgttcgtgtacaagctggagcaggtgtctgagaagggcaaggcttacaccaactacttcggacggtgcaatgtggccgagcacgaaaagctgatcctgctggcccagctgaagcccgagaaggatagcgacgaagccgtgacatatagcctgggaaagtttgggcagagggccctggatttctacagcattcatgtgaccaaggagtccacccaccccgtgaagcccctggcccagatcgccggaaacagatacgcctccggacctgtgggaaaggccctgagcgacgcatgtatgggcacaatcgcctccttcctgtctaagtaccaggacatcatcatcgaacaccagaaggtggtgaagggcaaccagaagagactggagagcctgcgggagctggccggcaaggaaaacctggaataccctagcgtgaccctgccacctcagcctcacaccaaggagggcgttgatgcctacaacgaagtgatcgcccgggtgcgaatgtgggtgaacctgaacctgtggcagaagctgaagctaagcagagatgatgccaagcctctgctgagactgaagggattcccttcctttcctctggtcgagagacaggccaacgaagtggactggtgggacatggtgtgtaacgtgaagaagctgatcaacgagaaaaaggaggatggcaaggtgttttggcagaatctggctggctacaagagacaggaagccctgagaccatacctgagcagcgaggaagatcggaagaagggaaagaaattcgctcggtaccagctgggcgacctgctgctgcacctggaaaagaagcacggcgaggactggggaaaggtgtacgacgaggcctgggagcggattgacaagaaagtggaaggcctgagcaagcacatcaagctggaagaggaacggagaagcgaggacgcccagagcaaggccgccctgaccgactggctgcgggctaaggccagcttcgtgatcgagggcctgaaggaggccgacaaggacgagttctgcagatgcgagctgaagctgcagaagtggtacggggacctgcggggaaagcccttcgccatcgaagccgagaacagcatcctggacatcagcggcttcagcaagcagtacaactgtgccttcatctggcagaaggacggcgtgaagaagctgaacctgtacctgatcatcaactacttcaagggcggcaagctgcggttcaagaagatcaaacctgaagccttcgaagccaacagattctacaccgtgatcaacaaaaagagcggcgagatcgtgcccatggaggtgaacttcaacttcgacgaccccaacctgatcatcctgcctctggcctttggcaagagacagggcagagaattcatctggaacgacctgctgtccctggaaaccggcagcctgaagctggccaacggaagagtgatcgagaagacactgtacaacagaagaacccggcaggatgagcctgccctgttcgtggccctgaccttcgagcggcgggaggtcctggactcctccaatatcaaaccaatgaacctgatcggcgtggcaagaggcgaaaacatccccgccgtgatcgccctgaccgaccccgagggctgcccactgagccggtttaaggatagcctgggaaacccaacccacatcctgagaatcggcgagagctataaggagaagcagcggaccatccaggccaagaaggaggtggagcagcggagagccggcggctacagccggaagtacgccagcaaagccaagaatctggcagacgatatggtgagaaacaccgctagagatctgctgtactacgccgtgacccaggatgccatgctgatcttcgccaacctgagccggggcttcggccggcagggcaagcggaccttcatggccgagagacagtacacacggatggaggactggctgaccgccaagctggcctacgagggcctgagcaagacctacctgtccaagacactggcccagtacacctccaagacatgcagcaactgtgggtttaccatcaccagcgccgactacgacagggtgctggagaagctgaagaagacagcaacaggctggatgaccacaattaacggcaaggagctgaaggtggagggccagattacctactacaacagatacaagagacagaacgtagtcaaggacctgtccgtcgagctggatagactgagcgaagaatctgtgaacaacgacatctcctcctggacaaagggcagaagcggagaagctctgagcctcctgaagaaaagattctcccatagacccgtgcaggagaagttcgtgtgcctgaactgcggcttcgagacacacgcagccgagcaagccgccctgaacatcgccagatcctggctgttcctgcggagccaggagtacaagaaataccagacaaacaagacaaccggcaacaccgataagagagccttcgtcgagacctggcagtccttttaccggaagaagcttaaggaggtgtggaaacctgccgtgcggtctggcggatctggcggaggctccaccagccccaagaaaaagagaaaagtctaagctgccttctgcggggcttgccttctggccatgcccttcttctctcccttgcacctgtacctcttggtctttgaataaagcctgagtaggaaggctagcaaaaaaaaaaaaaaaaaaaaaaaaaaaaaaaaaaaaaaaaaaaaaaaaaaaaaaaaaaaaaaaaaaaaaaaaaaaaaaaagcccagccggctccccaacctctaccgaggagggcacctctgagtccgccacccccgagagcggccctggcacctccaccgagcccagcgagggcagcgcacccggcagccctgccggcagccccacctccacagaggagggaaccagcaccgagcccagcgaaggcagcgccccaggcaccagcaccgagcctagtgagcaggagattaaacggatcaacaagatcagaagaagacttgtgaaagacagcaacaccaagaaggccggcaagacaggccccatgaaaaccctgctggttagagtgatgacacccgatctgagagagcggctggaaaacctgagaaagaagcctgaaaatatcccccagcccatcagcaatacatctagagccaacctgaataagctgctgaccgattacaccgaaatgaagaaggcgatcctgcatgtgtactgggaagagttccagaaggaccctgtgggcctgatgagccgggtggcccagcctgccagcaagaagatcgatcagaacaagctgaaacctgagatggacgagaagggcaacctgaccaccgccggctttgcctgctctcagtgtggccagcccctgttcgtgtacaagctggagcaggtgtctgagaagggcaaggcttacaccaactacttcggacggtgcaatgtggccgagcacgaaaagctgatcctgctggcccagctgaagcccgagaaggatagcgacgaagccgtgacatatagcctgggaaagtttgggcagagggccctggatttctacagcattcatgtgaccaaggagtccacccaccccgtgaagcccctggcccagatcgccggaaacagatacgcctccggacctgtgggaaaggccctgagcgacgcatgtatgggcacaatcgcctccttcctgtctaagtaccaggacatcatcatcgaacaccagaaggtggtgaagggcaaccagaagagactggagagcctgcgggagctggccggcaaggaaaacctggaataccctagcgtgaccctgccacctcagcctcacaccaaggagggcgttgatgcctacaacgaagtgatcgcccgggtgcgaatgtgggtgaacctgaacctgtggcagaagctgaagctaagcagagatgatgccaagcctctgctgagactgaagggattcccttcctttcctctggtcgagagacaggccaacgaagtggactggtgggacatggtgtgtaacgtgaagaagctgatcaacgagaaaaaggaggatggcaaggtgttttggcagaatctggctggctacaagagacaggaagccctgagaccatacctgagcagcgaggaagatcggaagaagggaaagaaattcgctcggtaccagctgggcgacctgctgctgcacctggaaaagaagcacggcgaggactggggaaaggtgtacgacgaggcctgggagcggattgacaagaaagtggaaggcctgagcaagcacatcaagctggaagaggaacggagaagcgaggacgcccagagcaaggccgccctgaccgactggctgcgggctaaggccagcttcgtgatcgagggcctgaaggaggccgacaaggacgagttctgcagatgcgagctgaagctgcagaagtggtacggggacctgcggggaaagcccttcgccatcgaagccgagaacagcatcctggacatcagcggcttcagcaagcagtacaactgtgccttcatctggcagaaggacggcgtgaagaagctgaacctgtacctgatcatcaactacttcaagggcggcaagctgcggttcaagaagatcaaacctgaagccttcgaagccaacagattctacaccgtgatcaacaaaaagagcggcgagatcgtgcccatggaggtgaacttcaacttcgacgaccccaacctgatcatcctgcctctggcctttggcaagagacagggcagagaattcatctggaacgacctgctgtccctggaaaccggcagcctgaagctggccaacggaagagtgatcgagaagacactgtacaacagaagaacccggcaggatgagcctgccctgttcgtggccctgaccttcgagcggcgggaggtcctggactcctccaatatcaaaccaatgaacctgatcggcgtggcaagaggcgaaaacatccccgccgtgatcgccctgaccgaccccgagggctgcccactgagccggtttaaggatagcctgggaaacccaacccacatcctgagaatcggcgagagctataaggagaagcagcggaccatccaggccaagaaggaggtggagcagcggagagccggcggctacagccggaagtacgccagcaaagccaagaatctggcagacgatatggtgagaaacaccgctagagatctgctgtactacgccgtgacccaggatgccatgctgatcttcgccaacctgagccggggcttcggccggcagggcaagcggaccttcatggccgagagacagtacacacggatggaggactggctgaccgccaagctggcctacgagggcctgagcaagacctacctgtccaagacactggcccagtacacctccaagacatgcagcaactgtgggtttaccatcaccagcgccgactacgacagggtgctggagaagctgaagaagacagcaacaggctggatgaccacaattaacggcaaggagctgaaggtggagggccagattacctactacaacagatacaagagacagaacgtagtcaaggacctgtccgtcgagctggatagactgagcgaagaatctgtgaacaacgacatctcctcctggacaaagggcagaagcggagaagctctgagcctcctgaagaaaagattctcccatagacccgtgcaggagaagttcgtgtgcctgaactgcggcttcgagacacacgcagccgagcaagccgccctgaacatcgccagatcctggctgttcctgcggagccaggagtacaagaaataccagacaaacaagacaaccggcaacaccgataagagagccttcgtcgagacctggcagtccttttaccggaagaagcttaaggaggtgtggaaacctgccgtgcggtctggcggatctggcggaggctccaccagccccaagaaaaagagaaaagtctaagctgccttctgcggggcttgccttctggccatgcccttcttctctcccttgcacctgtacctcttggtctttgaataaagcctgagtaggaaggctagcaaaaaaaaaaaaaaaaaaaaaaaaaaaaaaaaaaaaaaaaaaaaaaaaaaaaaaaaaaaaaaaaaaaaaaaaaaaaaaaa

SEQ ID NO: 10379 - RNA, 8787 nt, synthetic construct
  source 1..8787: mol_type = other RNA
aggaaataagagagaaaagaagagtaagaagaaatataagagccaccatggcccctaagaagaagcgtaaagtgagccggatgaaccacgaccaggagttcgacccccctaaggtgtaccctcccgtccccgccgagaagagaaagcccatccgggtcctgagcctgttcgatggcatcgccaccggtctgctggtgctgaaggacctgggcatccaggtggataggtacattgcctccgaggtgtgcgaggactccatcaccgtgggaatggtgcgtcatcagggcaagatcatgtacgtgggcgacgtgcggagcgtgacacagaagcatatccaggagtggggccctttcgacctggtgatcggcggcagcccttgcaatgacctgagcatcgtgaacccagcccggaagggcctgtacgagggaaccggcagactgttcttcgagttttacagactgctgcacgacgcccggcctaaggaaggcgacgaccggcccttcttttggctgttcgagaatgtggtggccatgggagtcagcgacaagcgggatattagccggttcctggagagcaaccccgtgatgatcgatgccaaggaagtgagcgccgcccaccgggccagatacttctggggcaatctgcctggcatgaacagacccctggccagcaccgtgaacgacaagctggagctgcaggagtgcctggagcacggccggatcgccaagttcagcaaggtgagaaccatcaccacccgaagcaacagcatcaaacaaggcaaggaccagcactttcctgtgttcatgaacgagaaggaggacatcctgtggtgtaccgagatggagagagtgttcgggttcccagtccactacacagatgtcagcaacatgtctagactggccagacagagactgctgggaagaagctggtccgtccctgtgatcagacacctgttcgcccctctgaaggagtacttcgcctgcgtgagcagcggcaacagcaacgccaacagccggggccccagcttctctagcggcctggtgccactgtccctgagagggagccacatgggccccatggagatctacaaaaccgtgagcgcctggaagcggcagcctgtgcgcgtgctgagcctgtttcggaatatcgataaagtcctgaaaagcctgggattcctggagagcggctctggctccggcggtggcaccctgaagtacgtggaggatgtgacaaacgtggtcagacgggatgtggagaagtggggccccttcgatctggtgtacggcagcacccaacccctgggcagctcttgtgaccggtgccctggctggtacatgtttcagttccaccggatcctgcagtacgccctgccgagacaggagtcccagcggccattcttttggattttcatggacaacttgctgctgaccgaggatgaccaggaaactaccactcggttcctgcagaccgaagccgtgaccctgcaggacgtgagaggccgggactaccagaacgccatgcgggtgtggtccaacatccctggactgaaaagcaagcacgcacctctgacccctaaagaagaggagtacctgcaggcccaggtgcggagcagaagcaagctggacgcccctaaggtggatctgctggtgaagaattgcctcctgcccctgagagagtacttcaagtatttcagccagaatagtctgcccctgggaggcagcggcggcggccaggtgcccgtgaccttcgaggacatcaccgtgtacttcagcagggagcagtgggagtacctggacgagggccagaaggagctgtacagggaggtgatgaaggagaactacgagaccctgatcagcctgggcaccggccccgagggcttcaaccccgaggtgctggccaggatcaagctggaggaggagagccacgtgtgggaccccaaggagcccggccagaaggaggtgaccaggagctacggcggcccaagcagcggcgcccctcctcccagcggcggcaggcggcccaagcagcggcgcccctcctcccagcggcggcagcccagccggctccccaacctctaccgaggagggcacctctgagtccgccacccccgagagcggccctggcacctccaccgagcccagcgagggcagcgcacccggcagccctgccggcagccccacctccacagaggagggaaccagcaccgagcccagcgaaggcagcgccccaggcaccagcaccgagcctagtgagcaggagattaaacggatcaacaagatcagaagaagacttgtgaaagacagcaacaccaagaaggccggcaagacaggccccatgaaaaccctgctggttagagtgatgacacccgatctgagagagcggctggaaaacctgagaaagaagcctgaaaatatcccccagcccatcagcaatacatctagagccaacctgaataagctgctgaccgattacaccgaaatgaagaaggcgatcctgcatgtgtactgggaagagttccagaaggaccctgtgggcctgatgagccgggtggcccagcctgccagcaagaagatcgatcagaacaagctgaaacctgagatggacgagaagggcaacctgaccaccgccggctttgcctgctctcagtgtggccagcccctgttcgtgtacaagctggagcaggtgtctgagaagggcaaggcttacaccaactacttcggacggtgcaatgtggccgagcacgaaaagctgatcctgctggcccagctgaagcccgagaaggatagcgacgaagccgtgacatatagcctgggaaagtttgggcagagggccctggatttctacagcattcatgtgaccaaggagtccacccaccccgtgaagcccctggcccagatcgccggaaacagatacgcctccggacctgtgggaaaggccctgagcgacgcatgtatgggcacaatcgcctccttcctgtctaagtaccaggacatcatcatcgaacaccagaaggtggtgaagggcaaccagaagagactggagagcctgcgggagctggccggcaaggaaaacctggaataccctagcgtgaccctgccacctcagcctcacaccaaggagggcgttgatgcctacaacgaagtgatcgcccgggtgcgaatgtgggtgaacctgaacctgtggcagaagctgaagctaagcagagatgatgccaagcctctgctgagactgaagggattcccttcctttcctctggtcgagagacaggccaacgaagtggactggtgggacatggtgtgtaacgtgaagaagctgatcaacgagaaaaaggaggatggcaaggtgttttggcagaatctggctggctacaagagacaggaagccctgagaccatacctgagcagcgaggaagatcggaagaagggaaagaaattcgctcggtaccagctgggcgacctgctgctgcacctggaaaagaagcacggcgaggactggggaaaggtgtacgacgaggcctgggagcggattgacaagaaagtggaaggcctgagcaagcacatcaagctggaagaggaacggagaagcgaggacgcccagagcaaggccgccctgaccgactggctgcgggctaaggccagcttcgtgatcgagggcctgaaggaggccgacaaggacgagttctgcagatgcgagctgaagctgcagaagtggtacggggacctgcggggaaagcccttcgccatcgaagccgagaacagcatcctggacatcagcggcttcagcaagcagtacaactgtgccttcatctggcagaaggacggcgtgaagaagctgaacctgtacctgatcatcaactacttcaagggcggcaagctgcggttcaagaagatcaaacctgaagccttcgaagccaacagattctacaccgtgatcaacaaaaagagcggcgagatcgtgcccatggaggtgaacttcaacttcgacgaccccaacctgatcatcctgcctctggcctttggcaagagacagggcagagaattcatctggaacgacctgctgtccctggaaaccggcagcctgaagctggccaacggaagagtgatcgagaagacactgtacaacagaagaacccggcaggatgagcctgccctgttcgtggccctgaccttcgagcggcgggaggtcctggactcctccaatatcaaaccaatgaacctgatcggcgtggcaagaggcgaaaacatccccgccgtgatcgccctgaccgaccccgagggctgcccactgagccggtttaaggatagcctgggaaacccaacccacatcctgagaatcggcgagagctataaggagaagcagcggaccatccaggccaagaaggaggtggagcagcggagagccggcggctacagccggaagtacgccagcaaagccaagaatctggcagacgatatggtgagaaacaccgctagagatctgctgtactacgccgtgacccaggatgccatgctgatcttcgccaacctgagccggggcttcggccggcagggcaagcggaccttcatggccgagagacagtacacacggatggaggactggctgaccgccaagctggcctacgagggcctgagcaagacctacctgtccaagacactggcccagtacacctccaagacatgcagcaactgtgggtttaccatcaccagcgccgactacgacagggtgctggagaagctgaagaagacagcaacaggctggatgaccacaattaacggcaaggagctgaaggtggagggccagattacctactacaacagatacaagagacagaacgtagtcaaggacctgtccgtcgagctggatagactgagcgaagaatctgtgaacaacgacatctcctcctggacaaagggcagaagcggagaagctctgagcctcctgaagaaaagattctcccatagacccgtgcaggagaagttcgtgtgcctgaactgcggcttcgagacacacgcagccgagcaagccgccctgaacatcgccagatcctggctgttcctgcggagccaggagtacaagaaataccagacaaacaagacaaccggcaacaccgataagagagccttcgtcgagacctggcagtccttttaccggaagaagcttaaggaggtgtggaaacctgccgtgcggtctggcggatctggcggaggctccaccagccccaagaaaaagagaaaagtctaagctgccttctgcggggcttgccttctggccatgcccttcttctctcccttgcacctgtacctcttggtctttgaataaagcctgagtaggaaggctagcaaaaaaaaaaaaaaaaaaaaaaaaaaaaaaaaaaaaaaaaaaaaaaaaaaaaaaaaaaaaaaaaaaaaaaaaaaaaaaaagcccagccggctccccaacctctaccgaggagggcacctctgagtccgccacccccgagagcggccctggcacctccaccgagcccagcgagggcagcgcacccggcagccctgccggcagccccacctccacagaggagggaaccagcaccgagcccagcgaaggcagcgccccaggcaccagcaccgagcctagtgagcaggagattaaacggatcaacaagatcagaagaagacttgtgaaagacagcaacaccaagaaggccggcaagacaggccccatgaaaaccctgctggttagagtgatgacacccgatctgagagagcggctggaaaacctgagaaagaagcctgaaaatatcccccagcccatcagcaatacatctagagccaacctgaataagctgctgaccgattacaccgaaatgaagaaggcgatcctgcatgtgtactgggaagagttccagaaggaccctgtgggcctgatgagccgggtggcccagcctgccagcaagaagatcgatcagaacaagctgaaacctgagatggacgagaagggcaacctgaccaccgccggctttgcctgctctcagtgtggccagcccctgttcgtgtacaagctggagcaggtgtctgagaagggcaaggcttacaccaactacttcggacggtgcaatgtggccgagcacgaaaagctgatcctgctggcccagctgaagcccgagaaggatagcgacgaagccgtgacatatagcctgggaaagtttgggcagagggccctggatttctacagcattcatgtgaccaaggagtccacccaccccgtgaagcccctggcccagatcgccggaaacagatacgcctccggacctgtgggaaaggccctgagcgacgcatgtatgggcacaatcgcctccttcctgtctaagtaccaggacatcatcatcgaacaccagaaggtggtgaagggcaaccagaagagactggagagcctgcgggagctggccggcaaggaaaacctggaataccctagcgtgaccctgccacctcagcctcacaccaaggagggcgttgatgcctacaacgaagtgatcgcccgggtgcgaatgtgggtgaacctgaacctgtggcagaagctgaagctaagcagagatgatgccaagcctctgctgagactgaagggattcccttcctttcctctggtcgagagacaggccaacgaagtggactggtgggacatggtgtgtaacgtgaagaagctgatcaacgagaaaaaggaggatggcaaggtgttttggcagaatctggctggctacaagagacaggaagccctgagaccatacctgagcagcgaggaagatcggaagaagggaaagaaattcgctcggtaccagctgggcgacctgctgctgcacctggaaaagaagcacggcgaggactggggaaaggtgtacgacgaggcctgggagcggattgacaagaaagtggaaggcctgagcaagcacatcaagctggaagaggaacggagaagcgaggacgcccagagcaaggccgccctgaccgactggctgcgggctaaggccagcttcgtgatcgagggcctgaaggaggccgacaaggacgagttctgcagatgcgagctgaagctgcagaagtggtacggggacctgcggggaaagcccttcgccatcgaagccgagaacagcatcctggacatcagcggcttcagcaagcagtacaactgtgccttcatctggcagaaggacggcgtgaagaagctgaacctgtacctgatcatcaactacttcaagggcggcaagctgcggttcaagaagatcaaacctgaagccttcgaagccaacagattctacaccgtgatcaacaaaaagagcggcgagatcgtgcccatggaggtgaacttcaacttcgacgaccccaacctgatcatcctgcctctggcctttggcaagagacagggcagagaattcatctggaacgacctgctgtccctggaaaccggcagcctgaagctggccaacggaagagtgatcgagaagacactgtacaacagaagaacccggcaggatgagcctgccctgttcgtggccctgaccttcgagcggcgggaggtcctggactcctccaatatcaaaccaatgaacctgatcggcgtggcaagaggcgaaaacatccccgccgtgatcgccctgaccgaccccgagggctgcccactgagccggtttaaggatagcctgggaaacccaacccacatcctgagaatcggcgagagctataaggagaagcagcggaccatccaggccaagaaggaggtggagcagcggagagccggcggctacagccggaagtacgccagcaaagccaagaatctggcagacgatatggtgagaaacaccgctagagatctgctgtactacgccgtgacccaggatgccatgctgatcttcgccaacctgagccggggcttcggccggcagggcaagcggaccttcatggccgagagacagtacacacggatggaggactggctgaccgccaagctggcctacgagggcctgagcaagacctacctgtccaagacactggcccagtacacctccaagacatgcagcaactgtgggtttaccatcaccagcgccgactacgacagggtgctggagaagctgaagaagacagcaacaggctggatgaccacaattaacggcaaggagctgaaggtggagggccagattacctactacaacagatacaagagacagaacgtagtcaaggacctgtccgtcgagctggatagactgagcgaagaatctgtgaacaacgacatctcctcctggacaaagggcagaagcggagaagctctgagcctcctgaagaaaagattctcccatagacccgtgcaggagaagttcgtgtgcctgaactgcggcttcgagacacacgcagccgagcaagccgccctgaacatcgccagatcctggctgttcctgcggagccaggagtacaagaaataccagacaaacaagacaaccggcaacaccgataagagagccttcgtcgagacctggcagtccttttaccggaagaagcttaaggaggtgtggaaacctgccgtgcggtctggcggatctggcggaggctccaccagccccaagaaaaagagaaaagtctaagctgccttctgcggggcttgccttctggccatgcccttcttctctcccttgcacctgtacctcttggtctttgaataaagcctgagtaggaaggctagcaaaaaaaaaaaaaaaaaaaaaaaaaaaaaaaaaaaaaaaaaaaaaaaaaaaaaaaaaaaaaaaaaaaaaaaaaaaaaaaa

SEQ ID NO: 10380 - RNA, 8787 nt, synthetic construct
  source 1..8787: mol_type = other RNA
aggaaataagagagaaaagaagagtaagaagaaatataagagccaccatggcccctaagaagaagcgtaaagtgagccggatgaaccacgaccaggagttcgacccccctaaggtgtaccctcccgtccccgccgagaagagaaagcccatccgggtcctgagcctgttcgatggcatcgccaccggtctgctggtgctgaaggacctgggcatccaggtggataggtacattgcctccgaggtgtgcgaggactccatcaccgtgggaatggtgcgtcatcagggcaagatcatgtacgtgggcgacgtgcggagcgtgacacagaagcatatccaggagtggggccctttcgacctggtgatcggcggcagcccttgcaatgacctgagcatcgtgaacccagcccggaagggcctgtacgagggaaccggcagactgttcttcgagttttacagactgctgcacgacgcccggcctaaggaaggcgacgaccggcccttcttttggctgttcgagaatgtggtggccatgggagtcagcgacaagcgggatattagccggttcctggagagcaaccccgtgatgatcgatgccaaggaagtgagcgccgcccaccgggccagatacttctggggcaatctgcctggcatgaacagacccctggccagcaccgtgaacgacaagctggagctgcaggagtgcctggagcacggccggatcgccaagttcagcaaggtgagaaccatcaccacccgaagcaacagcatcaaacaaggcaaggaccagcactttcctgtgttcatgaacgagaaggaggacatcctgtggtgtaccgagatggagagagtgttcgggttcccagtccactacacagatgtcagcaacatgtctagactggccagacagagactgctgggaagaagctggtccgtccctgtgatcagacacctgttcgcccctctgaaggagtacttcgcctgcgtgagcagcggcaacagcaacgccaacagccggggccccagcttctctagcggcctggtgccactgtccctgagagggagccacatgggccccatggagatctacaaaaccgtgagcgcctggaagcggcagcctgtgcgcgtgctgagcctgtttcggaatatcgataaagtcctgaaaagcctgggattcctggagagcggctctggctccggcggtggcaccctgaagtacgtggaggatgtgacaaacgtggtcagacgggatgtggagaagtggggccccttcgatctggtgtacggcagcacccaacccctgggcagctcttgtgaccggtgccctggctggtacatgtttcagttccaccggatcctgcagtacgccctgccgagacaggagtcccagcggccattcttttggattttcatggacaacttgctgctgaccgaggatgaccaggaaactaccactcggttcctgcagaccgaagccgtgaccctgcaggacgtgagaggccgggactaccagaacgccatgcgggtgtggtccaacatccctggactgaaaagcaagcacgcacctctgacccctaaagaagaggagtacctgcaggcccaggtgcggagcagaagcaagctggacgcccctaaggtggatctgctggtgaagaattgcctcctgcccctgagagagtacttcaagtatttcagccagaatagtctgcccctgggaggcagcggcggcggcttccagggcagcgtgatgttcagggacgtgagcatcaacttcagccaggaggagtgggagtgcctggaccccggccagatgaacctgtacaaggaggtgatgctggagaacttcagcaacctggtgagcgtgggcctgagcagcgccaagcccgtggtgatcagcctgctggaggagggcaaggagccctggatggtggagagggaggtgaagaggggcctgtgcagcgacctggagagcatgggcggcccaagcagcggcgcccctcctcccagcggcggcaggcggcccaagcagcggcgcccctcctcccagcggcggcagcccagccggctccccaacctctaccgaggagggcacctctgagtccgccacccccgagagcggccctggcacctccaccgagcccagcgagggcagcgcacccggcagccctgccggcagccccacctccacagaggagggaaccagcaccgagcccagcgaaggcagcgccccaggcaccagcaccgagcctagtgagcaggagattaaacggatcaacaagatcagaagaagacttgtgaaagacagcaacaccaagaaggccggcaagacaggccccatgaaaaccctgctggttagagtgatgacacccgatctgagagagcggctggaaaacctgagaaagaagcctgaaaatatcccccagcccatcagcaatacatctagagccaacctgaataagctgctgaccgattacaccgaaatgaagaaggcgatcctgcatgtgtactgggaagagttccagaaggaccctgtgggcctgatgagccgggtggcccagcctgccagcaagaagatcgatcagaacaagctgaaacctgagatggacgagaagggcaacctgaccaccgccggctttgcctgctctcagtgtggccagcccctgttcgtgtacaagctggagcaggtgtctgagaagggcaaggcttacaccaactacttcggacggtgcaatgtggccgagcacgaaaagctgatcctgctggcccagctgaagcccgagaaggatagcgacgaagccgtgacatatagcctgggaaagtttgggcagagggccctggatttctacagcattcatgtgaccaaggagtccacccaccccgtgaagcccctggcccagatcgccggaaacagatacgcctccggacctgtgggaaaggccctgagcgacgcatgtatgggcacaatcgcctccttcctgtctaagtaccaggacatcatcatcgaacaccagaaggtggtgaagggcaaccagaagagactggagagcctgcgggagctggccggcaaggaaaacctggaataccctagcgtgaccctgccacctcagcctcacaccaaggagggcgttgatgcctacaacgaagtgatcgcccgggtgcgaatgtgggtgaacctgaacctgtggcagaagctgaagctaagcagagatgatgccaagcctctgctgagactgaagggattcccttcctttcctctggtcgagagacaggccaacgaagtggactggtgggacatggtgtgtaacgtgaagaagctgatcaacgagaaaaaggaggatggcaaggtgttttggcagaatctggctggctacaagagacaggaagccctgagaccatacctgagcagcgaggaagatcggaagaagggaaagaaattcgctcggtaccagctgggcgacctgctgctgcacctggaaaagaagcacggcgaggactggggaaaggtgtacgacgaggcctgggagcggattgacaagaaagtggaaggcctgagcaagcacatcaagctggaagaggaacggagaagcgaggacgcccagagcaaggccgccctgaccgactggctgcgggctaaggccagcttcgtgatcgagggcctgaaggaggccgacaaggacgagttctgcagatgcgagctgaagctgcagaagtggtacggggacctgcggggaaagcccttcgccatcgaagccgagaacagcatcctggacatcagcggcttcagcaagcagtacaactgtgccttcatctggcagaaggacggcgtgaagaagctgaacctgtacctgatcatcaactacttcaagggcggcaagctgcggttcaagaagatcaaacctgaagccttcgaagccaacagattctacaccgtgatcaacaaaaagagcggcgagatcgtgcccatggaggtgaacttcaacttcgacgaccccaacctgatcatcctgcctctggcctttggcaagagacagggcagagaattcatctggaacgacctgctgtccctggaaaccggcagcctgaagctggccaacggaagagtgatcgagaagacactgtacaacagaagaacccggcaggatgagcctgccctgttcgtggccctgaccttcgagcggcgggaggtcctggactcctccaatatcaaaccaatgaacctgatcggcgtggcaagaggcgaaaacatccccgccgtgatcgccctgaccgaccccgagggctgcccactgagccggtttaaggatagcctgggaaacccaacccacatcctgagaatcggcgagagctataaggagaagcagcggaccatccaggccaagaaggaggtggagcagcggagagccggcggctacagccggaagtacgccagcaaagccaagaatctggcagacgatatggtgagaaacaccgctagagatctgctgtactacgccgtgacccaggatgccatgctgatcttcgccaacctgagccggggcttcggccggcagggcaagcggaccttcatggccgagagacagtacacacggatggaggactggctgaccgccaagctggcctacgagggcctgagcaagacctacctgtccaagacactggcccagtacacctccaagacatgcagcaactgtgggtttaccatcaccagcgccgactacgacagggtgctggagaagctgaagaagacagcaacaggctggatgaccacaattaacggcaaggagctgaaggtggagggccagattacctactacaacagatacaagagacagaacgtagtcaaggacctgtccgtcgagctggatagactgagcgaagaatctgtgaacaacgacatctcctcctggacaaagggcagaagcggagaagctctgagcctcctgaagaaaagattctcccatagacccgtgcaggagaagttcgtgtgcctgaactgcggcttcgagacacacgcagccgagcaagccgccctgaacatcgccagatcctggctgttcctgcggagccaggagtacaagaaataccagacaaacaagacaaccggcaacaccgataagagagccttcgtcgagacctggcagtccttttaccggaagaagcttaaggaggtgtggaaacctgccgtgcggtctggcggatctggcggaggctccaccagccccaagaaaaagagaaaagtctaagctgccttctgcggggcttgccttctggccatgcccttcttctctcccttgcacctgtacctcttggtctttgaataaagcctgagtaggaaggctagcaaaaaaaaaaaaaaaaaaaaaaaaaaaaaaaaaaaaaaaaaaaaaaaaaaaaaaaaaaaaaaaaaaaaaaaaaaaaaaaagcccagccggctccccaacctctaccgaggagggcacctctgagtccgccacccccgagagcggccctggcacctccaccgagcccagcgagggcagcgcacccggcagccctgccggcagccccacctccacagaggagggaaccagcaccgagcccagcgaaggcagcgccccaggcaccagcaccgagcctagtgagcaggagattaaacggatcaacaagatcagaagaagacttgtgaaagacagcaacaccaagaaggccggcaagacaggccccatgaaaaccctgctggttagagtgatgacacccgatctgagagagcggctggaaaacctgagaaagaagcctgaaaatatcccccagcccatcagcaatacatctagagccaacctgaataagctgctgaccgattacaccgaaatgaagaaggcgatcctgcatgtgtactgggaagagttccagaaggaccctgtgggcctgatgagccgggtggcccagcctgccagcaagaagatcgatcagaacaagctgaaacctgagatggacgagaagggcaacctgaccaccgccggctttgcctgctctcagtgtggccagcccctgttcgtgtacaagctggagcaggtgtctgagaagggcaaggcttacaccaactacttcggacggtgcaatgtggccgagcacgaaaagctgatcctgctggcccagctgaagcccgagaaggatagcgacgaagccgtgacatatagcctgggaaagtttgggcagagggccctggatttctacagcattcatgtgaccaaggagtccacccaccccgtgaagcccctggcccagatcgccggaaacagatacgcctccggacctgtgggaaaggccctgagcgacgcatgtatgggcacaatcgcctccttcctgtctaagtaccaggacatcatcatcgaacaccagaaggtggtgaagggcaaccagaagagactggagagcctgcgggagctggccggcaaggaaaacctggaataccctagcgtgaccctgccacctcagcctcacaccaaggagggcgttgatgcctacaacgaagtgatcgcccgggtgcgaatgtgggtgaacctgaacctgtggcagaagctgaagctaagcagagatgatgccaagcctctgctgagactgaagggattcccttcctttcctctggtcgagagacaggccaacgaagtggactggtgggacatggtgtgtaacgtgaagaagctgatcaacgagaaaaaggaggatggcaaggtgttttggcagaatctggctggctacaagagacaggaagccctgagaccatacctgagcagcgaggaagatcggaagaagggaaagaaattcgctcggtaccagctgggcgacctgctgctgcacctggaaaagaagcacggcgaggactggggaaaggtgtacgacgaggcctgggagcggattgacaagaaagtggaaggcctgagcaagcacatcaagctggaagaggaacggagaagcgaggacgcccagagcaaggccgccctgaccgactggctgcgggctaaggccagcttcgtgatcgagggcctgaaggaggccgacaaggacgagttctgcagatgcgagctgaagctgcagaagtggtacggggacctgcggggaaagcccttcgccatcgaagccgagaacagcatcctggacatcagcggcttcagcaagcagtacaactgtgccttcatctggcagaaggacggcgtgaagaagctgaacctgtacctgatcatcaactacttcaagggcggcaagctgcggttcaagaagatcaaacctgaagccttcgaagccaacagattctacaccgtgatcaacaaaaagagcggcgagatcgtgcccatggaggtgaacttcaacttcgacgaccccaacctgatcatcctgcctctggcctttggcaagagacagggcagagaattcatctggaacgacctgctgtccctggaaaccggcagcctgaagctggccaacggaagagtgatcgagaagacactgtacaacagaagaacccggcaggatgagcctgccctgttcgtggccctgaccttcgagcggcgggaggtcctggactcctccaatatcaaaccaatgaacctgatcggcgtggcaagaggcgaaaacatccccgccgtgatcgccctgaccgaccccgagggctgcccactgagccggtttaaggatagcctgggaaacccaacccacatcctgagaatcggcgagagctataaggagaagcagcggaccatccaggccaagaaggaggtggagcagcggagagccggcggctacagccggaagtacgccagcaaagccaagaatctggcagacgatatggtgagaaacaccgctagagatctgctgtactacgccgtgacccaggatgccatgctgatcttcgccaacctgagccggggcttcggccggcagggcaagcggaccttcatggccgagagacagtacacacggatggaggactggctgaccgccaagctggcctacgagggcctgagcaagacctacctgtccaagacactggcccagtacacctccaagacatgcagcaactgtgggtttaccatcaccagcgccgactacgacagggtgctggagaagctgaagaagacagcaacaggctggatgaccacaattaacggcaaggagctgaaggtggagggccagattacctactacaacagatacaagagacagaacgtagtcaaggacctgtccgtcgagctggatagactgagcgaagaatctgtgaacaacgacatctcctcctggacaaagggcagaagcggagaagctctgagcctcctgaagaaaagattctcccatagacccgtgcaggagaagttcgtgtgcctgaactgcggcttcgagacacacgcagccgagcaagccgccctgaacatcgccagatcctggctgttcctgcggagccaggagtacaagaaataccagacaaacaagacaaccggcaacaccgataagagagccttcgtcgagacctggcagtccttttaccggaagaagcttaaggaggtgtggaaacctgccgtgcggtctggcggatctggcggaggctccaccagccccaagaaaaagagaaaagtctaagctgccttctgcggggcttgccttctggccatgcccttcttctctcccttgcacctgtacctcttggtctttgaataaagcctgagtaggaaggctagcaaaaaaaaaaaaaaaaaaaaaaaaaaaaaaaaaaaaaaaaaaaaaaaaaaaaaaaaaaaaaaaaaaaaaaaaaaaaaaaa

SEQ ID NO: 10381 - RNA, 8787 nt, synthetic construct
  source 1..8787: mol_type = other RNA
aggaaataagagagaaaagaagagtaagaagaaatataagagccaccatggcccctaagaagaagcgtaaagtgagccggatgaaccacgaccaggagttcgacccccctaaggtgtaccctcccgtccccgccgagaagagaaagcccatccgggtcctgagcctgttcgatggcatcgccaccggtctgctggtgctgaaggacctgggcatccaggtggataggtacattgcctccgaggtgtgcgaggactccatcaccgtgggaatggtgcgtcatcagggcaagatcatgtacgtgggcgacgtgcggagcgtgacacagaagcatatccaggagtggggccctttcgacctggtgatcggcggcagcccttgcaatgacctgagcatcgtgaacccagcccggaagggcctgtacgagggaaccggcagactgttcttcgagttttacagactgctgcacgacgcccggcctaaggaaggcgacgaccggcccttcttttggctgttcgagaatgtggtggccatgggagtcagcgacaagcgggatattagccggttcctggagagcaaccccgtgatgatcgatgccaaggaagtgagcgccgcccaccgggccagatacttctggggcaatctgcctggcatgaacagacccctggccagcaccgtgaacgacaagctggagctgcaggagtgcctggagcacggccggatcgccaagttcagcaaggtgagaaccatcaccacccgaagcaacagcatcaaacaaggcaaggaccagcactttcctgtgttcatgaacgagaaggaggacatcctgtggtgtaccgagatggagagagtgttcgggttcccagtccactacacagatgtcagcaacatgtctagactggccagacagagactgctgggaagaagctggtccgtccctgtgatcagacacctgttcgcccctctgaaggagtacttcgcctgcgtgagcagcggcaacagcaacgccaacagccggggccccagcttctctagcggcctggtgccactgtccctgagagggagccacatgggccccatggagatctacaaaaccgtgagcgcctggaagcggcagcctgtgcgcgtgctgagcctgtttcggaatatcgataaagtcctgaaaagcctgggattcctggagagcggctctggctccggcggtggcaccctgaagtacgtggaggatgtgacaaacgtggtcagacgggatgtggagaagtggggccccttcgatctggtgtacggcagcacccaacccctgggcagctcttgtgaccggtgccctggctggtacatgtttcagttccaccggatcctgcagtacgccctgccgagacaggagtcccagcggccattcttttggattttcatggacaacttgctgctgaccgaggatgaccaggaaactaccactcggttcctgcagaccgaagccgtgaccctgcaggacgtgagaggccgggactaccagaacgccatgcgggtgtggtccaacatccctggactgaaaagcaagcacgcacctctgacccctaaagaagaggagtacctgcaggcccaggtgcggagcagaagcaagctggacgcccctaaggtggatctgctggtgaagaattgcctcctgcccctgagagagtacttcaagtatttcagccagaatagtctgcccctgggaggcagcggcggcggcctgcagggcggcgtgaccttcgaggacgtggccgtggacttcacccaggaggagtggcagcagctgagccccgagcagaggggcctgtacagggacgtgaccctggagaactacaggaacctggccagcatgggcggcgaggacttcgccaagcccgaggtgatcctgaggctggagaacggcgaggagccctggatggtggagacccaggtgctgaggagctgcggccccgccgagaaggacggcggcccaagcagcggcgcccctcctcccagcggcggcaggcggcccaagcagcggcgcccctcctcccagcggcggcagcccagccggctccccaacctctaccgaggagggcacctctgagtccgccacccccgagagcggccctggcacctccaccgagcccagcgagggcagcgcacccggcagccctgccggcagccccacctccacagaggagggaaccagcaccgagcccagcgaaggcagcgccccaggcaccagcaccgagcctagtgagcaggagattaaacggatcaacaagatcagaagaagacttgtgaaagacagcaacaccaagaaggccggcaagacaggccccatgaaaaccctgctggttagagtgatgacacccgatctgagagagcggctggaaaacctgagaaagaagcctgaaaatatcccccagcccatcagcaatacatctagagccaacctgaataagctgctgaccgattacaccgaaatgaagaaggcgatcctgcatgtgtactgggaagagttccagaaggaccctgtgggcctgatgagccgggtggcccagcctgccagcaagaagatcgatcagaacaagctgaaacctgagatggacgagaagggcaacctgaccaccgccggctttgcctgctctcagtgtggccagcccctgttcgtgtacaagctggagcaggtgtctgagaagggcaaggcttacaccaactacttcggacggtgcaatgtggccgagcacgaaaagctgatcctgctggcccagctgaagcccgagaaggatagcgacgaagccgtgacatatagcctgggaaagtttgggcagagggccctggatttctacagcattcatgtgaccaaggagtccacccaccccgtgaagcccctggcccagatcgccggaaacagatacgcctccggacctgtgggaaaggccctgagcgacgcatgtatgggcacaatcgcctccttcctgtctaagtaccaggacatcatcatcgaacaccagaaggtggtgaagggcaaccagaagagactggagagcctgcgggagctggccggcaaggaaaacctggaataccctagcgtgaccctgccacctcagcctcacaccaaggagggcgttgatgcctacaacgaagtgatcgcccgggtgcgaatgtgggtgaacctgaacctgtggcagaagctgaagctaagcagagatgatgccaagcctctgctgagactgaagggattcccttcctttcctctggtcgagagacaggccaacgaagtggactggtgggacatggtgtgtaacgtgaagaagctgatcaacgagaaaaaggaggatggcaaggtgttttggcagaatctggctggctacaagagacaggaagccctgagaccatacctgagcagcgaggaagatcggaagaagggaaagaaattcgctcggtaccagctgggcgacctgctgctgcacctggaaaagaagcacggcgaggactggggaaaggtgtacgacgaggcctgggagcggattgacaagaaagtggaaggcctgagcaagcacatcaagctggaagaggaacggagaagcgaggacgcccagagcaaggccgccctgaccgactggctgcgggctaaggccagcttcgtgatcgagggcctgaaggaggccgacaaggacgagttctgcagatgcgagctgaagctgcagaagtggtacggggacctgcggggaaagcccttcgccatcgaagccgagaacagcatcctggacatcagcggcttcagcaagcagtacaactgtgccttcatctggcagaaggacggcgtgaagaagctgaacctgtacctgatcatcaactacttcaagggcggcaagctgcggttcaagaagatcaaacctgaagccttcgaagccaacagattctacaccgtgatcaacaaaaagagcggcgagatcgtgcccatggaggtgaacttcaacttcgacgaccccaacctgatcatcctgcctctggcctttggcaagagacagggcagagaattcatctggaacgacctgctgtccctggaaaccggcagcctgaagctggccaacggaagagtgatcgagaagacactgtacaacagaagaacccggcaggatgagcctgccctgttcgtggccctgaccttcgagcggcgggaggtcctggactcctccaatatcaaaccaatgaacctgatcggcgtggcaagaggcgaaaacatccccgccgtgatcgccctgaccgaccccgagggctgcccactgagccggtttaaggatagcctgggaaacccaacccacatcctgagaatcggcgagagctataaggagaagcagcggaccatccaggccaagaaggaggtggagcagcggagagccggcggctacagccggaagtacgccagcaaagccaagaatctggcagacgatatggtgagaaacaccgctagagatctgctgtactacgccgtgacccaggatgccatgctgatcttcgccaacctgagccggggcttcggccggcagggcaagcggaccttcatggccgagagacagtacacacggatggaggactggctgaccgccaagctggcctacgagggcctgagcaagacctacctgtccaagacactggcccagtacacctccaagacatgcagcaactgtgggtttaccatcaccagcgccgactacgacagggtgctggagaagctgaagaagacagcaacaggctggatgaccacaattaacggcaaggagctgaaggtggagggccagattacctactacaacagatacaagagacagaacgtagtcaaggacctgtccgtcgagctggatagactgagcgaagaatctgtgaacaacgacatctcctcctggacaaagggcagaagcggagaagctctgagcctcctgaagaaaagattctcccatagacccgtgcaggagaagttcgtgtgcctgaactgcggcttcgagacacacgcagccgagcaagccgccctgaacatcgccagatcctggctgttcctgcggagccaggagtacaagaaataccagacaaacaagacaaccggcaacaccgataagagagccttcgtcgagacctggcagtccttttaccggaagaagcttaaggaggtgtggaaacctgccgtgcggtctggcggatctggcggaggctccaccagccccaagaaaaagagaaaagtctaagctgccttctgcggggcttgccttctggccatgcccttcttctctcccttgcacctgtacctcttggtctttgaataaagcctgagtaggaaggctagcaaaaaaaaaaaaaaaaaaaaaaaaaaaaaaaaaaaaaaaaaaaaaaaaaaaaaaaaaaaaaaaaaaaaaaaaaaaaaaaagcccagccggctccccaacctctaccgaggagggcacctctgagtccgccacccccgagagcggccctggcacctccaccgagcccagcgagggcagcgcacccggcagccctgccggcagccccacctccacagaggagggaaccagcaccgagcccagcgaaggcagcgccccaggcaccagcaccgagcctagtgagcaggagattaaacggatcaacaagatcagaagaagacttgtgaaagacagcaacaccaagaaggccggcaagacaggccccatgaaaaccctgctggttagagtgatgacacccgatctgagagagcggctggaaaacctgagaaagaagcctgaaaatatcccccagcccatcagcaatacatctagagccaacctgaataagctgctgaccgattacaccgaaatgaagaaggcgatcctgcatgtgtactgggaagagttccagaaggaccctgtgggcctgatgagccgggtggcccagcctgccagcaagaagatcgatcagaacaagctgaaacctgagatggacgagaagggcaacctgaccaccgccggctttgcctgctctcagtgtggccagcccctgttcgtgtacaagctggagcaggtgtctgagaagggcaaggcttacaccaactacttcggacggtgcaatgtggccgagcacgaaaagctgatcctgctggcccagctgaagcccgagaaggatagcgacgaagccgtgacatatagcctgggaaagtttgggcagagggccctggatttctacagcattcatgtgaccaaggagtccacccaccccgtgaagcccctggcccagatcgccggaaacagatacgcctccggacctgtgggaaaggccctgagcgacgcatgtatgggcacaatcgcctccttcctgtctaagtaccaggacatcatcatcgaacaccagaaggtggtgaagggcaaccagaagagactggagagcctgcgggagctggccggcaaggaaaacctggaataccctagcgtgaccctgccacctcagcctcacaccaaggagggcgttgatgcctacaacgaagtgatcgcccgggtgcgaatgtgggtgaacctgaacctgtggcagaagctgaagctaagcagagatgatgccaagcctctgctgagactgaagggattcccttcctttcctctggtcgagagacaggccaacgaagtggactggtgggacatggtgtgtaacgtgaagaagctgatcaacgagaaaaaggaggatggcaaggtgttttggcagaatctggctggctacaagagacaggaagccctgagaccatacctgagcagcgaggaagatcggaagaagggaaagaaattcgctcggtaccagctgggcgacctgctgctgcacctggaaaagaagcacggcgaggactggggaaaggtgtacgacgaggcctgggagcggattgacaagaaagtggaaggcctgagcaagcacatcaagctggaagaggaacggagaagcgaggacgcccagagcaaggccgccctgaccgactggctgcgggctaaggccagcttcgtgatcgagggcctgaaggaggccgacaaggacgagttctgcagatgcgagctgaagctgcagaagtggtacggggacctgcggggaaagcccttcgccatcgaagccgagaacagcatcctggacatcagcggcttcagcaagcagtacaactgtgccttcatctggcagaaggacggcgtgaagaagctgaacctgtacctgatcatcaactacttcaagggcggcaagctgcggttcaagaagatcaaacctgaagccttcgaagccaacagattctacaccgtgatcaacaaaaagagcggcgagatcgtgcccatggaggtgaacttcaacttcgacgaccccaacctgatcatcctgcctctggcctttggcaagagacagggcagagaattcatctggaacgacctgctgtccctggaaaccggcagcctgaagctggccaacggaagagtgatcgagaagacactgtacaacagaagaacccggcaggatgagcctgccctgttcgtggccctgaccttcgagcggcgggaggtcctggactcctccaatatcaaaccaatgaacctgatcggcgtggcaagaggcgaaaacatccccgccgtgatcgccctgaccgaccccgagggctgcccactgagccggtttaaggatagcctgggaaacccaacccacatcctgagaatcggcgagagctataaggagaagcagcggaccatccaggccaagaaggaggtggagcagcggagagccggcggctacagccggaagtacgccagcaaagccaagaatctggcagacgatatggtgagaaacaccgctagagatctgctgtactacgccgtgacccaggatgccatgctgatcttcgccaacctgagccggggcttcggccggcagggcaagcggaccttcatggccgagagacagtacacacggatggaggactggctgaccgccaagctggcctacgagggcctgagcaagacctacctgtccaagacactggcccagtacacctccaagacatgcagcaactgtgggtttaccatcaccagcgccgactacgacagggtgctggagaagctgaagaagacagcaacaggctggatgaccacaattaacggcaaggagctgaaggtggagggccagattacctactacaacagatacaagagacagaacgtagtcaaggacctgtccgtcgagctggatagactgagcgaagaatctgtgaacaacgacatctcctcctggacaaagggcagaagcggagaagctctgagcctcctgaagaaaagattctcccatagacccgtgcaggagaagttcgtgtgcctgaactgcggcttcgagacacacgcagccgagcaagccgccctgaacatcgccagatcctggctgttcctgcggagccaggagtacaagaaataccagacaaacaagacaaccggcaacaccgataagagagccttcgtcgagacctggcagtccttttaccggaagaagcttaaggaggtgtggaaacctgccgtgcggtctggcggatctggcggaggctccaccagccccaagaaaaagagaaaagtctaagctgccttctgcggggcttgccttctggccatgcccttcttctctcccttgcacctgtacctcttggtctttgaataaagcctgagtaggaaggctagcaaaaaaaaaaaaaaaaaaaaaaaaaaaaaaaaaaaaaaaaaaaaaaaaaaaaaaaaaaaaaaaaaaaaaaaaaaaaaaaa

SEQ ID NO: 10382 - RNA, 8787 nt, synthetic construct
  source 1..8787: mol_type = other RNA
aggaaataagagagaaaagaagagtaagaagaaatataagagccaccatggcccctaagaagaagcgtaaagtgagccggatgaaccacgaccaggagttcgacccccctaaggtgtaccctcccgtccccgccgagaagagaaagcccatccgggtcctgagcctgttcgatggcatcgccaccggtctgctggtgctgaaggacctgggcatccaggtggataggtacattgcctccgaggtgtgcgaggactccatcaccgtgggaatggtgcgtcatcagggcaagatcatgtacgtgggcgacgtgcggagcgtgacacagaagcatatccaggagtggggccctttcgacctggtgatcggcggcagcccttgcaatgacctgagcatcgtgaacccagcccggaagggcctgtacgagggaaccggcagactgttcttcgagttttacagactgctgcacgacgcccggcctaaggaaggcgacgaccggcccttcttttggctgttcgagaatgtggtggccatgggagtcagcgacaagcgggatattagccggttcctggagagcaaccccgtgatgatcgatgccaaggaagtgagcgccgcccaccgggccagatacttctggggcaatctgcctggcatgaacagacccctggccagcaccgtgaacgacaagctggagctgcaggagtgcctggagcacggccggatcgccaagttcagcaaggtgagaaccatcaccacccgaagcaacagcatcaaacaaggcaaggaccagcactttcctgtgttcatgaacgagaaggaggacatcctgtggtgtaccgagatggagagagtgttcgggttcccagtccactacacagatgtcagcaacatgtctagactggccagacagagactgctgggaagaagctggtccgtccctgtgatcagacacctgttcgcccctctgaaggagtacttcgcctgcgtgagcagcggcaacagcaacgccaacagccggggccccagcttctctagcggcctggtgccactgtccctgagagggagccacatgggccccatggagatctacaaaaccgtgagcgcctggaagcggcagcctgtgcgcgtgctgagcctgtttcggaatatcgataaagtcctgaaaagcctgggattcctggagagcggctctggctccggcggtggcaccctgaagtacgtggaggatgtgacaaacgtggtcagacgggatgtggagaagtggggccccttcgatctggtgtacggcagcacccaacccctgggcagctcttgtgaccggtgccctggctggtacatgtttcagttccaccggatcctgcagtacgccctgccgagacaggagtcccagcggccattcttttggattttcatggacaacttgctgctgaccgaggatgaccaggaaactaccactcggttcctgcagaccgaagccgtgaccctgcaggacgtgagaggccgggactaccagaacgccatgcgggtgtggtccaacatccctggactgaaaagcaagcacgcacctctgacccctaaagaagaggagtacctgcaggcccaggtgcggagcagaagcaagctggacgcccctaaggtggatctgctggtgaagaattgcctcctgcccctgagagagtacttcaagtatttcagccagaatagtctgcccctgggaggcagcggcggcggcatggccgccgccgccctgagggaccccgcccagcagggctacgtgaccttcgaggacgtggccgtgtacttcagccaggaggagtggaggctgctggacgaggcccagaagctgctgtacaggaacgtgatgctggagaacttcagcctgctggccagcctgggcctggccagcagcaagacccacgagatcacccagctggagagctgggaggagcccttcatgcccgcctgggaggtggtgggcggcccaagcagcggcgcccctcctcccagcggcggcaggcggcccaagcagcggcgcccctcctcccagcggcggcagcccagccggctccccaacctctaccgaggagggcacctctgagtccgccacccccgagagcggccctggcacctccaccgagcccagcgagggcagcgcacccggcagccctgccggcagccccacctccacagaggagggaaccagcaccgagcccagcgaaggcagcgccccaggcaccagcaccgagcctagtgagcaggagattaaacggatcaacaagatcagaagaagacttgtgaaagacagcaacaccaagaaggccggcaagacaggccccatgaaaaccctgctggttagagtgatgacacccgatctgagagagcggctggaaaacctgagaaagaagcctgaaaatatcccccagcccatcagcaatacatctagagccaacctgaataagctgctgaccgattacaccgaaatgaagaaggcgatcctgcatgtgtactgggaagagttccagaaggaccctgtgggcctgatgagccgggtggcccagcctgccagcaagaagatcgatcagaacaagctgaaacctgagatggacgagaagggcaacctgaccaccgccggctttgcctgctctcagtgtggccagcccctgttcgtgtacaagctggagcaggtgtctgagaagggcaaggcttacaccaactacttcggacggtgcaatgtggccgagcacgaaaagctgatcctgctggcccagctgaagcccgagaaggatagcgacgaagccgtgacatatagcctgggaaagtttgggcagagggccctggatttctacagcattcatgtgaccaaggagtccacccaccccgtgaagcccctggcccagatcgccggaaacagatacgcctccggacctgtgggaaaggccctgagcgacgcatgtatgggcacaatcgcctccttcctgtctaagtaccaggacatcatcatcgaacaccagaaggtggtgaagggcaaccagaagagactggagagcctgcgggagctggccggcaaggaaaacctggaataccctagcgtgaccctgccacctcagcctcacaccaaggagggcgttgatgcctacaacgaagtgatcgcccgggtgcgaatgtgggtgaacctgaacctgtggcagaagctgaagctaagcagagatgatgccaagcctctgctgagactgaagggattcccttcctttcctctggtcgagagacaggccaacgaagtggactggtgggacatggtgtgtaacgtgaagaagctgatcaacgagaaaaaggaggatggcaaggtgttttggcagaatctggctggctacaagagacaggaagccctgagaccatacctgagcagcgaggaagatcggaagaagggaaagaaattcgctcggtaccagctgggcgacctgctgctgcacctggaaaagaagcacggcgaggactggggaaaggtgtacgacgaggcctgggagcggattgacaagaaagtggaaggcctgagcaagcacatcaagctggaagaggaacggagaagcgaggacgcccagagcaaggccgccctgaccgactggctgcgggctaaggccagcttcgtgatcgagggcctgaaggaggccgacaaggacgagttctgcagatgcgagctgaagctgcagaagtggtacggggacctgcggggaaagcccttcgccatcgaagccgagaacagcatcctggacatcagcggcttcagcaagcagtacaactgtgccttcatctggcagaaggacggcgtgaagaagctgaacctgtacctgatcatcaactacttcaagggcggcaagctgcggttcaagaagatcaaacctgaagccttcgaagccaacagattctacaccgtgatcaacaaaaagagcggcgagatcgtgcccatggaggtgaacttcaacttcgacgaccccaacctgatcatcctgcctctggcctttggcaagagacagggcagagaattcatctggaacgacctgctgtccctggaaaccggcagcctgaagctggccaacggaagagtgatcgagaagacactgtacaacagaagaacccggcaggatgagcctgccctgttcgtggccctgaccttcgagcggcgggaggtcctggactcctccaatatcaaaccaatgaacctgatcggcgtggcaagaggcgaaaacatccccgccgtgatcgccctgaccgaccccgagggctgcccactgagccggtttaaggatagcctgggaaacccaacccacatcctgagaatcggcgagagctataaggagaagcagcggaccatccaggccaagaaggaggtggagcagcggagagccggcggctacagccggaagtacgccagcaaagccaagaatctggcagacgatatggtgagaaacaccgctagagatctgctgtactacgccgtgacccaggatgccatgctgatcttcgccaacctgagccggggcttcggccggcagggcaagcggaccttcatggccgagagacagtacacacggatggaggactggctgaccgccaagctggcctacgagggcctgagcaagacctacctgtccaagacactggcccagtacacctccaagacatgcagcaactgtgggtttaccatcaccagcgccgactacgacagggtgctggagaagctgaagaagacagcaacaggctggatgaccacaattaacggcaaggagctgaaggtggagggccagattacctactacaacagatacaagagacagaacgtagtcaaggacctgtccgtcgagctggatagactgagcgaagaatctgtgaacaacgacatctcctcctggacaaagggcagaagcggagaagctctgagcctcctgaagaaaagattctcccatagacccgtgcaggagaagttcgtgtgcctgaactgcggcttcgagacacacgcagccgagcaagccgccctgaacatcgccagatcctggctgttcctgcggagccaggagtacaagaaataccagacaaacaagacaaccggcaacaccgataagagagccttcgtcgagacctggcagtccttttaccggaagaagcttaaggaggtgtggaaacctgccgtgcggtctggcggatctggcggaggctccaccagccccaagaaaaagagaaaagtctaagctgccttctgcggggcttgccttctggccatgcccttcttctctcccttgcacctgtacctcttggtctttgaataaagcctgagtaggaaggctagcaaaaaaaaaaaaaaaaaaaaaaaaaaaaaaaaaaaaaaaaaaaaaaaaaaaaaaaaaaaaaaaaaaaaaaaaaaaaaaaagcccagccggctccccaacctctaccgaggagggcacctctgagtccgccacccccgagagcggccctggcacctccaccgagcccagcgagggcagcgcacccggcagccctgccggcagccccacctccacagaggagggaaccagcaccgagcccagcgaaggcagcgccccaggcaccagcaccgagcctagtgagcaggagattaaacggatcaacaagatcagaagaagacttgtgaaagacagcaacaccaagaaggccggcaagacaggccccatgaaaaccctgctggttagagtgatgacacccgatctgagagagcggctggaaaacctgagaaagaagcctgaaaatatcccccagcccatcagcaatacatctagagccaacctgaataagctgctgaccgattacaccgaaatgaagaaggcgatcctgcatgtgtactgggaagagttccagaaggaccctgtgggcctgatgagccgggtggcccagcctgccagcaagaagatcgatcagaacaagctgaaacctgagatggacgagaagggcaacctgaccaccgccggctttgcctgctctcagtgtggccagcccctgttcgtgtacaagctggagcaggtgtctgagaagggcaaggcttacaccaactacttcggacggtgcaatgtggccgagcacgaaaagctgatcctgctggcccagctgaagcccgagaaggatagcgacgaagccgtgacatatagcctgggaaagtttgggcagagggccctggatttctacagcattcatgtgaccaaggagtccacccaccccgtgaagcccctggcccagatcgccggaaacagatacgcctccggacctgtgggaaaggccctgagcgacgcatgtatgggcacaatcgcctccttcctgtctaagtaccaggacatcatcatcgaacaccagaaggtggtgaagggcaaccagaagagactggagagcctgcgggagctggccggcaaggaaaacctggaataccctagcgtgaccctgccacctcagcctcacaccaaggagggcgttgatgcctacaacgaagtgatcgcccgggtgcgaatgtgggtgaacctgaacctgtggcagaagctgaagctaagcagagatgatgccaagcctctgctgagactgaagggattcccttcctttcctctggtcgagagacaggccaacgaagtggactggtgggacatggtgtgtaacgtgaagaagctgatcaacgagaaaaaggaggatggcaaggtgttttggcagaatctggctggctacaagagacaggaagccctgagaccatacctgagcagcgaggaagatcggaagaagggaaagaaattcgctcggtaccagctgggcgacctgctgctgcacctggaaaagaagcacggcgaggactggggaaaggtgtacgacgaggcctgggagcggattgacaagaaagtggaaggcctgagcaagcacatcaagctggaagaggaacggagaagcgaggacgcccagagcaaggccgccctgaccgactggctgcgggctaaggccagcttcgtgatcgagggcctgaaggaggccgacaaggacgagttctgcagatgcgagctgaagctgcagaagtggtacggggacctgcggggaaagcccttcgccatcgaagccgagaacagcatcctggacatcagcggcttcagcaagcagtacaactgtgccttcatctggcagaaggacggcgtgaagaagctgaacctgtacctgatcatcaactacttcaagggcggcaagctgcggttcaagaagatcaaacctgaagccttcgaagccaacagattctacaccgtgatcaacaaaaagagcggcgagatcgtgcccatggaggtgaacttcaacttcgacgaccccaacctgatcatcctgcctctggcctttggcaagagacagggcagagaattcatctggaacgacctgctgtccctggaaaccggcagcctgaagctggccaacggaagagtgatcgagaagacactgtacaacagaagaacccggcaggatgagcctgccctgttcgtggccctgaccttcgagcggcgggaggtcctggactcctccaatatcaaaccaatgaacctgatcggcgtggcaagaggcgaaaacatccccgccgtgatcgccctgaccgaccccgagggctgcccactgagccggtttaaggatagcctgggaaacccaacccacatcctgagaatcggcgagagctataaggagaagcagcggaccatccaggccaagaaggaggtggagcagcggagagccggcggctacagccggaagtacgccagcaaagccaagaatctggcagacgatatggtgagaaacaccgctagagatctgctgtactacgccgtgacccaggatgccatgctgatcttcgccaacctgagccggggcttcggccggcagggcaagcggaccttcatggccgagagacagtacacacggatggaggactggctgaccgccaagctggcctacgagggcctgagcaagacctacctgtccaagacactggcccagtacacctccaagacatgcagcaactgtgggtttaccatcaccagcgccgactacgacagggtgctggagaagctgaagaagacagcaacaggctggatgaccacaattaacggcaaggagctgaaggtggagggccagattacctactacaacagatacaagagacagaacgtagtcaaggacctgtccgtcgagctggatagactgagcgaagaatctgtgaacaacgacatctcctcctggacaaagggcagaagcggagaagctctgagcctcctgaagaaaagattctcccatagacccgtgcaggagaagttcgtgtgcctgaactgcggcttcgagacacacgcagccgagcaagccgccctgaacatcgccagatcctggctgttcctgcggagccaggagtacaagaaataccagacaaacaagacaaccggcaacaccgataagagagccttcgtcgagacctggcagtccttttaccggaagaagcttaaggaggtgtggaaacctgccgtgcggtctggcggatctggcggaggctccaccagccccaagaaaaagagaaaagtctaagctgccttctgcggggcttgccttctggccatgcccttcttctctcccttgcacctgtacctcttggtctttgaataaagcctgagtaggaaggctagcaaaaaaaaaaaaaaaaaaaaaaaaaaaaaaaaaaaaaaaaaaaaaaaaaaaaaaaaaaaaaaaaaaaaaaaaaaaaaaaa

SEQ ID NO: 10383 - RNA, 8787 nt, synthetic construct
  source 1..8787: mol_type = other RNA
aggaaataagagagaaaagaagagtaagaagaaatataagagccaccatggcccctaagaagaagcgtaaagtgagccggatgaaccacgaccaggagttcgacccccctaaggtgtaccctcccgtccccgccgagaagagaaagcccatccgggtcctgagcctgttcgatggcatcgccaccggtctgctggtgctgaaggacctgggcatccaggtggataggtacattgcctccgaggtgtgcgaggactccatcaccgtgggaatggtgcgtcatcagggcaagatcatgtacgtgggcgacgtgcggagcgtgacacagaagcatatccaggagtggggccctttcgacctggtgatcggcggcagcccttgcaatgacctgagcatcgtgaacccagcccggaagggcctgtacgagggaaccggcagactgttcttcgagttttacagactgctgcacgacgcccggcctaaggaaggcgacgaccggcccttcttttggctgttcgagaatgtggtggccatgggagtcagcgacaagcgggatattagccggttcctggagagcaaccccgtgatgatcgatgccaaggaagtgagcgccgcccaccgggccagatacttctggggcaatctgcctggcatgaacagacccctggccagcaccgtgaacgacaagctggagctgcaggagtgcctggagcacggccggatcgccaagttcagcaaggtgagaaccatcaccacccgaagcaacagcatcaaacaaggcaaggaccagcactttcctgtgttcatgaacgagaaggaggacatcctgtggtgtaccgagatggagagagtgttcgggttcccagtccactacacagatgtcagcaacatgtctagactggccagacagagactgctgggaagaagctggtccgtccctgtgatcagacacctgttcgcccctctgaaggagtacttcgcctgcgtgagcagcggcaacagcaacgccaacagccggggccccagcttctctagcggcctggtgccactgtccctgagagggagccacatgggccccatggagatctacaaaaccgtgagcgcctggaagcggcagcctgtgcgcgtgctgagcctgtttcggaatatcgataaagtcctgaaaagcctgggattcctggagagcggctctggctccggcggtggcaccctgaagtacgtggaggatgtgacaaacgtggtcagacgggatgtggagaagtggggccccttcgatctggtgtacggcagcacccaacccctgggcagctcttgtgaccggtgccctggctggtacatgtttcagttccaccggatcctgcagtacgccctgccgagacaggagtcccagcggccattcttttggattttcatggacaacttgctgctgaccgaggatgaccaggaaactaccactcggttcctgcagaccgaagccgtgaccctgcaggacgtgagaggccgggactaccagaacgccatgcgggtgtggtccaacatccctggactgaaaagcaagcacgcacctctgacccctaaagaagaggagtacctgcaggcccaggtgcggagcagaagcaagctggacgcccctaaggtggatctgctggtgaagaattgcctcctgcccctgagagagtacttcaagtatttcagccagaatagtctgcccctgggaggcagcggcggcggcgagatggagcccctgaccttcagggacgtggccatcgagttcagcctggaggagtggcagtgcctgaaccccgcccagcaggacctgttcaggaacgtgatgctggagaactacaggaacctggtgttcctgggcatcgccgccagcaagcccgacctgatcacctgcctggagaaggccaaggagccctggaagatgaagcagcacgagatggtggacgagccccccggcgccagcaccttcggcggcccaagcagcggcgcccctcctcccagcggcggcaggcggcccaagcagcggcgcccctcctcccagcggcggcagcccagccggctccccaacctctaccgaggagggcacctctgagtccgccacccccgagagcggccctggcacctccaccgagcccagcgagggcagcgcacccggcagccctgccggcagccccacctccacagaggagggaaccagcaccgagcccagcgaaggcagcgccccaggcaccagcaccgagcctagtgagcaggagattaaacggatcaacaagatcagaagaagacttgtgaaagacagcaacaccaagaaggccggcaagacaggccccatgaaaaccctgctggttagagtgatgacacccgatctgagagagcggctggaaaacctgagaaagaagcctgaaaatatcccccagcccatcagcaatacatctagagccaacctgaataagctgctgaccgattacaccgaaatgaagaaggcgatcctgcatgtgtactgggaagagttccagaaggaccctgtgggcctgatgagccgggtggcccagcctgccagcaagaagatcgatcagaacaagctgaaacctgagatggacgagaagggcaacctgaccaccgccggctttgcctgctctcagtgtggccagcccctgttcgtgtacaagctggagcaggtgtctgagaagggcaaggcttacaccaactacttcggacggtgcaatgtggccgagcacgaaaagctgatcctgctggcccagctgaagcccgagaaggatagcgacgaagccgtgacatatagcctgggaaagtttgggcagagggccctggatttctacagcattcatgtgaccaaggagtccacccaccccgtgaagcccctggcccagatcgccggaaacagatacgcctccggacctgtgggaaaggccctgagcgacgcatgtatgggcacaatcgcctccttcctgtctaagtaccaggacatcatcatcgaacaccagaaggtggtgaagggcaaccagaagagactggagagcctgcgggagctggccggcaaggaaaacctggaataccctagcgtgaccctgccacctcagcctcacaccaaggagggcgttgatgcctacaacgaagtgatcgcccgggtgcgaatgtgggtgaacctgaacctgtggcagaagctgaagctaagcagagatgatgccaagcctctgctgagactgaagggattcccttcctttcctctggtcgagagacaggccaacgaagtggactggtgggacatggtgtgtaacgtgaagaagctgatcaacgagaaaaaggaggatggcaaggtgttttggcagaatctggctggctacaagagacaggaagccctgagaccatacctgagcagcgaggaagatcggaagaagggaaagaaattcgctcggtaccagctgggcgacctgctgctgcacctggaaaagaagcacggcgaggactggggaaaggtgtacgacgaggcctgggagcggattgacaagaaagtggaaggcctgagcaagcacatcaagctggaagaggaacggagaagcgaggacgcccagagcaaggccgccctgaccgactggctgcgggctaaggccagcttcgtgatcgagggcctgaaggaggccgacaaggacgagttctgcagatgcgagctgaagctgcagaagtggtacggggacctgcggggaaagcccttcgccatcgaagccgagaacagcatcctggacatcagcggcttcagcaagcagtacaactgtgccttcatctggcagaaggacggcgtgaagaagctgaacctgtacctgatcatcaactacttcaagggcggcaagctgcggttcaagaagatcaaacctgaagccttcgaagccaacagattctacaccgtgatcaacaaaaagagcggcgagatcgtgcccatggaggtgaacttcaacttcgacgaccccaacctgatcatcctgcctctggcctttggcaagagacagggcagagaattcatctggaacgacctgctgtccctggaaaccggcagcctgaagctggccaacggaagagtgatcgagaagacactgtacaacagaagaacccggcaggatgagcctgccctgttcgtggccctgaccttcgagcggcgggaggtcctggactcctccaatatcaaaccaatgaacctgatcggcgtggcaagaggcgaaaacatccccgccgtgatcgccctgaccgaccccgagggctgcccactgagccggtttaaggatagcctgggaaacccaacccacatcctgagaatcggcgagagctataaggagaagcagcggaccatccaggccaagaaggaggtggagcagcggagagccggcggctacagccggaagtacgccagcaaagccaagaatctggcagacgatatggtgagaaacaccgctagagatctgctgtactacgccgtgacccaggatgccatgctgatcttcgccaacctgagccggggcttcggccggcagggcaagcggaccttcatggccgagagacagtacacacggatggaggactggctgaccgccaagctggcctacgagggcctgagcaagacctacctgtccaagacactggcccagtacacctccaagacatgcagcaactgtgggtttaccatcaccagcgccgactacgacagggtgctggagaagctgaagaagacagcaacaggctggatgaccacaattaacggcaaggagctgaaggtggagggccagattacctactacaacagatacaagagacagaacgtagtcaaggacctgtccgtcgagctggatagactgagcgaagaatctgtgaacaacgacatctcctcctggacaaagggcagaagcggagaagctctgagcctcctgaagaaaagattctcccatagacccgtgcaggagaagttcgtgtgcctgaactgcggcttcgagacacacgcagccgagcaagccgccctgaacatcgccagatcctggctgttcctgcggagccaggagtacaagaaataccagacaaacaagacaaccggcaacaccgataagagagccttcgtcgagacctggcagtccttttaccggaagaagcttaaggaggtgtggaaacctgccgtgcggtctggcggatctggcggaggctccaccagccccaagaaaaagagaaaagtctaagctgccttctgcggggcttgccttctggccatgcccttcttctctcccttgcacctgtacctcttggtctttgaataaagcctgagtaggaaggctagcaaaaaaaaaaaaaaaaaaaaaaaaaaaaaaaaaaaaaaaaaaaaaaaaaaaaaaaaaaaaaaaaaaaaaaaaaaaaaaaagcccagccggctccccaacctctaccgaggagggcacctctgagtccgccacccccgagagcggccctggcacctccaccgagcccagcgagggcagcgcacccggcagccctgccggcagccccacctccacagaggagggaaccagcaccgagcccagcgaaggcagcgccccaggcaccagcaccgagcctagtgagcaggagattaaacggatcaacaagatcagaagaagacttgtgaaagacagcaacaccaagaaggccggcaagacaggccccatgaaaaccctgctggttagagtgatgacacccgatctgagagagcggctggaaaacctgagaaagaagcctgaaaatatcccccagcccatcagcaatacatctagagccaacctgaataagctgctgaccgattacaccgaaatgaagaaggcgatcctgcatgtgtactgggaagagttccagaaggaccctgtgggcctgatgagccgggtggcccagcctgccagcaagaagatcgatcagaacaagctgaaacctgagatggacgagaagggcaacctgaccaccgccggctttgcctgctctcagtgtggccagcccctgttcgtgtacaagctggagcaggtgtctgagaagggcaaggcttacaccaactacttcggacggtgcaatgtggccgagcacgaaaagctgatcctgctggcccagctgaagcccgagaaggatagcgacgaagccgtgacatatagcctgggaaagtttgggcagagggccctggatttctacagcattcatgtgaccaaggagtccacccaccccgtgaagcccctggcccagatcgccggaaacagatacgcctccggacctgtgggaaaggccctgagcgacgcatgtatgggcacaatcgcctccttcctgtctaagtaccaggacatcatcatcgaacaccagaaggtggtgaagggcaaccagaagagactggagagcctgcgggagctggccggcaaggaaaacctggaataccctagcgtgaccctgccacctcagcctcacaccaaggagggcgttgatgcctacaacgaagtgatcgcccgggtgcgaatgtgggtgaacctgaacctgtggcagaagctgaagctaagcagagatgatgccaagcctctgctgagactgaagggattcccttcctttcctctggtcgagagacaggccaacgaagtggactggtgggacatggtgtgtaacgtgaagaagctgatcaacgagaaaaaggaggatggcaaggtgttttggcagaatctggctggctacaagagacaggaagccctgagaccatacctgagcagcgaggaagatcggaagaagggaaagaaattcgctcggtaccagctgggcgacctgctgctgcacctggaaaagaagcacggcgaggactggggaaaggtgtacgacgaggcctgggagcggattgacaagaaagtggaaggcctgagcaagcacatcaagctggaagaggaacggagaagcgaggacgcccagagcaaggccgccctgaccgactggctgcgggctaaggccagcttcgtgatcgagggcctgaaggaggccgacaaggacgagttctgcagatgcgagctgaagctgcagaagtggtacggggacctgcggggaaagcccttcgccatcgaagccgagaacagcatcctggacatcagcggcttcagcaagcagtacaactgtgccttcatctggcagaaggacggcgtgaagaagctgaacctgtacctgatcatcaactacttcaagggcggcaagctgcggttcaagaagatcaaacctgaagccttcgaagccaacagattctacaccgtgatcaacaaaaagagcggcgagatcgtgcccatggaggtgaacttcaacttcgacgaccccaacctgatcatcctgcctctggcctttggcaagagacagggcagagaattcatctggaacgacctgctgtccctggaaaccggcagcctgaagctggccaacggaagagtgatcgagaagacactgtacaacagaagaacccggcaggatgagcctgccctgttcgtggccctgaccttcgagcggcgggaggtcctggactcctccaatatcaaaccaatgaacctgatcggcgtggcaagaggcgaaaacatccccgccgtgatcgccctgaccgaccccgagggctgcccactgagccggtttaaggatagcctgggaaacccaacccacatcctgagaatcggcgagagctataaggagaagcagcggaccatccaggccaagaaggaggtggagcagcggagagccggcggctacagccggaagtacgccagcaaagccaagaatctggcagacgatatggtgagaaacaccgctagagatctgctgtactacgccgtgacccaggatgccatgctgatcttcgccaacctgagccggggcttcggccggcagggcaagcggaccttcatggccgagagacagtacacacggatggaggactggctgaccgccaagctggcctacgagggcctgagcaagacctacctgtccaagacactggcccagtacacctccaagacatgcagcaactgtgggtttaccatcaccagcgccgactacgacagggtgctggagaagctgaagaagacagcaacaggctggatgaccacaattaacggcaaggagctgaaggtggagggccagattacctactacaacagatacaagagacagaacgtagtcaaggacctgtccgtcgagctggatagactgagcgaagaatctgtgaacaacgacatctcctcctggacaaagggcagaagcggagaagctctgagcctcctgaagaaaagattctcccatagacccgtgcaggagaagttcgtgtgcctgaactgcggcttcgagacacacgcagccgagcaagccgccctgaacatcgccagatcctggctgttcctgcggagccaggagtacaagaaataccagacaaacaagacaaccggcaacaccgataagagagccttcgtcgagacctggcagtccttttaccggaagaagcttaaggaggtgtggaaacctgccgtgcggtctggcggatctggcggaggctccaccagccccaagaaaaagagaaaagtctaagctgccttctgcggggcttgccttctggccatgcccttcttctctcccttgcacctgtacctcttggtctttgaataaagcctgagtaggaaggctagcaaaaaaaaaaaaaaaaaaaaaaaaaaaaaaaaaaaaaaaaaaaaaaaaaaaaaaaaaaaaaaaaaaaaaaaaaaaaaaaa

SEQ ID NO: 10384 - RNA, 8787 nt, synthetic construct
  source 1..8787: mol_type = other RNA
aggaaataagagagaaaagaagagtaagaagaaatataagagccaccatggcccctaagaagaagcgtaaagtgagccggatgaaccacgaccaggagttcgacccccctaaggtgtaccctcccgtccccgccgagaagagaaagcccatccgggtcctgagcctgttcgatggcatcgccaccggtctgctggtgctgaaggacctgggcatccaggtggataggtacattgcctccgaggtgtgcgaggactccatcaccgtgggaatggtgcgtcatcagggcaagatcatgtacgtgggcgacgtgcggagcgtgacacagaagcatatccaggagtggggccctttcgacctggtgatcggcggcagcccttgcaatgacctgagcatcgtgaacccagcccggaagggcctgtacgagggaaccggcagactgttcttcgagttttacagactgctgcacgacgcccggcctaaggaaggcgacgaccggcccttcttttggctgttcgagaatgtggtggccatgggagtcagcgacaagcgggatattagccggttcctggagagcaaccccgtgatgatcgatgccaaggaagtgagcgccgcccaccgggccagatacttctggggcaatctgcctggcatgaacagacccctggccagcaccgtgaacgacaagctggagctgcaggagtgcctggagcacggccggatcgccaagttcagcaaggtgagaaccatcaccacccgaagcaacagcatcaaacaaggcaaggaccagcactttcctgtgttcatgaacgagaaggaggacatcctgtggtgtaccgagatggagagagtgttcgggttcccagtccactacacagatgtcagcaacatgtctagactggccagacagagactgctgggaagaagctggtccgtccctgtgatcagacacctgttcgcccctctgaaggagtacttcgcctgcgtgagcagcggcaacagcaacgccaacagccggggccccagcttctctagcggcctggtgccactgtccctgagagggagccacatgggccccatggagatctacaaaaccgtgagcgcctggaagcggcagcctgtgcgcgtgctgagcctgtttcggaatatcgataaagtcctgaaaagcctgggattcctggagagcggctctggctccggcggtggcaccctgaagtacgtggaggatgtgacaaacgtggtcagacgggatgtggagaagtggggccccttcgatctggtgtacggcagcacccaacccctgggcagctcttgtgaccggtgccctggctggtacatgtttcagttccaccggatcctgcagtacgccctgccgagacaggagtcccagcggccattcttttggattttcatggacaacttgctgctgaccgaggatgaccaggaaactaccactcggttcctgcagaccgaagccgtgaccctgcaggacgtgagaggccgggactaccagaacgccatgcgggtgtggtccaacatccctggactgaaaagcaagcacgcacctctgacccctaaagaagaggagtacctgcaggcccaggtgcggagcagaagcaagctggacgcccctaaggtggatctgctggtgaagaattgcctcctgcccctgagagagtacttcaagtatttcagccagaatagtctgcccctgggaggcagcggcggcggcaagcccggcgccgtgagcttcgccgacgtggccgtgtacttcagccccgaggagtggggctgcctgaggcccgcccagaggagcctgtacagggacgtgatgagggagacctacggccacctgggcgccctgggcttccccggccccaagcccgccctgatcagctggatggagcaggagagcgaggcctggagcagcgccgcccaggaccccgagaagggcgagagcctgggcggcgcccagggcggcccaagcagcggcgcccctcctcccagcggcggcaggcggcccaagcagcggcgcccctcctcccagcggcggcagcccagccggctccccaacctctaccgaggagggcacctctgagtccgccacccccgagagcggccctggcacctccaccgagcccagcgagggcagcgcacccggcagccctgccggcagccccacctccacagaggagggaaccagcaccgagcccagcgaaggcagcgccccaggcaccagcaccgagcctagtgagcaggagattaaacggatcaacaagatcagaagaagacttgtgaaagacagcaacaccaagaaggccggcaagacaggccccatgaaaaccctgctggttagagtgatgacacccgatctgagagagcggctggaaaacctgagaaagaagcctgaaaatatcccccagcccatcagcaatacatctagagccaacctgaataagctgctgaccgattacaccgaaatgaagaaggcgatcctgcatgtgtactgggaagagttccagaaggaccctgtgggcctgatgagccgggtggcccagcctgccagcaagaagatcgatcagaacaagctgaaacctgagatggacgagaagggcaacctgaccaccgccggctttgcctgctctcagtgtggccagcccctgttcgtgtacaagctggagcaggtgtctgagaagggcaaggcttacaccaactacttcggacggtgcaatgtggccgagcacgaaaagctgatcctgctggcccagctgaagcccgagaaggatagcgacgaagccgtgacatatagcctgggaaagtttgggcagagggccctggatttctacagcattcatgtgaccaaggagtccacccaccccgtgaagcccctggcccagatcgccggaaacagatacgcctccggacctgtgggaaaggccctgagcgacgcatgtatgggcacaatcgcctccttcctgtctaagtaccaggacatcatcatcgaacaccagaaggtggtgaagggcaaccagaagagactggagagcctgcgggagctggccggcaaggaaaacctggaataccctagcgtgaccctgccacctcagcctcacaccaaggagggcgttgatgcctacaacgaagtgatcgcccgggtgcgaatgtgggtgaacctgaacctgtggcagaagctgaagctaagcagagatgatgccaagcctctgctgagactgaagggattcccttcctttcctctggtcgagagacaggccaacgaagtggactggtgggacatggtgtgtaacgtgaagaagctgatcaacgagaaaaaggaggatggcaaggtgttttggcagaatctggctggctacaagagacaggaagccctgagaccatacctgagcagcgaggaagatcggaagaagggaaagaaattcgctcggtaccagctgggcgacctgctgctgcacctggaaaagaagcacggcgaggactggggaaaggtgtacgacgaggcctgggagcggattgacaagaaagtggaaggcctgagcaagcacatcaagctggaagaggaacggagaagcgaggacgcccagagcaaggccgccctgaccgactggctgcgggctaaggccagcttcgtgatcgagggcctgaaggaggccgacaaggacgagttctgcagatgcgagctgaagctgcagaagtggtacggggacctgcggggaaagcccttcgccatcgaagccgagaacagcatcctggacatcagcggcttcagcaagcagtacaactgtgccttcatctggcagaaggacggcgtgaagaagctgaacctgtacctgatcatcaactacttcaagggcggcaagctgcggttcaagaagatcaaacctgaagccttcgaagccaacagattctacaccgtgatcaacaaaaagagcggcgagatcgtgcccatggaggtgaacttcaacttcgacgaccccaacctgatcatcctgcctctggcctttggcaagagacagggcagagaattcatctggaacgacctgctgtccctggaaaccggcagcctgaagctggccaacggaagagtgatcgagaagacactgtacaacagaagaacccggcaggatgagcctgccctgttcgtggccctgaccttcgagcggcgggaggtcctggactcctccaatatcaaaccaatgaacctgatcggcgtggcaagaggcgaaaacatccccgccgtgatcgccctgaccgaccccgagggctgcccactgagccggtttaaggatagcctgggaaacccaacccacatcctgagaatcggcgagagctataaggagaagcagcggaccatccaggccaagaaggaggtggagcagcggagagccggcggctacagccggaagtacgccagcaaagccaagaatctggcagacgatatggtgagaaacaccgctagagatctgctgtactacgccgtgacccaggatgccatgctgatcttcgccaacctgagccggggcttcggccggcagggcaagcggaccttcatggccgagagacagtacacacggatggaggactggctgaccgccaagctggcctacgagggcctgagcaagacctacctgtccaagacactggcccagtacacctccaagacatgcagcaactgtgggtttaccatcaccagcgccgactacgacagggtgctggagaagctgaagaagacagcaacaggctggatgaccacaattaacggcaaggagctgaaggtggagggccagattacctactacaacagatacaagagacagaacgtagtcaaggacctgtccgtcgagctggatagactgagcgaagaatctgtgaacaacgacatctcctcctggacaaagggcagaagcggagaagctctgagcctcctgaagaaaagattctcccatagacccgtgcaggagaagttcgtgtgcctgaactgcggcttcgagacacacgcagccgagcaagccgccctgaacatcgccagatcctggctgttcctgcggagccaggagtacaagaaataccagacaaacaagacaaccggcaacaccgataagagagccttcgtcgagacctggcagtccttttaccggaagaagcttaaggaggtgtggaaacctgccgtgcggtctggcggatctggcggaggctccaccagccccaagaaaaagagaaaagtctaagctgccttctgcggggcttgccttctggccatgcccttcttctctcccttgcacctgtacctcttggtctttgaataaagcctgagtaggaaggctagcaaaaaaaaaaaaaaaaaaaaaaaaaaaaaaaaaaaaaaaaaaaaaaaaaaaaaaaaaaaaaaaaaaaaaaaaaaaaaaaagcccagccggctccccaacctctaccgaggagggcacctctgagtccgccacccccgagagcggccctggcacctccaccgagcccagcgagggcagcgcacccggcagccctgccggcagccccacctccacagaggagggaaccagcaccgagcccagcgaaggcagcgccccaggcaccagcaccgagcctagtgagcaggagattaaacggatcaacaagatcagaagaagacttgtgaaagacagcaacaccaagaaggccggcaagacaggccccatgaaaaccctgctggttagagtgatgacacccgatctgagagagcggctggaaaacctgagaaagaagcctgaaaatatcccccagcccatcagcaatacatctagagccaacctgaataagctgctgaccgattacaccgaaatgaagaaggcgatcctgcatgtgtactgggaagagttccagaaggaccctgtgggcctgatgagccgggtggcccagcctgccagcaagaagatcgatcagaacaagctgaaacctgagatggacgagaagggcaacctgaccaccgccggctttgcctgctctcagtgtggccagcccctgttcgtgtacaagctggagcaggtgtctgagaagggcaaggcttacaccaactacttcggacggtgcaatgtggccgagcacgaaaagctgatcctgctggcccagctgaagcccgagaaggatagcgacgaagccgtgacatatagcctgggaaagtttgggcagagggccctggatttctacagcattcatgtgaccaaggagtccacccaccccgtgaagcccctggcccagatcgccggaaacagatacgcctccggacctgtgggaaaggccctgagcgacgcatgtatgggcacaatcgcctccttcctgtctaagtaccaggacatcatcatcgaacaccagaaggtggtgaagggcaaccagaagagactggagagcctgcgggagctggccggcaaggaaaacctggaataccctagcgtgaccctgccacctcagcctcacaccaaggagggcgttgatgcctacaacgaagtgatcgcccgggtgcgaatgtgggtgaacctgaacctgtggcagaagctgaagctaagcagagatgatgccaagcctctgctgagactgaagggattcccttcctttcctctggtcgagagacaggccaacgaagtggactggtgggacatggtgtgtaacgtgaagaagctgatcaacgagaaaaaggaggatggcaaggtgttttggcagaatctggctggctacaagagacaggaagccctgagaccatacctgagcagcgaggaagatcggaagaagggaaagaaattcgctcggtaccagctgggcgacctgctgctgcacctggaaaagaagcacggcgaggactggggaaaggtgtacgacgaggcctgggagcggattgacaagaaagtggaaggcctgagcaagcacatcaagctggaagaggaacggagaagcgaggacgcccagagcaaggccgccctgaccgactggctgcgggctaaggccagcttcgtgatcgagggcctgaaggaggccgacaaggacgagttctgcagatgcgagctgaagctgcagaagtggtacggggacctgcggggaaagcccttcgccatcgaagccgagaacagcatcctggacatcagcggcttcagcaagcagtacaactgtgccttcatctggcagaaggacggcgtgaagaagctgaacctgtacctgatcatcaactacttcaagggcggcaagctgcggttcaagaagatcaaacctgaagccttcgaagccaacagattctacaccgtgatcaacaaaaagagcggcgagatcgtgcccatggaggtgaacttcaacttcgacgaccccaacctgatcatcctgcctctggcctttggcaagagacagggcagagaattcatctggaacgacctgctgtccctggaaaccggcagcctgaagctggccaacggaagagtgatcgagaagacactgtacaacagaagaacccggcaggatgagcctgccctgttcgtggccctgaccttcgagcggcgggaggtcctggactcctccaatatcaaaccaatgaacctgatcggcgtggcaagaggcgaaaacatccccgccgtgatcgccctgaccgaccccgagggctgcccactgagccggtttaaggatagcctgggaaacccaacccacatcctgagaatcggcgagagctataaggagaagcagcggaccatccaggccaagaaggaggtggagcagcggagagccggcggctacagccggaagtacgccagcaaagccaagaatctggcagacgatatggtgagaaacaccgctagagatctgctgtactacgccgtgacccaggatgccatgctgatcttcgccaacctgagccggggcttcggccggcagggcaagcggaccttcatggccgagagacagtacacacggatggaggactggctgaccgccaagctggcctacgagggcctgagcaagacctacctgtccaagacactggcccagtacacctccaagacatgcagcaactgtgggtttaccatcaccagcgccgactacgacagggtgctggagaagctgaagaagacagcaacaggctggatgaccacaattaacggcaaggagctgaaggtggagggccagattacctactacaacagatacaagagacagaacgtagtcaaggacctgtccgtcgagctggatagactgagcgaagaatctgtgaacaacgacatctcctcctggacaaagggcagaagcggagaagctctgagcctcctgaagaaaagattctcccatagacccgtgcaggagaagttcgtgtgcctgaactgcggcttcgagacacacgcagccgagcaagccgccctgaacatcgccagatcctggctgttcctgcggagccaggagtacaagaaataccagacaaacaagacaaccggcaacaccgataagagagccttcgtcgagacctggcagtccttttaccggaagaagcttaaggaggtgtggaaacctgccgtgcggtctggcggatctggcggaggctccaccagccccaagaaaaagagaaaagtctaagctgccttctgcggggcttgccttctggccatgcccttcttctctcccttgcacctgtacctcttggtctttgaataaagcctgagtaggaaggctagcaaaaaaaaaaaaaaaaaaaaaaaaaaaaaaaaaaaaaaaaaaaaaaaaaaaaaaaaaaaaaaaaaaaaaaaaaaaaaaaa

SEQ ID NO: 10385 - RNA, 8787 nt, synthetic construct
  source 1..8787: mol_type = other RNA
aggaaataagagagaaaagaagagtaagaagaaatataagagccaccatggcccctaagaagaagcgtaaagtgagccggatgaaccacgaccaggagttcgacccccctaaggtgtaccctcccgtccccgccgagaagagaaagcccatccgggtcctgagcctgttcgatggcatcgccaccggtctgctggtgctgaaggacctgggcatccaggtggataggtacattgcctccgaggtgtgcgaggactccatcaccgtgggaatggtgcgtcatcagggcaagatcatgtacgtgggcgacgtgcggagcgtgacacagaagcatatccaggagtggggccctttcgacctggtgatcggcggcagcccttgcaatgacctgagcatcgtgaacccagcccggaagggcctgtacgagggaaccggcagactgttcttcgagttttacagactgctgcacgacgcccggcctaaggaaggcgacgaccggcccttcttttggctgttcgagaatgtggtggccatgggagtcagcgacaagcgggatattagccggttcctggagagcaaccccgtgatgatcgatgccaaggaagtgagcgccgcccaccgggccagatacttctggggcaatctgcctggcatgaacagacccctggccagcaccgtgaacgacaagctggagctgcaggagtgcctggagcacggccggatcgccaagttcagcaaggtgagaaccatcaccacccgaagcaacagcatcaaacaaggcaaggaccagcactttcctgtgttcatgaacgagaaggaggacatcctgtggtgtaccgagatggagagagtgttcgggttcccagtccactacacagatgtcagcaacatgtctagactggccagacagagactgctgggaagaagctggtccgtccctgtgatcagacacctgttcgcccctctgaaggagtacttcgcctgcgtgagcagcggcaacagcaacgccaacagccggggccccagcttctctagcggcctggtgccactgtccctgagagggagccacatgggccccatggagatctacaaaaccgtgagcgcctggaagcggcagcctgtgcgcgtgctgagcctgtttcggaatatcgataaagtcctgaaaagcctgggattcctggagagcggctctggctccggcggtggcaccctgaagtacgtggaggatgtgacaaacgtggtcagacgggatgtggagaagtggggccccttcgatctggtgtacggcagcacccaacccctgggcagctcttgtgaccggtgccctggctggtacatgtttcagttccaccggatcctgcagtacgccctgccgagacaggagtcccagcggccattcttttggattttcatggacaacttgctgctgaccgaggatgaccaggaaactaccactcggttcctgcagaccgaagccgtgaccctgcaggacgtgagaggccgggactaccagaacgccatgcgggtgtggtccaacatccctggactgaaaagcaagcacgcacctctgacccctaaagaagaggagtacctgcaggcccaggtgcggagcagaagcaagctggacgcccctaaggtggatctgctggtgaagaattgcctcctgcccctgagagagtacttcaagtatttcagccagaatagtctgcccctgggaggcagcggcggcggcttccaggagctggtgagcttcaaggacgtgaccgtgggcttcacccaggaggagtggcagcacctggaccccacccagaggagcctgtacagggacgtgatgctggagaactacagcaacctggtgagcgtgggctactgcgtgaccaagcccgaggtgatcttcaggctggagcagggcgaggagccctggatcctggaggaggagttccccaggcagagcttccccgaggtgtggaagatcggcggcccaagcagcggcgcccctcctcccagcggcggcaggcggcccaagcagcggcgcccctcctcccagcggcggcagcccagccggctccccaacctctaccgaggagggcacctctgagtccgccacccccgagagcggccctggcacctccaccgagcccagcgagggcagcgcacccggcagccctgccggcagccccacctccacagaggagggaaccagcaccgagcccagcgaaggcagcgccccaggcaccagcaccgagcctagtgagcaggagattaaacggatcaacaagatcagaagaagacttgtgaaagacagcaacaccaagaaggccggcaagacaggccccatgaaaaccctgctggttagagtgatgacacccgatctgagagagcggctggaaaacctgagaaagaagcctgaaaatatcccccagcccatcagcaatacatctagagccaacctgaataagctgctgaccgattacaccgaaatgaagaaggcgatcctgcatgtgtactgggaagagttccagaaggaccctgtgggcctgatgagccgggtggcccagcctgccagcaagaagatcgatcagaacaagctgaaacctgagatggacgagaagggcaacctgaccaccgccggctttgcctgctctcagtgtggccagcccctgttcgtgtacaagctggagcaggtgtctgagaagggcaaggcttacaccaactacttcggacggtgcaatgtggccgagcacgaaaagctgatcctgctggcccagctgaagcccgagaaggatagcgacgaagccgtgacatatagcctgggaaagtttgggcagagggccctggatttctacagcattcatgtgaccaaggagtccacccaccccgtgaagcccctggcccagatcgccggaaacagatacgcctccggacctgtgggaaaggccctgagcgacgcatgtatgggcacaatcgcctccttcctgtctaagtaccaggacatcatcatcgaacaccagaaggtggtgaagggcaaccagaagagactggagagcctgcgggagctggccggcaaggaaaacctggaataccctagcgtgaccctgccacctcagcctcacaccaaggagggcgttgatgcctacaacgaagtgatcgcccgggtgcgaatgtgggtgaacctgaacctgtggcagaagctgaagctaagcagagatgatgccaagcctctgctgagactgaagggattcccttcctttcctctggtcgagagacaggccaacgaagtggactggtgggacatggtgtgtaacgtgaagaagctgatcaacgagaaaaaggaggatggcaaggtgttttggcagaatctggctggctacaagagacaggaagccctgagaccatacctgagcagcgaggaagatcggaagaagggaaagaaattcgctcggtaccagctgggcgacctgctgctgcacctggaaaagaagcacggcgaggactggggaaaggtgtacgacgaggcctgggagcggattgacaagaaagtggaaggcctgagcaagcacatcaagctggaagaggaacggagaagcgaggacgcccagagcaaggccgccctgaccgactggctgcgggctaaggccagcttcgtgatcgagggcctgaaggaggccgacaaggacgagttctgcagatgcgagctgaagctgcagaagtggtacggggacctgcggggaaagcccttcgccatcgaagccgagaacagcatcctggacatcagcggcttcagcaagcagtacaactgtgccttcatctggcagaaggacggcgtgaagaagctgaacctgtacctgatcatcaactacttcaagggcggcaagctgcggttcaagaagatcaaacctgaagccttcgaagccaacagattctacaccgtgatcaacaaaaagagcggcgagatcgtgcccatggaggtgaacttcaacttcgacgaccccaacctgatcatcctgcctctggcctttggcaagagacagggcagagaattcatctggaacgacctgctgtccctggaaaccggcagcctgaagctggccaacggaagagtgatcgagaagacactgtacaacagaagaacccggcaggatgagcctgccctgttcgtggccctgaccttcgagcggcgggaggtcctggactcctccaatatcaaaccaatgaacctgatcggcgtggcaagaggcgaaaacatccccgccgtgatcgccctgaccgaccccgagggctgcccactgagccggtttaaggatagcctgggaaacccaacccacatcctgagaatcggcgagagctataaggagaagcagcggaccatccaggccaagaaggaggtggagcagcggagagccggcggctacagccggaagtacgccagcaaagccaagaatctggcagacgatatggtgagaaacaccgctagagatctgctgtactacgccgtgacccaggatgccatgctgatcttcgccaacctgagccggggcttcggccggcagggcaagcggaccttcatggccgagagacagtacacacggatggaggactggctgaccgccaagctggcctacgagggcctgagcaagacctacctgtccaagacactggcccagtacacctccaagacatgcagcaactgtgggtttaccatcaccagcgccgactacgacagggtgctggagaagctgaagaagacagcaacaggctggatgaccacaattaacggcaaggagctgaaggtggagggccagattacctactacaacagatacaagagacagaacgtagtcaaggacctgtccgtcgagctggatagactgagcgaagaatctgtgaacaacgacatctcctcctggacaaagggcagaagcggagaagctctgagcctcctgaagaaaagattctcccatagacccgtgcaggagaagttcgtgtgcctgaactgcggcttcgagacacacgcagccgagcaagccgccctgaacatcgccagatcctggctgttcctgcggagccaggagtacaagaaataccagacaaacaagacaaccggcaacaccgataagagagccttcgtcgagacctggcagtccttttaccggaagaagcttaaggaggtgtggaaacctgccgtgcggtctggcggatctggcggaggctccaccagccccaagaaaaagagaaaagtctaagctgccttctgcggggcttgccttctggccatgcccttcttctctcccttgcacctgtacctcttggtctttgaataaagcctgagtaggaaggctagcaaaaaaaaaaaaaaaaaaaaaaaaaaaaaaaaaaaaaaaaaaaaaaaaaaaaaaaaaaaaaaaaaaaaaaaaaaaaaaaagcccagccggctccccaacctctaccgaggagggcacctctgagtccgccacccccgagagcggccctggcacctccaccgagcccagcgagggcagcgcacccggcagccctgccggcagccccacctccacagaggagggaaccagcaccgagcccagcgaaggcagcgccccaggcaccagcaccgagcctagtgagcaggagattaaacggatcaacaagatcagaagaagacttgtgaaagacagcaacaccaagaaggccggcaagacaggccccatgaaaaccctgctggttagagtgatgacacccgatctgagagagcggctggaaaacctgagaaagaagcctgaaaatatcccccagcccatcagcaatacatctagagccaacctgaataagctgctgaccgattacaccgaaatgaagaaggcgatcctgcatgtgtactgggaagagttccagaaggaccctgtgggcctgatgagccgggtggcccagcctgccagcaagaagatcgatcagaacaagctgaaacctgagatggacgagaagggcaacctgaccaccgccggctttgcctgctctcagtgtggccagcccctgttcgtgtacaagctggagcaggtgtctgagaagggcaaggcttacaccaactacttcggacggtgcaatgtggccgagcacgaaaagctgatcctgctggcccagctgaagcccgagaaggatagcgacgaagccgtgacatatagcctgggaaagtttgggcagagggccctggatttctacagcattcatgtgaccaaggagtccacccaccccgtgaagcccctggcccagatcgccggaaacagatacgcctccggacctgtgggaaaggccctgagcgacgcatgtatgggcacaatcgcctccttcctgtctaagtaccaggacatcatcatcgaacaccagaaggtggtgaagggcaaccagaagagactggagagcctgcgggagctggccggcaaggaaaacctggaataccctagcgtgaccctgccacctcagcctcacaccaaggagggcgttgatgcctacaacgaagtgatcgcccgggtgcgaatgtgggtgaacctgaacctgtggcagaagctgaagctaagcagagatgatgccaagcctctgctgagactgaagggattcccttcctttcctctggtcgagagacaggccaacgaagtggactggtgggacatggtgtgtaacgtgaagaagctgatcaacgagaaaaaggaggatggcaaggtgttttggcagaatctggctggctacaagagacaggaagccctgagaccatacctgagcagcgaggaagatcggaagaagggaaagaaattcgctcggtaccagctgggcgacctgctgctgcacctggaaaagaagcacggcgaggactggggaaaggtgtacgacgaggcctgggagcggattgacaagaaagtggaaggcctgagcaagcacatcaagctggaagaggaacggagaagcgaggacgcccagagcaaggccgccctgaccgactggctgcgggctaaggccagcttcgtgatcgagggcctgaaggaggccgacaaggacgagttctgcagatgcgagctgaagctgcagaagtggtacggggacctgcggggaaagcccttcgccatcgaagccgagaacagcatcctggacatcagcggcttcagcaagcagtacaactgtgccttcatctggcagaaggacggcgtgaagaagctgaacctgtacctgatcatcaactacttcaagggcggcaagctgcggttcaagaagatcaaacctgaagccttcgaagccaacagattctacaccgtgatcaacaaaaagagcggcgagatcgtgcccatggaggtgaacttcaacttcgacgaccccaacctgatcatcctgcctctggcctttggcaagagacagggcagagaattcatctggaacgacctgctgtccctggaaaccggcagcctgaagctggccaacggaagagtgatcgagaagacactgtacaacagaagaacccggcaggatgagcctgccctgttcgtggccctgaccttcgagcggcgggaggtcctggactcctccaatatcaaaccaatgaacctgatcggcgtggcaagaggcgaaaacatccccgccgtgatcgccctgaccgaccccgagggctgcccactgagccggtttaaggatagcctgggaaacccaacccacatcctgagaatcggcgagagctataaggagaagcagcggaccatccaggccaagaaggaggtggagcagcggagagccggcggctacagccggaagtacgccagcaaagccaagaatctggcagacgatatggtgagaaacaccgctagagatctgctgtactacgccgtgacccaggatgccatgctgatcttcgccaacctgagccggggcttcggccggcagggcaagcggaccttcatggccgagagacagtacacacggatggaggactggctgaccgccaagctggcctacgagggcctgagcaagacctacctgtccaagacactggcccagtacacctccaagacatgcagcaactgtgggtttaccatcaccagcgccgactacgacagggtgctggagaagctgaagaagacagcaacaggctggatgaccacaattaacggcaaggagctgaaggtggagggccagattacctactacaacagatacaagagacagaacgtagtcaaggacctgtccgtcgagctggatagactgagcgaagaatctgtgaacaacgacatctcctcctggacaaagggcagaagcggagaagctctgagcctcctgaagaaaagattctcccatagacccgtgcaggagaagttcgtgtgcctgaactgcggcttcgagacacacgcagccgagcaagccgccctgaacatcgccagatcctggctgttcctgcggagccaggagtacaagaaataccagacaaacaagacaaccggcaacaccgataagagagccttcgtcgagacctggcagtccttttaccggaagaagcttaaggaggtgtggaaacctgccgtgcggtctggcggatctggcggaggctccaccagccccaagaaaaagagaaaagtctaagctgccttctgcggggcttgccttctggccatgcccttcttctctcccttgcacctgtacctcttggtctttgaataaagcctgagtaggaaggctagcaaaaaaaaaaaaaaaaaaaaaaaaaaaaaaaaaaaaaaaaaaaaaaaaaaaaaaaaaaaaaaaaaaaaaaaaaaaaaaaa

SEQ ID NO: 10386 - RNA, 8787 nt, synthetic construct
  source 1..8787: mol_type = other RNA
aggaaataagagagaaaagaagagtaagaagaaatataagagccaccatggcccctaagaagaagcgtaaagtgagccggatgaaccacgaccaggagttcgacccccctaaggtgtaccctcccgtccccgccgagaagagaaagcccatccgggtcctgagcctgttcgatggcatcgccaccggtctgctggtgctgaaggacctgggcatccaggtggataggtacattgcctccgaggtgtgcgaggactccatcaccgtgggaatggtgcgtcatcagggcaagatcatgtacgtgggcgacgtgcggagcgtgacacagaagcatatccaggagtggggccctttcgacctggtgatcggcggcagcccttgcaatgacctgagcatcgtgaacccagcccggaagggcctgtacgagggaaccggcagactgttcttcgagttttacagactgctgcacgacgcccggcctaaggaaggcgacgaccggcccttcttttggctgttcgagaatgtggtggccatgggagtcagcgacaagcgggatattagccggttcctggagagcaaccccgtgatgatcgatgccaaggaagtgagcgccgcccaccgggccagatacttctggggcaatctgcctggcatgaacagacccctggccagcaccgtgaacgacaagctggagctgcaggagtgcctggagcacggccggatcgccaagttcagcaaggtgagaaccatcaccacccgaagcaacagcatcaaacaaggcaaggaccagcactttcctgtgttcatgaacgagaaggaggacatcctgtggtgtaccgagatggagagagtgttcgggttcccagtccactacacagatgtcagcaacatgtctagactggccagacagagactgctgggaagaagctggtccgtccctgtgatcagacacctgttcgcccctctgaaggagtacttcgcctgcgtgagcagcggcaacagcaacgccaacagccggggccccagcttctctagcggcctggtgccactgtccctgagagggagccacatgggccccatggagatctacaaaaccgtgagcgcctggaagcggcagcctgtgcgcgtgctgagcctgtttcggaatatcgataaagtcctgaaaagcctgggattcctggagagcggctctggctccggcggtggcaccctgaagtacgtggaggatgtgacaaacgtggtcagacgggatgtggagaagtggggccccttcgatctggtgtacggcagcacccaacccctgggcagctcttgtgaccggtgccctggctggtacatgtttcagttccaccggatcctgcagtacgccctgccgagacaggagtcccagcggccattcttttggattttcatggacaacttgctgctgaccgaggatgaccaggaaactaccactcggttcctgcagaccgaagccgtgaccctgcaggacgtgagaggccgggactaccagaacgccatgcgggtgtggtccaacatccctggactgaaaagcaagcacgcacctctgacccctaaagaagaggagtacctgcaggcccaggtgcggagcagaagcaagctggacgcccctaaggtggatctgctggtgaagaattgcctcctgcccctgagagagtacttcaagtatttcagccagaatagtctgcccctgggaggcagcggcggcggcctgagggagagcgtgaccttcaaggacgtggccgtggacttcaccggcgaggagtggaggaggctggaccccgcccagagggccctgtacagggacgtgatgctggagaactacgagaacctggtgagcctgggcctgcccgtgagcaagctggacgtgatcagcctgctggagaggggcgaggccccctggtggctggagggcggcggcctgcagagcccctgcagcgacgccctgagccagggcggcccaagcagcggcgcccctcctcccagcggcggcaggcggcccaagcagcggcgcccctcctcccagcggcggcagcccagccggctccccaacctctaccgaggagggcacctctgagtccgccacccccgagagcggccctggcacctccaccgagcccagcgagggcagcgcacccggcagccctgccggcagccccacctccacagaggagggaaccagcaccgagcccagcgaaggcagcgccccaggcaccagcaccgagcctagtgagcaggagattaaacggatcaacaagatcagaagaagacttgtgaaagacagcaacaccaagaaggccggcaagacaggccccatgaaaaccctgctggttagagtgatgacacccgatctgagagagcggctggaaaacctgagaaagaagcctgaaaatatcccccagcccatcagcaatacatctagagccaacctgaataagctgctgaccgattacaccgaaatgaagaaggcgatcctgcatgtgtactgggaagagttccagaaggaccctgtgggcctgatgagccgggtggcccagcctgccagcaagaagatcgatcagaacaagctgaaacctgagatggacgagaagggcaacctgaccaccgccggctttgcctgctctcagtgtggccagcccctgttcgtgtacaagctggagcaggtgtctgagaagggcaaggcttacaccaactacttcggacggtgcaatgtggccgagcacgaaaagctgatcctgctggcccagctgaagcccgagaaggatagcgacgaagccgtgacatatagcctgggaaagtttgggcagagggccctggatttctacagcattcatgtgaccaaggagtccacccaccccgtgaagcccctggcccagatcgccggaaacagatacgcctccggacctgtgggaaaggccctgagcgacgcatgtatgggcacaatcgcctccttcctgtctaagtaccaggacatcatcatcgaacaccagaaggtggtgaagggcaaccagaagagactggagagcctgcgggagctggccggcaaggaaaacctggaataccctagcgtgaccctgccacctcagcctcacaccaaggagggcgttgatgcctacaacgaagtgatcgcccgggtgcgaatgtgggtgaacctgaacctgtggcagaagctgaagctaagcagagatgatgccaagcctctgctgagactgaagggattcccttcctttcctctggtcgagagacaggccaacgaagtggactggtgggacatggtgtgtaacgtgaagaagctgatcaacgagaaaaaggaggatggcaaggtgttttggcagaatctggctggctacaagagacaggaagccctgagaccatacctgagcagcgaggaagatcggaagaagggaaagaaattcgctcggtaccagctgggcgacctgctgctgcacctggaaaagaagcacggcgaggactggggaaaggtgtacgacgaggcctgggagcggattgacaagaaagtggaaggcctgagcaagcacatcaagctggaagaggaacggagaagcgaggacgcccagagcaaggccgccctgaccgactggctgcgggctaaggccagcttcgtgatcgagggcctgaaggaggccgacaaggacgagttctgcagatgcgagctgaagctgcagaagtggtacggggacctgcggggaaagcccttcgccatcgaagccgagaacagcatcctggacatcagcggcttcagcaagcagtacaactgtgccttcatctggcagaaggacggcgtgaagaagctgaacctgtacctgatcatcaactacttcaagggcggcaagctgcggttcaagaagatcaaacctgaagccttcgaagccaacagattctacaccgtgatcaacaaaaagagcggcgagatcgtgcccatggaggtgaacttcaacttcgacgaccccaacctgatcatcctgcctctggcctttggcaagagacagggcagagaattcatctggaacgacctgctgtccctggaaaccggcagcctgaagctggccaacggaagagtgatcgagaagacactgtacaacagaagaacccggcaggatgagcctgccctgttcgtggccctgaccttcgagcggcgggaggtcctggactcctccaatatcaaaccaatgaacctgatcggcgtggcaagaggcgaaaacatccccgccgtgatcgccctgaccgaccccgagggctgcccactgagccggtttaaggatagcctgggaaacccaacccacatcctgagaatcggcgagagctataaggagaagcagcggaccatccaggccaagaaggaggtggagcagcggagagccggcggctacagccggaagtacgccagcaaagccaagaatctggcagacgatatggtgagaaacaccgctagagatctgctgtactacgccgtgacccaggatgccatgctgatcttcgccaacctgagccggggcttcggccggcagggcaagcggaccttcatggccgagagacagtacacacggatggaggactggctgaccgccaagctggcctacgagggcctgagcaagacctacctgtccaagacactggcccagtacacctccaagacatgcagcaactgtgggtttaccatcaccagcgccgactacgacagggtgctggagaagctgaagaagacagcaacaggctggatgaccacaattaacggcaaggagctgaaggtggagggccagattacctactacaacagatacaagagacagaacgtagtcaaggacctgtccgtcgagctggatagactgagcgaagaatctgtgaacaacgacatctcctcctggacaaagggcagaagcggagaagctctgagcctcctgaagaaaagattctcccatagacccgtgcaggagaagttcgtgtgcctgaactgcggcttcgagacacacgcagccgagcaagccgccctgaacatcgccagatcctggctgttcctgcggagccaggagtacaagaaataccagacaaacaagacaaccggcaacaccgataagagagccttcgtcgagacctggcagtccttttaccggaagaagcttaaggaggtgtggaaacctgccgtgcggtctggcggatctggcggaggctccaccagccccaagaaaaagagaaaagtctaagctgccttctgcggggcttgccttctggccatgcccttcttctctcccttgcacctgtacctcttggtctttgaataaagcctgagtaggaaggctagcaaaaaaaaaaaaaaaaaaaaaaaaaaaaaaaaaaaaaaaaaaaaaaaaaaaaaaaaaaaaaaaaaaaaaaaaaaaaaaaagcccagccggctccccaacctctaccgaggagggcacctctgagtccgccacccccgagagcggccctggcacctccaccgagcccagcgagggcagcgcacccggcagccctgccggcagccccacctccacagaggagggaaccagcaccgagcccagcgaaggcagcgccccaggcaccagcaccgagcctagtgagcaggagattaaacggatcaacaagatcagaagaagacttgtgaaagacagcaacaccaagaaggccggcaagacaggccccatgaaaaccctgctggttagagtgatgacacccgatctgagagagcggctggaaaacctgagaaagaagcctgaaaatatcccccagcccatcagcaatacatctagagccaacctgaataagctgctgaccgattacaccgaaatgaagaaggcgatcctgcatgtgtactgggaagagttccagaaggaccctgtgggcctgatgagccgggtggcccagcctgccagcaagaagatcgatcagaacaagctgaaacctgagatggacgagaagggcaacctgaccaccgccggctttgcctgctctcagtgtggccagcccctgttcgtgtacaagctggagcaggtgtctgagaagggcaaggcttacaccaactacttcggacggtgcaatgtggccgagcacgaaaagctgatcctgctggcccagctgaagcccgagaaggatagcgacgaagccgtgacatatagcctgggaaagtttgggcagagggccctggatttctacagcattcatgtgaccaaggagtccacccaccccgtgaagcccctggcccagatcgccggaaacagatacgcctccggacctgtgggaaaggccctgagcgacgcatgtatgggcacaatcgcctccttcctgtctaagtaccaggacatcatcatcgaacaccagaaggtggtgaagggcaaccagaagagactggagagcctgcgggagctggccggcaaggaaaacctggaataccctagcgtgaccctgccacctcagcctcacaccaaggagggcgttgatgcctacaacgaagtgatcgcccgggtgcgaatgtgggtgaacctgaacctgtggcagaagctgaagctaagcagagatgatgccaagcctctgctgagactgaagggattcccttcctttcctctggtcgagagacaggccaacgaagtggactggtgggacatggtgtgtaacgtgaagaagctgatcaacgagaaaaaggaggatggcaaggtgttttggcagaatctggctggctacaagagacaggaagccctgagaccatacctgagcagcgaggaagatcggaagaagggaaagaaattcgctcggtaccagctgggcgacctgctgctgcacctggaaaagaagcacggcgaggactggggaaaggtgtacgacgaggcctgggagcggattgacaagaaagtggaaggcctgagcaagcacatcaagctggaagaggaacggagaagcgaggacgcccagagcaaggccgccctgaccgactggctgcgggctaaggccagcttcgtgatcgagggcctgaaggaggccgacaaggacgagttctgcagatgcgagctgaagctgcagaagtggtacggggacctgcggggaaagcccttcgccatcgaagccgagaacagcatcctggacatcagcggcttcagcaagcagtacaactgtgccttcatctggcagaaggacggcgtgaagaagctgaacctgtacctgatcatcaactacttcaagggcggcaagctgcggttcaagaagatcaaacctgaagccttcgaagccaacagattctacaccgtgatcaacaaaaagagcggcgagatcgtgcccatggaggtgaacttcaacttcgacgaccccaacctgatcatcctgcctctggcctttggcaagagacagggcagagaattcatctggaacgacctgctgtccctggaaaccggcagcctgaagctggccaacggaagagtgatcgagaagacactgtacaacagaagaacccggcaggatgagcctgccctgttcgtggccctgaccttcgagcggcgggaggtcctggactcctccaatatcaaaccaatgaacctgatcggcgtggcaagaggcgaaaacatccccgccgtgatcgccctgaccgaccccgagggctgcccactgagccggtttaaggatagcctgggaaacccaacccacatcctgagaatcggcgagagctataaggagaagcagcggaccatccaggccaagaaggaggtggagcagcggagagccggcggctacagccggaagtacgccagcaaagccaagaatctggcagacgatatggtgagaaacaccgctagagatctgctgtactacgccgtgacccaggatgccatgctgatcttcgccaacctgagccggggcttcggccggcagggcaagcggaccttcatggccgagagacagtacacacggatggaggactggctgaccgccaagctggcctacgagggcctgagcaagacctacctgtccaagacactggcccagtacacctccaagacatgcagcaactgtgggtttaccatcaccagcgccgactacgacagggtgctggagaagctgaagaagacagcaacaggctggatgaccacaattaacggcaaggagctgaaggtggagggccagattacctactacaacagatacaagagacagaacgtagtcaaggacctgtccgtcgagctggatagactgagcgaagaatctgtgaacaacgacatctcctcctggacaaagggcagaagcggagaagctctgagcctcctgaagaaaagattctcccatagacccgtgcaggagaagttcgtgtgcctgaactgcggcttcgagacacacgcagccgagcaagccgccctgaacatcgccagatcctggctgttcctgcggagccaggagtacaagaaataccagacaaacaagacaaccggcaacaccgataagagagccttcgtcgagacctggcagtccttttaccggaagaagcttaaggaggtgtggaaacctgccgtgcggtctggcggatctggcggaggctccaccagccccaagaaaaagagaaaagtctaagctgccttctgcggggcttgccttctggccatgcccttcttctctcccttgcacctgtacctcttggtctttgaataaagcctgagtaggaaggctagcaaaaaaaaaaaaaaaaaaaaaaaaaaaaaaaaaaaaaaaaaaaaaaaaaaaaaaaaaaaaaaaaaaaaaaaaaaaaaaaa

SEQ ID NO: 10387 - RNA, 8787 nt, synthetic construct
  source 1..8787: mol_type = other RNA
aggaaataagagagaaaagaagagtaagaagaaatataagagccaccatggcccctaagaagaagcgtaaagtgagccggatgaaccacgaccaggagttcgacccccctaaggtgtaccctcccgtccccgccgagaagagaaagcccatccgggtcctgagcctgttcgatggcatcgccaccggtctgctggtgctgaaggacctgggcatccaggtggataggtacattgcctccgaggtgtgcgaggactccatcaccgtgggaatggtgcgtcatcagggcaagatcatgtacgtgggcgacgtgcggagcgtgacacagaagcatatccaggagtggggccctttcgacctggtgatcggcggcagcccttgcaatgacctgagcatcgtgaacccagcccggaagggcctgtacgagggaaccggcagactgttcttcgagttttacagactgctgcacgacgcccggcctaaggaaggcgacgaccggcccttcttttggctgttcgagaatgtggtggccatgggagtcagcgacaagcgggatattagccggttcctggagagcaaccccgtgatgatcgatgccaaggaagtgagcgccgcccaccgggccagatacttctggggcaatctgcctggcatgaacagacccctggccagcaccgtgaacgacaagctggagctgcaggagtgcctggagcacggccggatcgccaagttcagcaaggtgagaaccatcaccacccgaagcaacagcatcaaacaaggcaaggaccagcactttcctgtgttcatgaacgagaaggaggacatcctgtggtgtaccgagatggagagagtgttcgggttcccagtccactacacagatgtcagcaacatgtctagactggccagacagagactgctgggaagaagctggtccgtccctgtgatcagacacctgttcgcccctctgaaggagtacttcgcctgcgtgagcagcggcaacagcaacgccaacagccggggccccagcttctctagcggcctggtgccactgtccctgagagggagccacatgggccccatggagatctacaaaaccgtgagcgcctggaagcggcagcctgtgcgcgtgctgagcctgtttcggaatatcgataaagtcctgaaaagcctgggattcctggagagcggctctggctccggcggtggcaccctgaagtacgtggaggatgtgacaaacgtggtcagacgggatgtggagaagtggggccccttcgatctggtgtacggcagcacccaacccctgggcagctcttgtgaccggtgccctggctggtacatgtttcagttccaccggatcctgcagtacgccctgccgagacaggagtcccagcggccattcttttggattttcatggacaacttgctgctgaccgaggatgaccaggaaactaccactcggttcctgcagaccgaagccgtgaccctgcaggacgtgagaggccgggactaccagaacgccatgcgggtgtggtccaacatccctggactgaaaagcaagcacgcacctctgacccctaaagaagaggagtacctgcaggcccaggtgcggagcagaagcaagctggacgcccctaaggtggatctgctggtgaagaattgcctcctgcccctgagagagtacttcaagtatttcagccagaatagtctgcccctgggaggcagcggcggcggcttccagggccccgtgaccttcgaggaggtggccgtgtacttcaccagcgaggagtgggccctgctggaccccacccagagggccctgtactgggacgtgatgcaggagaactacgagaacgtgaccagcctgggcttccccgtgagcaagccccacatcatcagccagctggagcagggcgccgagccctgggtgcccgacctgcagggcagcgaggagatcctgagcaagcaccagaggatcggcggcccaagcagcggcgcccctcctcccagcggcggcaggcggcccaagcagcggcgcccctcctcccagcggcggcagcccagccggctccccaacctctaccgaggagggcacctctgagtccgccacccccgagagcggccctggcacctccaccgagcccagcgagggcagcgcacccggcagccctgccggcagccccacctccacagaggagggaaccagcaccgagcccagcgaaggcagcgccccaggcaccagcaccgagcctagtgagcaggagattaaacggatcaacaagatcagaagaagacttgtgaaagacagcaacaccaagaaggccggcaagacaggccccatgaaaaccctgctggttagagtgatgacacccgatctgagagagcggctggaaaacctgagaaagaagcctgaaaatatcccccagcccatcagcaatacatctagagccaacctgaataagctgctgaccgattacaccgaaatgaagaaggcgatcctgcatgtgtactgggaagagttccagaaggaccctgtgggcctgatgagccgggtggcccagcctgccagcaagaagatcgatcagaacaagctgaaacctgagatggacgagaagggcaacctgaccaccgccggctttgcctgctctcagtgtggccagcccctgttcgtgtacaagctggagcaggtgtctgagaagggcaaggcttacaccaactacttcggacggtgcaatgtggccgagcacgaaaagctgatcctgctggcccagctgaagcccgagaaggatagcgacgaagccgtgacatatagcctgggaaagtttgggcagagggccctggatttctacagcattcatgtgaccaaggagtccacccaccccgtgaagcccctggcccagatcgccggaaacagatacgcctccggacctgtgggaaaggccctgagcgacgcatgtatgggcacaatcgcctccttcctgtctaagtaccaggacatcatcatcgaacaccagaaggtggtgaagggcaaccagaagagactggagagcctgcgggagctggccggcaaggaaaacctggaataccctagcgtgaccctgccacctcagcctcacaccaaggagggcgttgatgcctacaacgaagtgatcgcccgggtgcgaatgtgggtgaacctgaacctgtggcagaagctgaagctaagcagagatgatgccaagcctctgctgagactgaagggattcccttcctttcctctggtcgagagacaggccaacgaagtggactggtgggacatggtgtgtaacgtgaagaagctgatcaacgagaaaaaggaggatggcaaggtgttttggcagaatctggctggctacaagagacaggaagccctgagaccatacctgagcagcgaggaagatcggaagaagggaaagaaattcgctcggtaccagctgggcgacctgctgctgcacctggaaaagaagcacggcgaggactggggaaaggtgtacgacgaggcctgggagcggattgacaagaaagtggaaggcctgagcaagcacatcaagctggaagaggaacggagaagcgaggacgcccagagcaaggccgccctgaccgactggctgcgggctaaggccagcttcgtgatcgagggcctgaaggaggccgacaaggacgagttctgcagatgcgagctgaagctgcagaagtggtacggggacctgcggggaaagcccttcgccatcgaagccgagaacagcatcctggacatcagcggcttcagcaagcagtacaactgtgccttcatctggcagaaggacggcgtgaagaagctgaacctgtacctgatcatcaactacttcaagggcggcaagctgcggttcaagaagatcaaacctgaagccttcgaagccaacagattctacaccgtgatcaacaaaaagagcggcgagatcgtgcccatggaggtgaacttcaacttcgacgaccccaacctgatcatcctgcctctggcctttggcaagagacagggcagagaattcatctggaacgacctgctgtccctggaaaccggcagcctgaagctggccaacggaagagtgatcgagaagacactgtacaacagaagaacccggcaggatgagcctgccctgttcgtggccctgaccttcgagcggcgggaggtcctggactcctccaatatcaaaccaatgaacctgatcggcgtggcaagaggcgaaaacatccccgccgtgatcgccctgaccgaccccgagggctgcccactgagccggtttaaggatagcctgggaaacccaacccacatcctgagaatcggcgagagctataaggagaagcagcggaccatccaggccaagaaggaggtggagcagcggagagccggcggctacagccggaagtacgccagcaaagccaagaatctggcagacgatatggtgagaaacaccgctagagatctgctgtactacgccgtgacccaggatgccatgctgatcttcgccaacctgagccggggcttcggccggcagggcaagcggaccttcatggccgagagacagtacacacggatggaggactggctgaccgccaagctggcctacgagggcctgagcaagacctacctgtccaagacactggcccagtacacctccaagacatgcagcaactgtgggtttaccatcaccagcgccgactacgacagggtgctggagaagctgaagaagacagcaacaggctggatgaccacaattaacggcaaggagctgaaggtggagggccagattacctactacaacagatacaagagacagaacgtagtcaaggacctgtccgtcgagctggatagactgagcgaagaatctgtgaacaacgacatctcctcctggacaaagggcagaagcggagaagctctgagcctcctgaagaaaagattctcccatagacccgtgcaggagaagttcgtgtgcctgaactgcggcttcgagacacacgcagccgagcaagccgccctgaacatcgccagatcctggctgttcctgcggagccaggagtacaagaaataccagacaaacaagacaaccggcaacaccgataagagagccttcgtcgagacctggcagtccttttaccggaagaagcttaaggaggtgtggaaacctgccgtgcggtctggcggatctggcggaggctccaccagccccaagaaaaagagaaaagtctaagctgccttctgcggggcttgccttctggccatgcccttcttctctcccttgcacctgtacctcttggtctttgaataaagcctgagtaggaaggctagcaaaaaaaaaaaaaaaaaaaaaaaaaaaaaaaaaaaaaaaaaaaaaaaaaaaaaaaaaaaaaaaaaaaaaaaaaaaaaaaagcccagccggctccccaacctctaccgaggagggcacctctgagtccgccacccccgagagcggccctggcacctccaccgagcccagcgagggcagcgcacccggcagccctgccggcagccccacctccacagaggagggaaccagcaccgagcccagcgaaggcagcgccccaggcaccagcaccgagcctagtgagcaggagattaaacggatcaacaagatcagaagaagacttgtgaaagacagcaacaccaagaaggccggcaagacaggccccatgaaaaccctgctggttagagtgatgacacccgatctgagagagcggctggaaaacctgagaaagaagcctgaaaatatcccccagcccatcagcaatacatctagagccaacctgaataagctgctgaccgattacaccgaaatgaagaaggcgatcctgcatgtgtactgggaagagttccagaaggaccctgtgggcctgatgagccgggtggcccagcctgccagcaagaagatcgatcagaacaagctgaaacctgagatggacgagaagggcaacctgaccaccgccggctttgcctgctctcagtgtggccagcccctgttcgtgtacaagctggagcaggtgtctgagaagggcaaggcttacaccaactacttcggacggtgcaatgtggccgagcacgaaaagctgatcctgctggcccagctgaagcccgagaaggatagcgacgaagccgtgacatatagcctgggaaagtttgggcagagggccctggatttctacagcattcatgtgaccaaggagtccacccaccccgtgaagcccctggcccagatcgccggaaacagatacgcctccggacctgtgggaaaggccctgagcgacgcatgtatgggcacaatcgcctccttcctgtctaagtaccaggacatcatcatcgaacaccagaaggtggtgaagggcaaccagaagagactggagagcctgcgggagctggccggcaaggaaaacctggaataccctagcgtgaccctgccacctcagcctcacaccaaggagggcgttgatgcctacaacgaagtgatcgcccgggtgcgaatgtgggtgaacctgaacctgtggcagaagctgaagctaagcagagatgatgccaagcctctgctgagactgaagggattcccttcctttcctctggtcgagagacaggccaacgaagtggactggtgggacatggtgtgtaacgtgaagaagctgatcaacgagaaaaaggaggatggcaaggtgttttggcagaatctggctggctacaagagacaggaagccctgagaccatacctgagcagcgaggaagatcggaagaagggaaagaaattcgctcggtaccagctgggcgacctgctgctgcacctggaaaagaagcacggcgaggactggggaaaggtgtacgacgaggcctgggagcggattgacaagaaagtggaaggcctgagcaagcacatcaagctggaagaggaacggagaagcgaggacgcccagagcaaggccgccctgaccgactggctgcgggctaaggccagcttcgtgatcgagggcctgaaggaggccgacaaggacgagttctgcagatgcgagctgaagctgcagaagtggtacggggacctgcggggaaagcccttcgccatcgaagccgagaacagcatcctggacatcagcggcttcagcaagcagtacaactgtgccttcatctggcagaaggacggcgtgaagaagctgaacctgtacctgatcatcaactacttcaagggcggcaagctgcggttcaagaagatcaaacctgaagccttcgaagccaacagattctacaccgtgatcaacaaaaagagcggcgagatcgtgcccatggaggtgaacttcaacttcgacgaccccaacctgatcatcctgcctctggcctttggcaagagacagggcagagaattcatctggaacgacctgctgtccctggaaaccggcagcctgaagctggccaacggaagagtgatcgagaagacactgtacaacagaagaacccggcaggatgagcctgccctgttcgtggccctgaccttcgagcggcgggaggtcctggactcctccaatatcaaaccaatgaacctgatcggcgtggcaagaggcgaaaacatccccgccgtgatcgccctgaccgaccccgagggctgcccactgagccggtttaaggatagcctgggaaacccaacccacatcctgagaatcggcgagagctataaggagaagcagcggaccatccaggccaagaaggaggtggagcagcggagagccggcggctacagccggaagtacgccagcaaagccaagaatctggcagacgatatggtgagaaacaccgctagagatctgctgtactacgccgtgacccaggatgccatgctgatcttcgccaacctgagccggggcttcggccggcagggcaagcggaccttcatggccgagagacagtacacacggatggaggactggctgaccgccaagctggcctacgagggcctgagcaagacctacctgtccaagacactggcccagtacacctccaagacatgcagcaactgtgggtttaccatcaccagcgccgactacgacagggtgctggagaagctgaagaagacagcaacaggctggatgaccacaattaacggcaaggagctgaaggtggagggccagattacctactacaacagatacaagagacagaacgtagtcaaggacctgtccgtcgagctggatagactgagcgaagaatctgtgaacaacgacatctcctcctggacaaagggcagaagcggagaagctctgagcctcctgaagaaaagattctcccatagacccgtgcaggagaagttcgtgtgcctgaactgcggcttcgagacacacgcagccgagcaagccgccctgaacatcgccagatcctggctgttcctgcggagccaggagtacaagaaataccagacaaacaagacaaccggcaacaccgataagagagccttcgtcgagacctggcagtccttttaccggaagaagcttaaggaggtgtggaaacctgccgtgcggtctggcggatctggcggaggctccaccagccccaagaaaaagagaaaagtctaagctgccttctgcggggcttgccttctggccatgcccttcttctctcccttgcacctgtacctcttggtctttgaataaagcctgagtaggaaggctagcaaaaaaaaaaaaaaaaaaaaaaaaaaaaaaaaaaaaaaaaaaaaaaaaaaaaaaaaaaaaaaaaaaaaaaaaaaaaaaaa

SEQ ID NO: 10388 - RNA, 8787 nt, synthetic construct
  source 1..8787: mol_type = other RNA
aggaaataagagagaaaagaagagtaagaagaaatataagagccaccatggcccctaagaagaagcgtaaagtgagccggatgaaccacgaccaggagttcgacccccctaaggtgtaccctcccgtccccgccgagaagagaaagcccatccgggtcctgagcctgttcgatggcatcgccaccggtctgctggtgctgaaggacctgggcatccaggtggataggtacattgcctccgaggtgtgcgaggactccatcaccgtgggaatggtgcgtcatcagggcaagatcatgtacgtgggcgacgtgcggagcgtgacacagaagcatatccaggagtggggccctttcgacctggtgatcggcggcagcccttgcaatgacctgagcatcgtgaacccagcccggaagggcctgtacgagggaaccggcagactgttcttcgagttttacagactgctgcacgacgcccggcctaaggaaggcgacgaccggcccttcttttggctgttcgagaatgtggtggccatgggagtcagcgacaagcgggatattagccggttcctggagagcaaccccgtgatgatcgatgccaaggaagtgagcgccgcccaccgggccagatacttctggggcaatctgcctggcatgaacagacccctggccagcaccgtgaacgacaagctggagctgcaggagtgcctggagcacggccggatcgccaagttcagcaaggtgagaaccatcaccacccgaagcaacagcatcaaacaaggcaaggaccagcactttcctgtgttcatgaacgagaaggaggacatcctgtggtgtaccgagatggagagagtgttcgggttcccagtccactacacagatgtcagcaacatgtctagactggccagacagagactgctgggaagaagctggtccgtccctgtgatcagacacctgttcgcccctctgaaggagtacttcgcctgcgtgagcagcggcaacagcaacgccaacagccggggccccagcttctctagcggcctggtgccactgtccctgagagggagccacatgggccccatggagatctacaaaaccgtgagcgcctggaagcggcagcctgtgcgcgtgctgagcctgtttcggaatatcgataaagtcctgaaaagcctgggattcctggagagcggctctggctccggcggtggcaccctgaagtacgtggaggatgtgacaaacgtggtcagacgggatgtggagaagtggggccccttcgatctggtgtacggcagcacccaacccctgggcagctcttgtgaccggtgccctggctggtacatgtttcagttccaccggatcctgcagtacgccctgccgagacaggagtcccagcggccattcttttggattttcatggacaacttgctgctgaccgaggatgaccaggaaactaccactcggttcctgcagaccgaagccgtgaccctgcaggacgtgagaggccgggactaccagaacgccatgcgggtgtggtccaacatccctggactgaaaagcaagcacgcacctctgacccctaaagaagaggagtacctgcaggcccaggtgcggagcagaagcaagctggacgcccctaaggtggatctgctggtgaagaattgcctcctgcccctgagagagtacttcaagtatttcagccagaatagtctgcccctgggaggcagcggcggcggcccccaggagcccgtgaccttcgccgacgtggccgtgctgttcacccccgaggagtggctgttcctggacagcgcccagaagagcctgtacagggacgtgatgctggagaactacaggaacctggccagcgtgggcgaccagctgtgcaagaccaggatgagcagccacatggagcagagggaggagctgtgcgtgaccgagaggggcgtgttccccggcgcccacctgggcccccacctgcagggcggcccaagcagcggcgcccctcctcccagcggcggcaggcggcccaagcagcggcgcccctcctcccagcggcggcagcccagccggctccccaacctctaccgaggagggcacctctgagtccgccacccccgagagcggccctggcacctccaccgagcccagcgagggcagcgcacccggcagccctgccggcagccccacctccacagaggagggaaccagcaccgagcccagcgaaggcagcgccccaggcaccagcaccgagcctagtgagcaggagattaaacggatcaacaagatcagaagaagacttgtgaaagacagcaacaccaagaaggccggcaagacaggccccatgaaaaccctgctggttagagtgatgacacccgatctgagagagcggctggaaaacctgagaaagaagcctgaaaatatcccccagcccatcagcaatacatctagagccaacctgaataagctgctgaccgattacaccgaaatgaagaaggcgatcctgcatgtgtactgggaagagttccagaaggaccctgtgggcctgatgagccgggtggcccagcctgccagcaagaagatcgatcagaacaagctgaaacctgagatggacgagaagggcaacctgaccaccgccggctttgcctgctctcagtgtggccagcccctgttcgtgtacaagctggagcaggtgtctgagaagggcaaggcttacaccaactacttcggacggtgcaatgtggccgagcacgaaaagctgatcctgctggcccagctgaagcccgagaaggatagcgacgaagccgtgacatatagcctgggaaagtttgggcagagggccctggatttctacagcattcatgtgaccaaggagtccacccaccccgtgaagcccctggcccagatcgccggaaacagatacgcctccggacctgtgggaaaggccctgagcgacgcatgtatgggcacaatcgcctccttcctgtctaagtaccaggacatcatcatcgaacaccagaaggtggtgaagggcaaccagaagagactggagagcctgcgggagctggccggcaaggaaaacctggaataccctagcgtgaccctgccacctcagcctcacaccaaggagggcgttgatgcctacaacgaagtgatcgcccgggtgcgaatgtgggtgaacctgaacctgtggcagaagctgaagctaagcagagatgatgccaagcctctgctgagactgaagggattcccttcctttcctctggtcgagagacaggccaacgaagtggactggtgggacatggtgtgtaacgtgaagaagctgatcaacgagaaaaaggaggatggcaaggtgttttggcagaatctggctggctacaagagacaggaagccctgagaccatacctgagcagcgaggaagatcggaagaagggaaagaaattcgctcggtaccagctgggcgacctgctgctgcacctggaaaagaagcacggcgaggactggggaaaggtgtacgacgaggcctgggagcggattgacaagaaagtggaaggcctgagcaagcacatcaagctggaagaggaacggagaagcgaggacgcccagagcaaggccgccctgaccgactggctgcgggctaaggccagcttcgtgatcgagggcctgaaggaggccgacaaggacgagttctgcagatgcgagctgaagctgcagaagtggtacggggacctgcggggaaagcccttcgccatcgaagccgagaacagcatcctggacatcagcggcttcagcaagcagtacaactgtgccttcatctggcagaaggacggcgtgaagaagctgaacctgtacctgatcatcaactacttcaagggcggcaagctgcggttcaagaagatcaaacctgaagccttcgaagccaacagattctacaccgtgatcaacaaaaagagcggcgagatcgtgcccatggaggtgaacttcaacttcgacgaccccaacctgatcatcctgcctctggcctttggcaagagacagggcagagaattcatctggaacgacctgctgtccctggaaaccggcagcctgaagctggccaacggaagagtgatcgagaagacactgtacaacagaagaacccggcaggatgagcctgccctgttcgtggccctgaccttcgagcggcgggaggtcctggactcctccaatatcaaaccaatgaacctgatcggcgtggcaagaggcgaaaacatccccgccgtgatcgccctgaccgaccccgagggctgcccactgagccggtttaaggatagcctgggaaacccaacccacatcctgagaatcggcgagagctataaggagaagcagcggaccatccaggccaagaaggaggtggagcagcggagagccggcggctacagccggaagtacgccagcaaagccaagaatctggcagacgatatggtgagaaacaccgctagagatctgctgtactacgccgtgacccaggatgccatgctgatcttcgccaacctgagccggggcttcggccggcagggcaagcggaccttcatggccgagagacagtacacacggatggaggactggctgaccgccaagctggcctacgagggcctgagcaagacctacctgtccaagacactggcccagtacacctccaagacatgcagcaactgtgggtttaccatcaccagcgccgactacgacagggtgctggagaagctgaagaagacagcaacaggctggatgaccacaattaacggcaaggagctgaaggtggagggccagattacctactacaacagatacaagagacagaacgtagtcaaggacctgtccgtcgagctggatagactgagcgaagaatctgtgaacaacgacatctcctcctggacaaagggcagaagcggagaagctctgagcctcctgaagaaaagattctcccatagacccgtgcaggagaagttcgtgtgcctgaactgcggcttcgagacacacgcagccgagcaagccgccctgaacatcgccagatcctggctgttcctgcggagccaggagtacaagaaataccagacaaacaagacaaccggcaacaccgataagagagccttcgtcgagacctggcagtccttttaccggaagaagcttaaggaggtgtggaaacctgccgtgcggtctggcggatctggcggaggctccaccagccccaagaaaaagagaaaagtctaagctgccttctgcggggcttgccttctggccatgcccttcttctctcccttgcacctgtacctcttggtctttgaataaagcctgagtaggaaggctagcaaaaaaaaaaaaaaaaaaaaaaaaaaaaaaaaaaaaaaaaaaaaaaaaaaaaaaaaaaaaaaaaaaaaaaaaaaaaaaaagcccagccggctccccaacctctaccgaggagggcacctctgagtccgccacccccgagagcggccctggcacctccaccgagcccagcgagggcagcgcacccggcagccctgccggcagccccacctccacagaggagggaaccagcaccgagcccagcgaaggcagcgccccaggcaccagcaccgagcctagtgagcaggagattaaacggatcaacaagatcagaagaagacttgtgaaagacagcaacaccaagaaggccggcaagacaggccccatgaaaaccctgctggttagagtgatgacacccgatctgagagagcggctggaaaacctgagaaagaagcctgaaaatatcccccagcccatcagcaatacatctagagccaacctgaataagctgctgaccgattacaccgaaatgaagaaggcgatcctgcatgtgtactgggaagagttccagaaggaccctgtgggcctgatgagccgggtggcccagcctgccagcaagaagatcgatcagaacaagctgaaacctgagatggacgagaagggcaacctgaccaccgccggctttgcctgctctcagtgtggccagcccctgttcgtgtacaagctggagcaggtgtctgagaagggcaaggcttacaccaactacttcggacggtgcaatgtggccgagcacgaaaagctgatcctgctggcccagctgaagcccgagaaggatagcgacgaagccgtgacatatagcctgggaaagtttgggcagagggccctggatttctacagcattcatgtgaccaaggagtccacccaccccgtgaagcccctggcccagatcgccggaaacagatacgcctccggacctgtgggaaaggccctgagcgacgcatgtatgggcacaatcgcctccttcctgtctaagtaccaggacatcatcatcgaacaccagaaggtggtgaagggcaaccagaagagactggagagcctgcgggagctggccggcaaggaaaacctggaataccctagcgtgaccctgccacctcagcctcacaccaaggagggcgttgatgcctacaacgaagtgatcgcccgggtgcgaatgtgggtgaacctgaacctgtggcagaagctgaagctaagcagagatgatgccaagcctctgctgagactgaagggattcccttcctttcctctggtcgagagacaggccaacgaagtggactggtgggacatggtgtgtaacgtgaagaagctgatcaacgagaaaaaggaggatggcaaggtgttttggcagaatctggctggctacaagagacaggaagccctgagaccatacctgagcagcgaggaagatcggaagaagggaaagaaattcgctcggtaccagctgggcgacctgctgctgcacctggaaaagaagcacggcgaggactggggaaaggtgtacgacgaggcctgggagcggattgacaagaaagtggaaggcctgagcaagcacatcaagctggaagaggaacggagaagcgaggacgcccagagcaaggccgccctgaccgactggctgcgggctaaggccagcttcgtgatcgagggcctgaaggaggccgacaaggacgagttctgcagatgcgagctgaagctgcagaagtggtacggggacctgcggggaaagcccttcgccatcgaagccgagaacagcatcctggacatcagcggcttcagcaagcagtacaactgtgccttcatctggcagaaggacggcgtgaagaagctgaacctgtacctgatcatcaactacttcaagggcggcaagctgcggttcaagaagatcaaacctgaagccttcgaagccaacagattctacaccgtgatcaacaaaaagagcggcgagatcgtgcccatggaggtgaacttcaacttcgacgaccccaacctgatcatcctgcctctggcctttggcaagagacagggcagagaattcatctggaacgacctgctgtccctggaaaccggcagcctgaagctggccaacggaagagtgatcgagaagacactgtacaacagaagaacccggcaggatgagcctgccctgttcgtggccctgaccttcgagcggcgggaggtcctggactcctccaatatcaaaccaatgaacctgatcggcgtggcaagaggcgaaaacatccccgccgtgatcgccctgaccgaccccgagggctgcccactgagccggtttaaggatagcctgggaaacccaacccacatcctgagaatcggcgagagctataaggagaagcagcggaccatccaggccaagaaggaggtggagcagcggagagccggcggctacagccggaagtacgccagcaaagccaagaatctggcagacgatatggtgagaaacaccgctagagatctgctgtactacgccgtgacccaggatgccatgctgatcttcgccaacctgagccggggcttcggccggcagggcaagcggaccttcatggccgagagacagtacacacggatggaggactggctgaccgccaagctggcctacgagggcctgagcaagacctacctgtccaagacactggcccagtacacctccaagacatgcagcaactgtgggtttaccatcaccagcgccgactacgacagggtgctggagaagctgaagaagacagcaacaggctggatgaccacaattaacggcaaggagctgaaggtggagggccagattacctactacaacagatacaagagacagaacgtagtcaaggacctgtccgtcgagctggatagactgagcgaagaatctgtgaacaacgacatctcctcctggacaaagggcagaagcggagaagctctgagcctcctgaagaaaagattctcccatagacccgtgcaggagaagttcgtgtgcctgaactgcggcttcgagacacacgcagccgagcaagccgccctgaacatcgccagatcctggctgttcctgcggagccaggagtacaagaaataccagacaaacaagacaaccggcaacaccgataagagagccttcgtcgagacctggcagtccttttaccggaagaagcttaaggaggtgtggaaacctgccgtgcggtctggcggatctggcggaggctccaccagccccaagaaaaagagaaaagtctaagctgccttctgcggggcttgccttctggccatgcccttcttctctcccttgcacctgtacctcttggtctttgaataaagcctgagtaggaaggctagcaaaaaaaaaaaaaaaaaaaaaaaaaaaaaaaaaaaaaaaaaaaaaaaaaaaaaaaaaaaaaaaaaaaaaaaaaaaaaaaa

SEQ ID NO: 10389 - RNA, 8787 nt, synthetic construct
  source 1..8787: mol_type = other RNA
aggaaataagagagaaaagaagagtaagaagaaatataagagccaccatggcccctaagaagaagcgtaaagtgagccggatgaaccacgaccaggagttcgacccccctaaggtgtaccctcccgtccccgccgagaagagaaagcccatccgggtcctgagcctgttcgatggcatcgccaccggtctgctggtgctgaaggacctgggcatccaggtggataggtacattgcctccgaggtgtgcgaggactccatcaccgtgggaatggtgcgtcatcagggcaagatcatgtacgtgggcgacgtgcggagcgtgacacagaagcatatccaggagtggggccctttcgacctggtgatcggcggcagcccttgcaatgacctgagcatcgtgaacccagcccggaagggcctgtacgagggaaccggcagactgttcttcgagttttacagactgctgcacgacgcccggcctaaggaaggcgacgaccggcccttcttttggctgttcgagaatgtggtggccatgggagtcagcgacaagcgggatattagccggttcctggagagcaaccccgtgatgatcgatgccaaggaagtgagcgccgcccaccgggccagatacttctggggcaatctgcctggcatgaacagacccctggccagcaccgtgaacgacaagctggagctgcaggagtgcctggagcacggccggatcgccaagttcagcaaggtgagaaccatcaccacccgaagcaacagcatcaaacaaggcaaggaccagcactttcctgtgttcatgaacgagaaggaggacatcctgtggtgtaccgagatggagagagtgttcgggttcccagtccactacacagatgtcagcaacatgtctagactggccagacagagactgctgggaagaagctggtccgtccctgtgatcagacacctgttcgcccctctgaaggagtacttcgcctgcgtgagcagcggcaacagcaacgccaacagccggggccccagcttctctagcggcctggtgccactgtccctgagagggagccacatgggccccatggagatctacaaaaccgtgagcgcctggaagcggcagcctgtgcgcgtgctgagcctgtttcggaatatcgataaagtcctgaaaagcctgggattcctggagagcggctctggctccggcggtggcaccctgaagtacgtggaggatgtgacaaacgtggtcagacgggatgtggagaagtggggccccttcgatctggtgtacggcagcacccaacccctgggcagctcttgtgaccggtgccctggctggtacatgtttcagttccaccggatcctgcagtacgccctgccgagacaggagtcccagcggccattcttttggattttcatggacaacttgctgctgaccgaggatgaccaggaaactaccactcggttcctgcagaccgaagccgtgaccctgcaggacgtgagaggccgggactaccagaacgccatgcgggtgtggtccaacatccctggactgaaaagcaagcacgcacctctgacccctaaagaagaggagtacctgcaggcccaggtgcggagcagaagcaagctggacgcccctaaggtggatctgctggtgaagaattgcctcctgcccctgagagagtacttcaagtatttcagccagaatagtctgcccctgggaggcagcggcggcggcagggagcccgcccaggtgctggtggccgccgagagcctgatcgacaacgaggagggctacgtgaccttcgaggacgtggccgtgtacttcagccaggaggagtggaggctgctggacgaggcccagaggctgctgtacaggaacgtgatgctggagaacttcagcctgatggccagcctgggcctggccagcagcaagacccacgagatcacccagctggagagctgggaggagcccttcgtgggcggcccaagcagcggcgcccctcctcccagcggcggcaggcggcccaagcagcggcgcccctcctcccagcggcggcagcccagccggctccccaacctctaccgaggagggcacctctgagtccgccacccccgagagcggccctggcacctccaccgagcccagcgagggcagcgcacccggcagccctgccggcagccccacctccacagaggagggaaccagcaccgagcccagcgaaggcagcgccccaggcaccagcaccgagcctagtgagcaggagattaaacggatcaacaagatcagaagaagacttgtgaaagacagcaacaccaagaaggccggcaagacaggccccatgaaaaccctgctggttagagtgatgacacccgatctgagagagcggctggaaaacctgagaaagaagcctgaaaatatcccccagcccatcagcaatacatctagagccaacctgaataagctgctgaccgattacaccgaaatgaagaaggcgatcctgcatgtgtactgggaagagttccagaaggaccctgtgggcctgatgagccgggtggcccagcctgccagcaagaagatcgatcagaacaagctgaaacctgagatggacgagaagggcaacctgaccaccgccggctttgcctgctctcagtgtggccagcccctgttcgtgtacaagctggagcaggtgtctgagaagggcaaggcttacaccaactacttcggacggtgcaatgtggccgagcacgaaaagctgatcctgctggcccagctgaagcccgagaaggatagcgacgaagccgtgacatatagcctgggaaagtttgggcagagggccctggatttctacagcattcatgtgaccaaggagtccacccaccccgtgaagcccctggcccagatcgccggaaacagatacgcctccggacctgtgggaaaggccctgagcgacgcatgtatgggcacaatcgcctccttcctgtctaagtaccaggacatcatcatcgaacaccagaaggtggtgaagggcaaccagaagagactggagagcctgcgggagctggccggcaaggaaaacctggaataccctagcgtgaccctgccacctcagcctcacaccaaggagggcgttgatgcctacaacgaagtgatcgcccgggtgcgaatgtgggtgaacctgaacctgtggcagaagctgaagctaagcagagatgatgccaagcctctgctgagactgaagggattcccttcctttcctctggtcgagagacaggccaacgaagtggactggtgggacatggtgtgtaacgtgaagaagctgatcaacgagaaaaaggaggatggcaaggtgttttggcagaatctggctggctacaagagacaggaagccctgagaccatacctgagcagcgaggaagatcggaagaagggaaagaaattcgctcggtaccagctgggcgacctgctgctgcacctggaaaagaagcacggcgaggactggggaaaggtgtacgacgaggcctgggagcggattgacaagaaagtggaaggcctgagcaagcacatcaagctggaagaggaacggagaagcgaggacgcccagagcaaggccgccctgaccgactggctgcgggctaaggccagcttcgtgatcgagggcctgaaggaggccgacaaggacgagttctgcagatgcgagctgaagctgcagaagtggtacggggacctgcggggaaagcccttcgccatcgaagccgagaacagcatcctggacatcagcggcttcagcaagcagtacaactgtgccttcatctggcagaaggacggcgtgaagaagctgaacctgtacctgatcatcaactacttcaagggcggcaagctgcggttcaagaagatcaaacctgaagccttcgaagccaacagattctacaccgtgatcaacaaaaagagcggcgagatcgtgcccatggaggtgaacttcaacttcgacgaccccaacctgatcatcctgcctctggcctttggcaagagacagggcagagaattcatctggaacgacctgctgtccctggaaaccggcagcctgaagctggccaacggaagagtgatcgagaagacactgtacaacagaagaacccggcaggatgagcctgccctgttcgtggccctgaccttcgagcggcgggaggtcctggactcctccaatatcaaaccaatgaacctgatcggcgtggcaagaggcgaaaacatccccgccgtgatcgccctgaccgaccccgagggctgcccactgagccggtttaaggatagcctgggaaacccaacccacatcctgagaatcggcgagagctataaggagaagcagcggaccatccaggccaagaaggaggtggagcagcggagagccggcggctacagccggaagtacgccagcaaagccaagaatctggcagacgatatggtgagaaacaccgctagagatctgctgtactacgccgtgacccaggatgccatgctgatcttcgccaacctgagccggggcttcggccggcagggcaagcggaccttcatggccgagagacagtacacacggatggaggactggctgaccgccaagctggcctacgagggcctgagcaagacctacctgtccaagacactggcccagtacacctccaagacatgcagcaactgtgggtttaccatcaccagcgccgactacgacagggtgctggagaagctgaagaagacagcaacaggctggatgaccacaattaacggcaaggagctgaaggtggagggccagattacctactacaacagatacaagagacagaacgtagtcaaggacctgtccgtcgagctggatagactgagcgaagaatctgtgaacaacgacatctcctcctggacaaagggcagaagcggagaagctctgagcctcctgaagaaaagattctcccatagacccgtgcaggagaagttcgtgtgcctgaactgcggcttcgagacacacgcagccgagcaagccgccctgaacatcgccagatcctggctgttcctgcggagccaggagtacaagaaataccagacaaacaagacaaccggcaacaccgataagagagccttcgtcgagacctggcagtccttttaccggaagaagcttaaggaggtgtggaaacctgccgtgcggtctggcggatctggcggaggctccaccagccccaagaaaaagagaaaagtctaagctgccttctgcggggcttgccttctggccatgcccttcttctctcccttgcacctgtacctcttggtctttgaataaagcctgagtaggaaggctagcaaaaaaaaaaaaaaaaaaaaaaaaaaaaaaaaaaaaaaaaaaaaaaaaaaaaaaaaaaaaaaaaaaaaaaaaaaaaaaaagcccagccggctccccaacctctaccgaggagggcacctctgagtccgccacccccgagagcggccctggcacctccaccgagcccagcgagggcagcgcacccggcagccctgccggcagccccacctccacagaggagggaaccagcaccgagcccagcgaaggcagcgccccaggcaccagcaccgagcctagtgagcaggagattaaacggatcaacaagatcagaagaagacttgtgaaagacagcaacaccaagaaggccggcaagacaggccccatgaaaaccctgctggttagagtgatgacacccgatctgagagagcggctggaaaacctgagaaagaagcctgaaaatatcccccagcccatcagcaatacatctagagccaacctgaataagctgctgaccgattacaccgaaatgaagaaggcgatcctgcatgtgtactgggaagagttccagaaggaccctgtgggcctgatgagccgggtggcccagcctgccagcaagaagatcgatcagaacaagctgaaacctgagatggacgagaagggcaacctgaccaccgccggctttgcctgctctcagtgtggccagcccctgttcgtgtacaagctggagcaggtgtctgagaagggcaaggcttacaccaactacttcggacggtgcaatgtggccgagcacgaaaagctgatcctgctggcccagctgaagcccgagaaggatagcgacgaagccgtgacatatagcctgggaaagtttgggcagagggccctggatttctacagcattcatgtgaccaaggagtccacccaccccgtgaagcccctggcccagatcgccggaaacagatacgcctccggacctgtgggaaaggccctgagcgacgcatgtatgggcacaatcgcctccttcctgtctaagtaccaggacatcatcatcgaacaccagaaggtggtgaagggcaaccagaagagactggagagcctgcgggagctggccggcaaggaaaacctggaataccctagcgtgaccctgccacctcagcctcacaccaaggagggcgttgatgcctacaacgaagtgatcgcccgggtgcgaatgtgggtgaacctgaacctgtggcagaagctgaagctaagcagagatgatgccaagcctctgctgagactgaagggattcccttcctttcctctggtcgagagacaggccaacgaagtggactggtgggacatggtgtgtaacgtgaagaagctgatcaacgagaaaaaggaggatggcaaggtgttttggcagaatctggctggctacaagagacaggaagccctgagaccatacctgagcagcgaggaagatcggaagaagggaaagaaattcgctcggtaccagctgggcgacctgctgctgcacctggaaaagaagcacggcgaggactggggaaaggtgtacgacgaggcctgggagcggattgacaagaaagtggaaggcctgagcaagcacatcaagctggaagaggaacggagaagcgaggacgcccagagcaaggccgccctgaccgactggctgcgggctaaggccagcttcgtgatcgagggcctgaaggaggccgacaaggacgagttctgcagatgcgagctgaagctgcagaagtggtacggggacctgcggggaaagcccttcgccatcgaagccgagaacagcatcctggacatcagcggcttcagcaagcagtacaactgtgccttcatctggcagaaggacggcgtgaagaagctgaacctgtacctgatcatcaactacttcaagggcggcaagctgcggttcaagaagatcaaacctgaagccttcgaagccaacagattctacaccgtgatcaacaaaaagagcggcgagatcgtgcccatggaggtgaacttcaacttcgacgaccccaacctgatcatcctgcctctggcctttggcaagagacagggcagagaattcatctggaacgacctgctgtccctggaaaccggcagcctgaagctggccaacggaagagtgatcgagaagacactgtacaacagaagaacccggcaggatgagcctgccctgttcgtggccctgaccttcgagcggcgggaggtcctggactcctccaatatcaaaccaatgaacctgatcggcgtggcaagaggcgaaaacatccccgccgtgatcgccctgaccgaccccgagggctgcccactgagccggtttaaggatagcctgggaaacccaacccacatcctgagaatcggcgagagctataaggagaagcagcggaccatccaggccaagaaggaggtggagcagcggagagccggcggctacagccggaagtacgccagcaaagccaagaatctggcagacgatatggtgagaaacaccgctagagatctgctgtactacgccgtgacccaggatgccatgctgatcttcgccaacctgagccggggcttcggccggcagggcaagcggaccttcatggccgagagacagtacacacggatggaggactggctgaccgccaagctggcctacgagggcctgagcaagacctacctgtccaagacactggcccagtacacctccaagacatgcagcaactgtgggtttaccatcaccagcgccgactacgacagggtgctggagaagctgaagaagacagcaacaggctggatgaccacaattaacggcaaggagctgaaggtggagggccagattacctactacaacagatacaagagacagaacgtagtcaaggacctgtccgtcgagctggatagactgagcgaagaatctgtgaacaacgacatctcctcctggacaaagggcagaagcggagaagctctgagcctcctgaagaaaagattctcccatagacccgtgcaggagaagttcgtgtgcctgaactgcggcttcgagacacacgcagccgagcaagccgccctgaacatcgccagatcctggctgttcctgcggagccaggagtacaagaaataccagacaaacaagacaaccggcaacaccgataagagagccttcgtcgagacctggcagtccttttaccggaagaagcttaaggaggtgtggaaacctgccgtgcggtctggcggatctggcggaggctccaccagccccaagaaaaagagaaaagtctaagctgccttctgcggggcttgccttctggccatgcccttcttctctcccttgcacctgtacctcttggtctttgaataaagcctgagtaggaaggctagcaaaaaaaaaaaaaaaaaaaaaaaaaaaaaaaaaaaaaaaaaaaaaaaaaaaaaaaaaaaaaaaaaaaaaaaaaaaaaaaa

SEQ ID NO: 10390 - RNA, 8787 nt, synthetic construct
  source 1..8787: mol_type = other RNA
aggaaataagagagaaaagaagagtaagaagaaatataagagccaccatggcccctaagaagaagcgtaaagtgagccggatgaaccacgaccaggagttcgacccccctaaggtgtaccctcccgtccccgccgagaagagaaagcccatccgggtcctgagcctgttcgatggcatcgccaccggtctgctggtgctgaaggacctgggcatccaggtggataggtacattgcctccgaggtgtgcgaggactccatcaccgtgggaatggtgcgtcatcagggcaagatcatgtacgtgggcgacgtgcggagcgtgacacagaagcatatccaggagtggggccctttcgacctggtgatcggcggcagcccttgcaatgacctgagcatcgtgaacccagcccggaagggcctgtacgagggaaccggcagactgttcttcgagttttacagactgctgcacgacgcccggcctaaggaaggcgacgaccggcccttcttttggctgttcgagaatgtggtggccatgggagtcagcgacaagcgggatattagccggttcctggagagcaaccccgtgatgatcgatgccaaggaagtgagcgccgcccaccgggccagatacttctggggcaatctgcctggcatgaacagacccctggccagcaccgtgaacgacaagctggagctgcaggagtgcctggagcacggccggatcgccaagttcagcaaggtgagaaccatcaccacccgaagcaacagcatcaaacaaggcaaggaccagcactttcctgtgttcatgaacgagaaggaggacatcctgtggtgtaccgagatggagagagtgttcgggttcccagtccactacacagatgtcagcaacatgtctagactggccagacagagactgctgggaagaagctggtccgtccctgtgatcagacacctgttcgcccctctgaaggagtacttcgcctgcgtgagcagcggcaacagcaacgccaacagccggggccccagcttctctagcggcctggtgccactgtccctgagagggagccacatgggccccatggagatctacaaaaccgtgagcgcctggaagcggcagcctgtgcgcgtgctgagcctgtttcggaatatcgataaagtcctgaaaagcctgggattcctggagagcggctctggctccggcggtggcaccctgaagtacgtggaggatgtgacaaacgtggtcagacgggatgtggagaagtggggccccttcgatctggtgtacggcagcacccaacccctgggcagctcttgtgaccggtgccctggctggtacatgtttcagttccaccggatcctgcagtacgccctgccgagacaggagtcccagcggccattcttttggattttcatggacaacttgctgctgaccgaggatgaccaggaaactaccactcggttcctgcagaccgaagccgtgaccctgcaggacgtgagaggccgggactaccagaacgccatgcgggtgtggtccaacatccctggactgaaaagcaagcacgcacctctgacccctaaagaagaggagtacctgcaggcccaggtgcggagcagaagcaagctggacgcccctaaggtggatctgctggtgaagaattgcctcctgcccctgagagagtacttcaagtatttcagccagaatagtctgcccctgggaggcagcggcggcggcttccaggccagcgtggtgttcgaggacgtggccgtgaagttcacccccgaggagtgggccctgctggacaggggccagaggaagctgtacagggacgtgatgctggagacctgcaggaacctgagcagcgtggagaagcagaagttccacagcaacggcgacctgaccaggatgcaggagggcctgctgaggagccccctggtggagagcgtgtgcgagaggatcgagggcgaccagtgcggcggcggcccaagcagcggcgcccctcctcccagcggcggcaggcggcccaagcagcggcgcccctcctcccagcggcggcagcccagccggctccccaacctctaccgaggagggcacctctgagtccgccacccccgagagcggccctggcacctccaccgagcccagcgagggcagcgcacccggcagccctgccggcagccccacctccacagaggagggaaccagcaccgagcccagcgaaggcagcgccccaggcaccagcaccgagcctagtgagcaggagattaaacggatcaacaagatcagaagaagacttgtgaaagacagcaacaccaagaaggccggcaagacaggccccatgaaaaccctgctggttagagtgatgacacccgatctgagagagcggctggaaaacctgagaaagaagcctgaaaatatcccccagcccatcagcaatacatctagagccaacctgaataagctgctgaccgattacaccgaaatgaagaaggcgatcctgcatgtgtactgggaagagttccagaaggaccctgtgggcctgatgagccgggtggcccagcctgccagcaagaagatcgatcagaacaagctgaaacctgagatggacgagaagggcaacctgaccaccgccggctttgcctgctctcagtgtggccagcccctgttcgtgtacaagctggagcaggtgtctgagaagggcaaggcttacaccaactacttcggacggtgcaatgtggccgagcacgaaaagctgatcctgctggcccagctgaagcccgagaaggatagcgacgaagccgtgacatatagcctgggaaagtttgggcagagggccctggatttctacagcattcatgtgaccaaggagtccacccaccccgtgaagcccctggcccagatcgccggaaacagatacgcctccggacctgtgggaaaggccctgagcgacgcatgtatgggcacaatcgcctccttcctgtctaagtaccaggacatcatcatcgaacaccagaaggtggtgaagggcaaccagaagagactggagagcctgcgggagctggccggcaaggaaaacctggaataccctagcgtgaccctgccacctcagcctcacaccaaggagggcgttgatgcctacaacgaagtgatcgcccgggtgcgaatgtgggtgaacctgaacctgtggcagaagctgaagctaagcagagatgatgccaagcctctgctgagactgaagggattcccttcctttcctctggtcgagagacaggccaacgaagtggactggtgggacatggtgtgtaacgtgaagaagctgatcaacgagaaaaaggaggatggcaaggtgttttggcagaatctggctggctacaagagacaggaagccctgagaccatacctgagcagcgaggaagatcggaagaagggaaagaaattcgctcggtaccagctgggcgacctgctgctgcacctggaaaagaagcacggcgaggactggggaaaggtgtacgacgaggcctgggagcggattgacaagaaagtggaaggcctgagcaagcacatcaagctggaagaggaacggagaagcgaggacgcccagagcaaggccgccctgaccgactggctgcgggctaaggccagcttcgtgatcgagggcctgaaggaggccgacaaggacgagttctgcagatgcgagctgaagctgcagaagtggtacggggacctgcggggaaagcccttcgccatcgaagccgagaacagcatcctggacatcagcggcttcagcaagcagtacaactgtgccttcatctggcagaaggacggcgtgaagaagctgaacctgtacctgatcatcaactacttcaagggcggcaagctgcggttcaagaagatcaaacctgaagccttcgaagccaacagattctacaccgtgatcaacaaaaagagcggcgagatcgtgcccatggaggtgaacttcaacttcgacgaccccaacctgatcatcctgcctctggcctttggcaagagacagggcagagaattcatctggaacgacctgctgtccctggaaaccggcagcctgaagctggccaacggaagagtgatcgagaagacactgtacaacagaagaacccggcaggatgagcctgccctgttcgtggccctgaccttcgagcggcgggaggtcctggactcctccaatatcaaaccaatgaacctgatcggcgtggcaagaggcgaaaacatccccgccgtgatcgccctgaccgaccccgagggctgcccactgagccggtttaaggatagcctgggaaacccaacccacatcctgagaatcggcgagagctataaggagaagcagcggaccatccaggccaagaaggaggtggagcagcggagagccggcggctacagccggaagtacgccagcaaagccaagaatctggcagacgatatggtgagaaacaccgctagagatctgctgtactacgccgtgacccaggatgccatgctgatcttcgccaacctgagccggggcttcggccggcagggcaagcggaccttcatggccgagagacagtacacacggatggaggactggctgaccgccaagctggcctacgagggcctgagcaagacctacctgtccaagacactggcccagtacacctccaagacatgcagcaactgtgggtttaccatcaccagcgccgactacgacagggtgctggagaagctgaagaagacagcaacaggctggatgaccacaattaacggcaaggagctgaaggtggagggccagattacctactacaacagatacaagagacagaacgtagtcaaggacctgtccgtcgagctggatagactgagcgaagaatctgtgaacaacgacatctcctcctggacaaagggcagaagcggagaagctctgagcctcctgaagaaaagattctcccatagacccgtgcaggagaagttcgtgtgcctgaactgcggcttcgagacacacgcagccgagcaagccgccctgaacatcgccagatcctggctgttcctgcggagccaggagtacaagaaataccagacaaacaagacaaccggcaacaccgataagagagccttcgtcgagacctggcagtccttttaccggaagaagcttaaggaggtgtggaaacctgccgtgcggtctggcggatctggcggaggctccaccagccccaagaaaaagagaaaagtctaagctgccttctgcggggcttgccttctggccatgcccttcttctctcccttgcacctgtacctcttggtctttgaataaagcctgagtaggaaggctagcaaaaaaaaaaaaaaaaaaaaaaaaaaaaaaaaaaaaaaaaaaaaaaaaaaaaaaaaaaaaaaaaaaaaaaaaaaaaaaaagcccagccggctccccaacctctaccgaggagggcacctctgagtccgccacccccgagagcggccctggcacctccaccgagcccagcgagggcagcgcacccggcagccctgccggcagccccacctccacagaggagggaaccagcaccgagcccagcgaaggcagcgccccaggcaccagcaccgagcctagtgagcaggagattaaacggatcaacaagatcagaagaagacttgtgaaagacagcaacaccaagaaggccggcaagacaggccccatgaaaaccctgctggttagagtgatgacacccgatctgagagagcggctggaaaacctgagaaagaagcctgaaaatatcccccagcccatcagcaatacatctagagccaacctgaataagctgctgaccgattacaccgaaatgaagaaggcgatcctgcatgtgtactgggaagagttccagaaggaccctgtgggcctgatgagccgggtggcccagcctgccagcaagaagatcgatcagaacaagctgaaacctgagatggacgagaagggcaacctgaccaccgccggctttgcctgctctcagtgtggccagcccctgttcgtgtacaagctggagcaggtgtctgagaagggcaaggcttacaccaactacttcggacggtgcaatgtggccgagcacgaaaagctgatcctgctggcccagctgaagcccgagaaggatagcgacgaagccgtgacatatagcctgggaaagtttgggcagagggccctggatttctacagcattcatgtgaccaaggagtccacccaccccgtgaagcccctggcccagatcgccggaaacagatacgcctccggacctgtgggaaaggccctgagcgacgcatgtatgggcacaatcgcctccttcctgtctaagtaccaggacatcatcatcgaacaccagaaggtggtgaagggcaaccagaagagactggagagcctgcgggagctggccggcaaggaaaacctggaataccctagcgtgaccctgccacctcagcctcacaccaaggagggcgttgatgcctacaacgaagtgatcgcccgggtgcgaatgtgggtgaacctgaacctgtggcagaagctgaagctaagcagagatgatgccaagcctctgctgagactgaagggattcccttcctttcctctggtcgagagacaggccaacgaagtggactggtgggacatggtgtgtaacgtgaagaagctgatcaacgagaaaaaggaggatggcaaggtgttttggcagaatctggctggctacaagagacaggaagccctgagaccatacctgagcagcgaggaagatcggaagaagggaaagaaattcgctcggtaccagctgggcgacctgctgctgcacctggaaaagaagcacggcgaggactggggaaaggtgtacgacgaggcctgggagcggattgacaagaaagtggaaggcctgagcaagcacatcaagctggaagaggaacggagaagcgaggacgcccagagcaaggccgccctgaccgactggctgcgggctaaggccagcttcgtgatcgagggcctgaaggaggccgacaaggacgagttctgcagatgcgagctgaagctgcagaagtggtacggggacctgcggggaaagcccttcgccatcgaagccgagaacagcatcctggacatcagcggcttcagcaagcagtacaactgtgccttcatctggcagaaggacggcgtgaagaagctgaacctgtacctgatcatcaactacttcaagggcggcaagctgcggttcaagaagatcaaacctgaagccttcgaagccaacagattctacaccgtgatcaacaaaaagagcggcgagatcgtgcccatggaggtgaacttcaacttcgacgaccccaacctgatcatcctgcctctggcctttggcaagagacagggcagagaattcatctggaacgacctgctgtccctggaaaccggcagcctgaagctggccaacggaagagtgatcgagaagacactgtacaacagaagaacccggcaggatgagcctgccctgttcgtggccctgaccttcgagcggcgggaggtcctggactcctccaatatcaaaccaatgaacctgatcggcgtggcaagaggcgaaaacatccccgccgtgatcgccctgaccgaccccgagggctgcccactgagccggtttaaggatagcctgggaaacccaacccacatcctgagaatcggcgagagctataaggagaagcagcggaccatccaggccaagaaggaggtggagcagcggagagccggcggctacagccggaagtacgccagcaaagccaagaatctggcagacgatatggtgagaaacaccgctagagatctgctgtactacgccgtgacccaggatgccatgctgatcttcgccaacctgagccggggcttcggccggcagggcaagcggaccttcatggccgagagacagtacacacggatggaggactggctgaccgccaagctggcctacgagggcctgagcaagacctacctgtccaagacactggcccagtacacctccaagacatgcagcaactgtgggtttaccatcaccagcgccgactacgacagggtgctggagaagctgaagaagacagcaacaggctggatgaccacaattaacggcaaggagctgaaggtggagggccagattacctactacaacagatacaagagacagaacgtagtcaaggacctgtccgtcgagctggatagactgagcgaagaatctgtgaacaacgacatctcctcctggacaaagggcagaagcggagaagctctgagcctcctgaagaaaagattctcccatagacccgtgcaggagaagttcgtgtgcctgaactgcggcttcgagacacacgcagccgagcaagccgccctgaacatcgccagatcctggctgttcctgcggagccaggagtacaagaaataccagacaaacaagacaaccggcaacaccgataagagagccttcgtcgagacctggcagtccttttaccggaagaagcttaaggaggtgtggaaacctgccgtgcggtctggcggatctggcggaggctccaccagccccaagaaaaagagaaaagtctaagctgccttctgcggggcttgccttctggccatgcccttcttctctcccttgcacctgtacctcttggtctttgaataaagcctgagtaggaaggctagcaaaaaaaaaaaaaaaaaaaaaaaaaaaaaaaaaaaaaaaaaaaaaaaaaaaaaaaaaaaaaaaaaaaaaaaaaaaaaaaa

SEQ ID NO: 10391 - RNA, 8787 nt, synthetic construct
  source 1..8787: mol_type = other RNA
aggaaataagagagaaaagaagagtaagaagaaatataagagccaccatggcccctaagaagaagcgtaaagtgagccggatgaaccacgaccaggagttcgacccccctaaggtgtaccctcccgtccccgccgagaagagaaagcccatccgggtcctgagcctgttcgatggcatcgccaccggtctgctggtgctgaaggacctgggcatccaggtggataggtacattgcctccgaggtgtgcgaggactccatcaccgtgggaatggtgcgtcatcagggcaagatcatgtacgtgggcgacgtgcggagcgtgacacagaagcatatccaggagtggggccctttcgacctggtgatcggcggcagcccttgcaatgacctgagcatcgtgaacccagcccggaagggcctgtacgagggaaccggcagactgttcttcgagttttacagactgctgcacgacgcccggcctaaggaaggcgacgaccggcccttcttttggctgttcgagaatgtggtggccatgggagtcagcgacaagcgggatattagccggttcctggagagcaaccccgtgatgatcgatgccaaggaagtgagcgccgcccaccgggccagatacttctggggcaatctgcctggcatgaacagacccctggccagcaccgtgaacgacaagctggagctgcaggagtgcctggagcacggccggatcgccaagttcagcaaggtgagaaccatcaccacccgaagcaacagcatcaaacaaggcaaggaccagcactttcctgtgttcatgaacgagaaggaggacatcctgtggtgtaccgagatggagagagtgttcgggttcccagtccactacacagatgtcagcaacatgtctagactggccagacagagactgctgggaagaagctggtccgtccctgtgatcagacacctgttcgcccctctgaaggagtacttcgcctgcgtgagcagcggcaacagcaacgccaacagccggggccccagcttctctagcggcctggtgccactgtccctgagagggagccacatgggccccatggagatctacaaaaccgtgagcgcctggaagcggcagcctgtgcgcgtgctgagcctgtttcggaatatcgataaagtcctgaaaagcctgggattcctggagagcggctctggctccggcggtggcaccctgaagtacgtggaggatgtgacaaacgtggtcagacgggatgtggagaagtggggccccttcgatctggtgtacggcagcacccaacccctgggcagctcttgtgaccggtgccctggctggtacatgtttcagttccaccggatcctgcagtacgccctgccgagacaggagtcccagcggccattcttttggattttcatggacaacttgctgctgaccgaggatgaccaggaaactaccactcggttcctgcagaccgaagccgtgaccctgcaggacgtgagaggccgggactaccagaacgccatgcgggtgtggtccaacatccctggactgaaaagcaagcacgcacctctgacccctaaagaagaggagtacctgcaggcccaggtgcggagcagaagcaagctggacgcccctaaggtggatctgctggtgaagaattgcctcctgcccctgagagagtacttcaagtatttcagccagaatagtctgcccctgggaggcagcggcggcggccagtgcctgctgaccttcaaggacgtgttcctggacttcagcagcgaggagtgggagtgcctgaacttcgcccagaggaccctgtacatggacgtgatgctggagaactacaacaacctgctgttcgtggagaaccactgcatctgcggcaactacgagaaggagaaggtgctggagcaggacacccagcacatcgtgaacgagcacggccacaacaggaagaagagcagcaagtgcaacgagggcggcccaagcagcggcgcccctcctcccagcggcggcaggcggcccaagcagcggcgcccctcctcccagcggcggcagcccagccggctccccaacctctaccgaggagggcacctctgagtccgccacccccgagagcggccctggcacctccaccgagcccagcgagggcagcgcacccggcagccctgccggcagccccacctccacagaggagggaaccagcaccgagcccagcgaaggcagcgccccaggcaccagcaccgagcctagtgagcaggagattaaacggatcaacaagatcagaagaagacttgtgaaagacagcaacaccaagaaggccggcaagacaggccccatgaaaaccctgctggttagagtgatgacacccgatctgagagagcggctggaaaacctgagaaagaagcctgaaaatatcccccagcccatcagcaatacatctagagccaacctgaataagctgctgaccgattacaccgaaatgaagaaggcgatcctgcatgtgtactgggaagagttccagaaggaccctgtgggcctgatgagccgggtggcccagcctgccagcaagaagatcgatcagaacaagctgaaacctgagatggacgagaagggcaacctgaccaccgccggctttgcctgctctcagtgtggccagcccctgttcgtgtacaagctggagcaggtgtctgagaagggcaaggcttacaccaactacttcggacggtgcaatgtggccgagcacgaaaagctgatcctgctggcccagctgaagcccgagaaggatagcgacgaagccgtgacatatagcctgggaaagtttgggcagagggccctggatttctacagcattcatgtgaccaaggagtccacccaccccgtgaagcccctggcccagatcgccggaaacagatacgcctccggacctgtgggaaaggccctgagcgacgcatgtatgggcacaatcgcctccttcctgtctaagtaccaggacatcatcatcgaacaccagaaggtggtgaagggcaaccagaagagactggagagcctgcgggagctggccggcaaggaaaacctggaataccctagcgtgaccctgccacctcagcctcacaccaaggagggcgttgatgcctacaacgaagtgatcgcccgggtgcgaatgtgggtgaacctgaacctgtggcagaagctgaagctaagcagagatgatgccaagcctctgctgagactgaagggattcccttcctttcctctggtcgagagacaggccaacgaagtggactggtgggacatggtgtgtaacgtgaagaagctgatcaacgagaaaaaggaggatggcaaggtgttttggcagaatctggctggctacaagagacaggaagccctgagaccatacctgagcagcgaggaagatcggaagaagggaaagaaattcgctcggtaccagctgggcgacctgctgctgcacctggaaaagaagcacggcgaggactggggaaaggtgtacgacgaggcctgggagcggattgacaagaaagtggaaggcctgagcaagcacatcaagctggaagaggaacggagaagcgaggacgcccagagcaaggccgccctgaccgactggctgcgggctaaggccagcttcgtgatcgagggcctgaaggaggccgacaaggacgagttctgcagatgcgagctgaagctgcagaagtggtacggggacctgcggggaaagcccttcgccatcgaagccgagaacagcatcctggacatcagcggcttcagcaagcagtacaactgtgccttcatctggcagaaggacggcgtgaagaagctgaacctgtacctgatcatcaactacttcaagggcggcaagctgcggttcaagaagatcaaacctgaagccttcgaagccaacagattctacaccgtgatcaacaaaaagagcggcgagatcgtgcccatggaggtgaacttcaacttcgacgaccccaacctgatcatcctgcctctggcctttggcaagagacagggcagagaattcatctggaacgacctgctgtccctggaaaccggcagcctgaagctggccaacggaagagtgatcgagaagacactgtacaacagaagaacccggcaggatgagcctgccctgttcgtggccctgaccttcgagcggcgggaggtcctggactcctccaatatcaaaccaatgaacctgatcggcgtggcaagaggcgaaaacatccccgccgtgatcgccctgaccgaccccgagggctgcccactgagccggtttaaggatagcctgggaaacccaacccacatcctgagaatcggcgagagctataaggagaagcagcggaccatccaggccaagaaggaggtggagcagcggagagccggcggctacagccggaagtacgccagcaaagccaagaatctggcagacgatatggtgagaaacaccgctagagatctgctgtactacgccgtgacccaggatgccatgctgatcttcgccaacctgagccggggcttcggccggcagggcaagcggaccttcatggccgagagacagtacacacggatggaggactggctgaccgccaagctggcctacgagggcctgagcaagacctacctgtccaagacactggcccagtacacctccaagacatgcagcaactgtgggtttaccatcaccagcgccgactacgacagggtgctggagaagctgaagaagacagcaacaggctggatgaccacaattaacggcaaggagctgaaggtggagggccagattacctactacaacagatacaagagacagaacgtagtcaaggacctgtccgtcgagctggatagactgagcgaagaatctgtgaacaacgacatctcctcctggacaaagggcagaagcggagaagctctgagcctcctgaagaaaagattctcccatagacccgtgcaggagaagttcgtgtgcctgaactgcggcttcgagacacacgcagccgagcaagccgccctgaacatcgccagatcctggctgttcctgcggagccaggagtacaagaaataccagacaaacaagacaaccggcaacaccgataagagagccttcgtcgagacctggcagtccttttaccggaagaagcttaaggaggtgtggaaacctgccgtgcggtctggcggatctggcggaggctccaccagccccaagaaaaagagaaaagtctaagctgccttctgcggggcttgccttctggccatgcccttcttctctcccttgcacctgtacctcttggtctttgaataaagcctgagtaggaaggctagcaaaaaaaaaaaaaaaaaaaaaaaaaaaaaaaaaaaaaaaaaaaaaaaaaaaaaaaaaaaaaaaaaaaaaaaaaaaaaaaagcccagccggctccccaacctctaccgaggagggcacctctgagtccgccacccccgagagcggccctggcacctccaccgagcccagcgagggcagcgcacccggcagccctgccggcagccccacctccacagaggagggaaccagcaccgagcccagcgaaggcagcgccccaggcaccagcaccgagcctagtgagcaggagattaaacggatcaacaagatcagaagaagacttgtgaaagacagcaacaccaagaaggccggcaagacaggccccatgaaaaccctgctggttagagtgatgacacccgatctgagagagcggctggaaaacctgagaaagaagcctgaaaatatcccccagcccatcagcaatacatctagagccaacctgaataagctgctgaccgattacaccgaaatgaagaaggcgatcctgcatgtgtactgggaagagttccagaaggaccctgtgggcctgatgagccgggtggcccagcctgccagcaagaagatcgatcagaacaagctgaaacctgagatggacgagaagggcaacctgaccaccgccggctttgcctgctctcagtgtggccagcccctgttcgtgtacaagctggagcaggtgtctgagaagggcaaggcttacaccaactacttcggacggtgcaatgtggccgagcacgaaaagctgatcctgctggcccagctgaagcccgagaaggatagcgacgaagccgtgacatatagcctgggaaagtttgggcagagggccctggatttctacagcattcatgtgaccaaggagtccacccaccccgtgaagcccctggcccagatcgccggaaacagatacgcctccggacctgtgggaaaggccctgagcgacgcatgtatgggcacaatcgcctccttcctgtctaagtaccaggacatcatcatcgaacaccagaaggtggtgaagggcaaccagaagagactggagagcctgcgggagctggccggcaaggaaaacctggaataccctagcgtgaccctgccacctcagcctcacaccaaggagggcgttgatgcctacaacgaagtgatcgcccgggtgcgaatgtgggtgaacctgaacctgtggcagaagctgaagctaagcagagatgatgccaagcctctgctgagactgaagggattcccttcctttcctctggtcgagagacaggccaacgaagtggactggtgggacatggtgtgtaacgtgaagaagctgatcaacgagaaaaaggaggatggcaaggtgttttggcagaatctggctggctacaagagacaggaagccctgagaccatacctgagcagcgaggaagatcggaagaagggaaagaaattcgctcggtaccagctgggcgacctgctgctgcacctggaaaagaagcacggcgaggactggggaaaggtgtacgacgaggcctgggagcggattgacaagaaagtggaaggcctgagcaagcacatcaagctggaagaggaacggagaagcgaggacgcccagagcaaggccgccctgaccgactggctgcgggctaaggccagcttcgtgatcgagggcctgaaggaggccgacaaggacgagttctgcagatgcgagctgaagctgcagaagtggtacggggacctgcggggaaagcccttcgccatcgaagccgagaacagcatcctggacatcagcggcttcagcaagcagtacaactgtgccttcatctggcagaaggacggcgtgaagaagctgaacctgtacctgatcatcaactacttcaagggcggcaagctgcggttcaagaagatcaaacctgaagccttcgaagccaacagattctacaccgtgatcaacaaaaagagcggcgagatcgtgcccatggaggtgaacttcaacttcgacgaccccaacctgatcatcctgcctctggcctttggcaagagacagggcagagaattcatctggaacgacctgctgtccctggaaaccggcagcctgaagctggccaacggaagagtgatcgagaagacactgtacaacagaagaacccggcaggatgagcctgccctgttcgtggccctgaccttcgagcggcgggaggtcctggactcctccaatatcaaaccaatgaacctgatcggcgtggcaagaggcgaaaacatccccgccgtgatcgccctgaccgaccccgagggctgcccactgagccggtttaaggatagcctgggaaacccaacccacatcctgagaatcggcgagagctataaggagaagcagcggaccatccaggccaagaaggaggtggagcagcggagagccggcggctacagccggaagtacgccagcaaagccaagaatctggcagacgatatggtgagaaacaccgctagagatctgctgtactacgccgtgacccaggatgccatgctgatcttcgccaacctgagccggggcttcggccggcagggcaagcggaccttcatggccgagagacagtacacacggatggaggactggctgaccgccaagctggcctacgagggcctgagcaagacctacctgtccaagacactggcccagtacacctccaagacatgcagcaactgtgggtttaccatcaccagcgccgactacgacagggtgctggagaagctgaagaagacagcaacaggctggatgaccacaattaacggcaaggagctgaaggtggagggccagattacctactacaacagatacaagagacagaacgtagtcaaggacctgtccgtcgagctggatagactgagcgaagaatctgtgaacaacgacatctcctcctggacaaagggcagaagcggagaagctctgagcctcctgaagaaaagattctcccatagacccgtgcaggagaagttcgtgtgcctgaactgcggcttcgagacacacgcagccgagcaagccgccctgaacatcgccagatcctggctgttcctgcggagccaggagtacaagaaataccagacaaacaagacaaccggcaacaccgataagagagccttcgtcgagacctggcagtccttttaccggaagaagcttaaggaggtgtggaaacctgccgtgcggtctggcggatctggcggaggctccaccagccccaagaaaaagagaaaagtctaagctgccttctgcggggcttgccttctggccatgcccttcttctctcccttgcacctgtacctcttggtctttgaataaagcctgagtaggaaggctagcaaaaaaaaaaaaaaaaaaaaaaaaaaaaaaaaaaaaaaaaaaaaaaaaaaaaaaaaaaaaaaaaaaaaaaaaaaaaaaaa

SEQ ID NO: 10392 - RNA, 8787 nt, synthetic construct
  source 1..8787: mol_type = other RNA
aggaaataagagagaaaagaagagtaagaagaaatataagagccaccatggcccctaagaagaagcgtaaagtgagccggatgaaccacgaccaggagttcgacccccctaaggtgtaccctcccgtccccgccgagaagagaaagcccatccgggtcctgagcctgttcgatggcatcgccaccggtctgctggtgctgaaggacctgggcatccaggtggataggtacattgcctccgaggtgtgcgaggactccatcaccgtgggaatggtgcgtcatcagggcaagatcatgtacgtgggcgacgtgcggagcgtgacacagaagcatatccaggagtggggccctttcgacctggtgatcggcggcagcccttgcaatgacctgagcatcgtgaacccagcccggaagggcctgtacgagggaaccggcagactgttcttcgagttttacagactgctgcacgacgcccggcctaaggaaggcgacgaccggcccttcttttggctgttcgagaatgtggtggccatgggagtcagcgacaagcgggatattagccggttcctggagagcaaccccgtgatgatcgatgccaaggaagtgagcgccgcccaccgggccagatacttctggggcaatctgcctggcatgaacagacccctggccagcaccgtgaacgacaagctggagctgcaggagtgcctggagcacggccggatcgccaagttcagcaaggtgagaaccatcaccacccgaagcaacagcatcaaacaaggcaaggaccagcactttcctgtgttcatgaacgagaaggaggacatcctgtggtgtaccgagatggagagagtgttcgggttcccagtccactacacagatgtcagcaacatgtctagactggccagacagagactgctgggaagaagctggtccgtccctgtgatcagacacctgttcgcccctctgaaggagtacttcgcctgcgtgagcagcggcaacagcaacgccaacagccggggccccagcttctctagcggcctggtgccactgtccctgagagggagccacatgggccccatggagatctacaaaaccgtgagcgcctggaagcggcagcctgtgcgcgtgctgagcctgtttcggaatatcgataaagtcctgaaaagcctgggattcctggagagcggctctggctccggcggtggcaccctgaagtacgtggaggatgtgacaaacgtggtcagacgggatgtggagaagtggggccccttcgatctggtgtacggcagcacccaacccctgggcagctcttgtgaccggtgccctggctggtacatgtttcagttccaccggatcctgcagtacgccctgccgagacaggagtcccagcggccattcttttggattttcatggacaacttgctgctgaccgaggatgaccaggaaactaccactcggttcctgcagaccgaagccgtgaccctgcaggacgtgagaggccgggactaccagaacgccatgcgggtgtggtccaacatccctggactgaaaagcaagcacgcacctctgacccctaaagaagaggagtacctgcaggcccaggtgcggagcagaagcaagctggacgcccctaaggtggatctgctggtgaagaattgcctcctgcccctgagagagtacttcaagtatttcagccagaatagtctgcccctgggaggcagcggcggcggcagccaggccagcgtgagcttcaaggacgtgaccatcgagttcacccaggaggagtggcagcagatggcccccgtgcagaagaacctgtacagggacgtgatgctggagaactacagcaacctggtgagcgtgggctactgctgcttcaagcccgaggtgatcttcaagctggagcagggcgaggagccctggttcagcgaggaggagttcagcaaccagagccaccccaaggactacaggggcggcggcccaagcagcggcgcccctcctcccagcggcggcaggcggcccaagcagcggcgcccctcctcccagcggcggcagcccagccggctccccaacctctaccgaggagggcacctctgagtccgccacccccgagagcggccctggcacctccaccgagcccagcgagggcagcgcacccggcagccctgccggcagccccacctccacagaggagggaaccagcaccgagcccagcgaaggcagcgccccaggcaccagcaccgagcctagtgagcaggagattaaacggatcaacaagatcagaagaagacttgtgaaagacagcaacaccaagaaggccggcaagacaggccccatgaaaaccctgctggttagagtgatgacacccgatctgagagagcggctggaaaacctgagaaagaagcctgaaaatatcccccagcccatcagcaatacatctagagccaacctgaataagctgctgaccgattacaccgaaatgaagaaggcgatcctgcatgtgtactgggaagagttccagaaggaccctgtgggcctgatgagccgggtggcccagcctgccagcaagaagatcgatcagaacaagctgaaacctgagatggacgagaagggcaacctgaccaccgccggctttgcctgctctcagtgtggccagcccctgttcgtgtacaagctggagcaggtgtctgagaagggcaaggcttacaccaactacttcggacggtgcaatgtggccgagcacgaaaagctgatcctgctggcccagctgaagcccgagaaggatagcgacgaagccgtgacatatagcctgggaaagtttgggcagagggccctggatttctacagcattcatgtgaccaaggagtccacccaccccgtgaagcccctggcccagatcgccggaaacagatacgcctccggacctgtgggaaaggccctgagcgacgcatgtatgggcacaatcgcctccttcctgtctaagtaccaggacatcatcatcgaacaccagaaggtggtgaagggcaaccagaagagactggagagcctgcgggagctggccggcaaggaaaacctggaataccctagcgtgaccctgccacctcagcctcacaccaaggagggcgttgatgcctacaacgaagtgatcgcccgggtgcgaatgtgggtgaacctgaacctgtggcagaagctgaagctaagcagagatgatgccaagcctctgctgagactgaagggattcccttcctttcctctggtcgagagacaggccaacgaagtggactggtgggacatggtgtgtaacgtgaagaagctgatcaacgagaaaaaggaggatggcaaggtgttttggcagaatctggctggctacaagagacaggaagccctgagaccatacctgagcagcgaggaagatcggaagaagggaaagaaattcgctcggtaccagctgggcgacctgctgctgcacctggaaaagaagcacggcgaggactggggaaaggtgtacgacgaggcctgggagcggattgacaagaaagtggaaggcctgagcaagcacatcaagctggaagaggaacggagaagcgaggacgcccagagcaaggccgccctgaccgactggctgcgggctaaggccagcttcgtgatcgagggcctgaaggaggccgacaaggacgagttctgcagatgcgagctgaagctgcagaagtggtacggggacctgcggggaaagcccttcgccatcgaagccgagaacagcatcctggacatcagcggcttcagcaagcagtacaactgtgccttcatctggcagaaggacggcgtgaagaagctgaacctgtacctgatcatcaactacttcaagggcggcaagctgcggttcaagaagatcaaacctgaagccttcgaagccaacagattctacaccgtgatcaacaaaaagagcggcgagatcgtgcccatggaggtgaacttcaacttcgacgaccccaacctgatcatcctgcctctggcctttggcaagagacagggcagagaattcatctggaacgacctgctgtccctggaaaccggcagcctgaagctggccaacggaagagtgatcgagaagacactgtacaacagaagaacccggcaggatgagcctgccctgttcgtggccctgaccttcgagcggcgggaggtcctggactcctccaatatcaaaccaatgaacctgatcggcgtggcaagaggcgaaaacatccccgccgtgatcgccctgaccgaccccgagggctgcccactgagccggtttaaggatagcctgggaaacccaacccacatcctgagaatcggcgagagctataaggagaagcagcggaccatccaggccaagaaggaggtggagcagcggagagccggcggctacagccggaagtacgccagcaaagccaagaatctggcagacgatatggtgagaaacaccgctagagatctgctgtactacgccgtgacccaggatgccatgctgatcttcgccaacctgagccggggcttcggccggcagggcaagcggaccttcatggccgagagacagtacacacggatggaggactggctgaccgccaagctggcctacgagggcctgagcaagacctacctgtccaagacactggcccagtacacctccaagacatgcagcaactgtgggtttaccatcaccagcgccgactacgacagggtgctggagaagctgaagaagacagcaacaggctggatgaccacaattaacggcaaggagctgaaggtggagggccagattacctactacaacagatacaagagacagaacgtagtcaaggacctgtccgtcgagctggatagactgagcgaagaatctgtgaacaacgacatctcctcctggacaaagggcagaagcggagaagctctgagcctcctgaagaaaagattctcccatagacccgtgcaggagaagttcgtgtgcctgaactgcggcttcgagacacacgcagccgagcaagccgccctgaacatcgccagatcctggctgttcctgcggagccaggagtacaagaaataccagacaaacaagacaaccggcaacaccgataagagagccttcgtcgagacctggcagtccttttaccggaagaagcttaaggaggtgtggaaacctgccgtgcggtctggcggatctggcggaggctccaccagccccaagaaaaagagaaaagtctaagctgccttctgcggggcttgccttctggccatgcccttcttctctcccttgcacctgtacctcttggtctttgaataaagcctgagtaggaaggctagcaaaaaaaaaaaaaaaaaaaaaaaaaaaaaaaaaaaaaaaaaaaaaaaaaaaaaaaaaaaaaaaaaaaaaaaaaaaaaaaagcccagccggctccccaacctctaccgaggagggcacctctgagtccgccacccccgagagcggccctggcacctccaccgagcccagcgagggcagcgcacccggcagccctgccggcagccccacctccacagaggagggaaccagcaccgagcccagcgaaggcagcgccccaggcaccagcaccgagcctagtgagcaggagattaaacggatcaacaagatcagaagaagacttgtgaaagacagcaacaccaagaaggccggcaagacaggccccatgaaaaccctgctggttagagtgatgacacccgatctgagagagcggctggaaaacctgagaaagaagcctgaaaatatcccccagcccatcagcaatacatctagagccaacctgaataagctgctgaccgattacaccgaaatgaagaaggcgatcctgcatgtgtactgggaagagttccagaaggaccctgtgggcctgatgagccgggtggcccagcctgccagcaagaagatcgatcagaacaagctgaaacctgagatggacgagaagggcaacctgaccaccgccggctttgcctgctctcagtgtggccagcccctgttcgtgtacaagctggagcaggtgtctgagaagggcaaggcttacaccaactacttcggacggtgcaatgtggccgagcacgaaaagctgatcctgctggcccagctgaagcccgagaaggatagcgacgaagccgtgacatatagcctgggaaagtttgggcagagggccctggatttctacagcattcatgtgaccaaggagtccacccaccccgtgaagcccctggcccagatcgccggaaacagatacgcctccggacctgtgggaaaggccctgagcgacgcatgtatgggcacaatcgcctccttcctgtctaagtaccaggacatcatcatcgaacaccagaaggtggtgaagggcaaccagaagagactggagagcctgcgggagctggccggcaaggaaaacctggaataccctagcgtgaccctgccacctcagcctcacaccaaggagggcgttgatgcctacaacgaagtgatcgcccgggtgcgaatgtgggtgaacctgaacctgtggcagaagctgaagctaagcagagatgatgccaagcctctgctgagactgaagggattcccttcctttcctctggtcgagagacaggccaacgaagtggactggtgggacatggtgtgtaacgtgaagaagctgatcaacgagaaaaaggaggatggcaaggtgttttggcagaatctggctggctacaagagacaggaagccctgagaccatacctgagcagcgaggaagatcggaagaagggaaagaaattcgctcggtaccagctgggcgacctgctgctgcacctggaaaagaagcacggcgaggactggggaaaggtgtacgacgaggcctgggagcggattgacaagaaagtggaaggcctgagcaagcacatcaagctggaagaggaacggagaagcgaggacgcccagagcaaggccgccctgaccgactggctgcgggctaaggccagcttcgtgatcgagggcctgaaggaggccgacaaggacgagttctgcagatgcgagctgaagctgcagaagtggtacggggacctgcggggaaagcccttcgccatcgaagccgagaacagcatcctggacatcagcggcttcagcaagcagtacaactgtgccttcatctggcagaaggacggcgtgaagaagctgaacctgtacctgatcatcaactacttcaagggcggcaagctgcggttcaagaagatcaaacctgaagccttcgaagccaacagattctacaccgtgatcaacaaaaagagcggcgagatcgtgcccatggaggtgaacttcaacttcgacgaccccaacctgatcatcctgcctctggcctttggcaagagacagggcagagaattcatctggaacgacctgctgtccctggaaaccggcagcctgaagctggccaacggaagagtgatcgagaagacactgtacaacagaagaacccggcaggatgagcctgccctgttcgtggccctgaccttcgagcggcgggaggtcctggactcctccaatatcaaaccaatgaacctgatcggcgtggcaagaggcgaaaacatccccgccgtgatcgccctgaccgaccccgagggctgcccactgagccggtttaaggatagcctgggaaacccaacccacatcctgagaatcggcgagagctataaggagaagcagcggaccatccaggccaagaaggaggtggagcagcggagagccggcggctacagccggaagtacgccagcaaagccaagaatctggcagacgatatggtgagaaacaccgctagagatctgctgtactacgccgtgacccaggatgccatgctgatcttcgccaacctgagccggggcttcggccggcagggcaagcggaccttcatggccgagagacagtacacacggatggaggactggctgaccgccaagctggcctacgagggcctgagcaagacctacctgtccaagacactggcccagtacacctccaagacatgcagcaactgtgggtttaccatcaccagcgccgactacgacagggtgctggagaagctgaagaagacagcaacaggctggatgaccacaattaacggcaaggagctgaaggtggagggccagattacctactacaacagatacaagagacagaacgtagtcaaggacctgtccgtcgagctggatagactgagcgaagaatctgtgaacaacgacatctcctcctggacaaagggcagaagcggagaagctctgagcctcctgaagaaaagattctcccatagacccgtgcaggagaagttcgtgtgcctgaactgcggcttcgagacacacgcagccgagcaagccgccctgaacatcgccagatcctggctgttcctgcggagccaggagtacaagaaataccagacaaacaagacaaccggcaacaccgataagagagccttcgtcgagacctggcagtccttttaccggaagaagcttaaggaggtgtggaaacctgccgtgcggtctggcggatctggcggaggctccaccagccccaagaaaaagagaaaagtctaagctgccttctgcggggcttgccttctggccatgcccttcttctctcccttgcacctgtacctcttggtctttgaataaagcctgagtaggaaggctagcaaaaaaaaaaaaaaaaaaaaaaaaaaaaaaaaaaaaaaaaaaaaaaaaaaaaaaaaaaaaaaaaaaaaaaaaaaaaaaaa

SEQ ID NO: 10393 - RNA, 8787 nt, synthetic construct
  source 1..8787: mol_type = other RNA
aggaaataagagagaaaagaagagtaagaagaaatataagagccaccatggcccctaagaagaagcgtaaagtgagccggatgaaccacgaccaggagttcgacccccctaaggtgtaccctcccgtccccgccgagaagagaaagcccatccgggtcctgagcctgttcgatggcatcgccaccggtctgctggtgctgaaggacctgggcatccaggtggataggtacattgcctccgaggtgtgcgaggactccatcaccgtgggaatggtgcgtcatcagggcaagatcatgtacgtgggcgacgtgcggagcgtgacacagaagcatatccaggagtggggccctttcgacctggtgatcggcggcagcccttgcaatgacctgagcatcgtgaacccagcccggaagggcctgtacgagggaaccggcagactgttcttcgagttttacagactgctgcacgacgcccggcctaaggaaggcgacgaccggcccttcttttggctgttcgagaatgtggtggccatgggagtcagcgacaagcgggatattagccggttcctggagagcaaccccgtgatgatcgatgccaaggaagtgagcgccgcccaccgggccagatacttctggggcaatctgcctggcatgaacagacccctggccagcaccgtgaacgacaagctggagctgcaggagtgcctggagcacggccggatcgccaagttcagcaaggtgagaaccatcaccacccgaagcaacagcatcaaacaaggcaaggaccagcactttcctgtgttcatgaacgagaaggaggacatcctgtggtgtaccgagatggagagagtgttcgggttcccagtccactacacagatgtcagcaacatgtctagactggccagacagagactgctgggaagaagctggtccgtccctgtgatcagacacctgttcgcccctctgaaggagtacttcgcctgcgtgagcagcggcaacagcaacgccaacagccggggccccagcttctctagcggcctggtgccactgtccctgagagggagccacatgggccccatggagatctacaaaaccgtgagcgcctggaagcggcagcctgtgcgcgtgctgagcctgtttcggaatatcgataaagtcctgaaaagcctgggattcctggagagcggctctggctccggcggtggcaccctgaagtacgtggaggatgtgacaaacgtggtcagacgggatgtggagaagtggggccccttcgatctggtgtacggcagcacccaacccctgggcagctcttgtgaccggtgccctggctggtacatgtttcagttccaccggatcctgcagtacgccctgccgagacaggagtcccagcggccattcttttggattttcatggacaacttgctgctgaccgaggatgaccaggaaactaccactcggttcctgcagaccgaagccgtgaccctgcaggacgtgagaggccgggactaccagaacgccatgcgggtgtggtccaacatccctggactgaaaagcaagcacgcacctctgacccctaaagaagaggagtacctgcaggcccaggtgcggagcagaagcaagctggacgcccctaaggtggatctgctggtgaagaattgcctcctgcccctgagagagtacttcaagtatttcagccagaatagtctgcccctgggaggcagcggcggcggcgtgaaggagagcgtgaccttcaaggacgtggccatcgacttcaccctggaggagtggaggctgatggaccccacccagaggaacctgcacaaggacgtgatgctggagaactacaggaacctggtgagcctgggcctggccgtgagcaagcccgacatgatcagccacctggagaacggcaagggcccctggcccaagcccgccaccaagaacgccaccaggaccaaggacatcagcgaggacggcggcccaagcagcggcgcccctcctcccagcggcggcaggcggcccaagcagcggcgcccctcctcccagcggcggcagcccagccggctccccaacctctaccgaggagggcacctctgagtccgccacccccgagagcggccctggcacctccaccgagcccagcgagggcagcgcacccggcagccctgccggcagccccacctccacagaggagggaaccagcaccgagcccagcgaaggcagcgccccaggcaccagcaccgagcctagtgagcaggagattaaacggatcaacaagatcagaagaagacttgtgaaagacagcaacaccaagaaggccggcaagacaggccccatgaaaaccctgctggttagagtgatgacacccgatctgagagagcggctggaaaacctgagaaagaagcctgaaaatatcccccagcccatcagcaatacatctagagccaacctgaataagctgctgaccgattacaccgaaatgaagaaggcgatcctgcatgtgtactgggaagagttccagaaggaccctgtgggcctgatgagccgggtggcccagcctgccagcaagaagatcgatcagaacaagctgaaacctgagatggacgagaagggcaacctgaccaccgccggctttgcctgctctcagtgtggccagcccctgttcgtgtacaagctggagcaggtgtctgagaagggcaaggcttacaccaactacttcggacggtgcaatgtggccgagcacgaaaagctgatcctgctggcccagctgaagcccgagaaggatagcgacgaagccgtgacatatagcctgggaaagtttgggcagagggccctggatttctacagcattcatgtgaccaaggagtccacccaccccgtgaagcccctggcccagatcgccggaaacagatacgcctccggacctgtgggaaaggccctgagcgacgcatgtatgggcacaatcgcctccttcctgtctaagtaccaggacatcatcatcgaacaccagaaggtggtgaagggcaaccagaagagactggagagcctgcgggagctggccggcaaggaaaacctggaataccctagcgtgaccctgccacctcagcctcacaccaaggagggcgttgatgcctacaacgaagtgatcgcccgggtgcgaatgtgggtgaacctgaacctgtggcagaagctgaagctaagcagagatgatgccaagcctctgctgagactgaagggattcccttcctttcctctggtcgagagacaggccaacgaagtggactggtgggacatggtgtgtaacgtgaagaagctgatcaacgagaaaaaggaggatggcaaggtgttttggcagaatctggctggctacaagagacaggaagccctgagaccatacctgagcagcgaggaagatcggaagaagggaaagaaattcgctcggtaccagctgggcgacctgctgctgcacctggaaaagaagcacggcgaggactggggaaaggtgtacgacgaggcctgggagcggattgacaagaaagtggaaggcctgagcaagcacatcaagctggaagaggaacggagaagcgaggacgcccagagcaaggccgccctgaccgactggctgcgggctaaggccagcttcgtgatcgagggcctgaaggaggccgacaaggacgagttctgcagatgcgagctgaagctgcagaagtggtacggggacctgcggggaaagcccttcgccatcgaagccgagaacagcatcctggacatcagcggcttcagcaagcagtacaactgtgccttcatctggcagaaggacggcgtgaagaagctgaacctgtacctgatcatcaactacttcaagggcggcaagctgcggttcaagaagatcaaacctgaagccttcgaagccaacagattctacaccgtgatcaacaaaaagagcggcgagatcgtgcccatggaggtgaacttcaacttcgacgaccccaacctgatcatcctgcctctggcctttggcaagagacagggcagagaattcatctggaacgacctgctgtccctggaaaccggcagcctgaagctggccaacggaagagtgatcgagaagacactgtacaacagaagaacccggcaggatgagcctgccctgttcgtggccctgaccttcgagcggcgggaggtcctggactcctccaatatcaaaccaatgaacctgatcggcgtggcaagaggcgaaaacatccccgccgtgatcgccctgaccgaccccgagggctgcccactgagccggtttaaggatagcctgggaaacccaacccacatcctgagaatcggcgagagctataaggagaagcagcggaccatccaggccaagaaggaggtggagcagcggagagccggcggctacagccggaagtacgccagcaaagccaagaatctggcagacgatatggtgagaaacaccgctagagatctgctgtactacgccgtgacccaggatgccatgctgatcttcgccaacctgagccggggcttcggccggcagggcaagcggaccttcatggccgagagacagtacacacggatggaggactggctgaccgccaagctggcctacgagggcctgagcaagacctacctgtccaagacactggcccagtacacctccaagacatgcagcaactgtgggtttaccatcaccagcgccgactacgacagggtgctggagaagctgaagaagacagcaacaggctggatgaccacaattaacggcaaggagctgaaggtggagggccagattacctactacaacagatacaagagacagaacgtagtcaaggacctgtccgtcgagctggatagactgagcgaagaatctgtgaacaacgacatctcctcctggacaaagggcagaagcggagaagctctgagcctcctgaagaaaagattctcccatagacccgtgcaggagaagttcgtgtgcctgaactgcggcttcgagacacacgcagccgagcaagccgccctgaacatcgccagatcctggctgttcctgcggagccaggagtacaagaaataccagacaaacaagacaaccggcaacaccgataagagagccttcgtcgagacctggcagtccttttaccggaagaagcttaaggaggtgtggaaacctgccgtgcggtctggcggatctggcggaggctccaccagccccaagaaaaagagaaaagtctaagctgccttctgcggggcttgccttctggccatgcccttcttctctcccttgcacctgtacctcttggtctttgaataaagcctgagtaggaaggctagcaaaaaaaaaaaaaaaaaaaaaaaaaaaaaaaaaaaaaaaaaaaaaaaaaaaaaaaaaaaaaaaaaaaaaaaaaaaaaaaagcccagccggctccccaacctctaccgaggagggcacctctgagtccgccacccccgagagcggccctggcacctccaccgagcccagcgagggcagcgcacccggcagccctgccggcagccccacctccacagaggagggaaccagcaccgagcccagcgaaggcagcgccccaggcaccagcaccgagcctagtgagcaggagattaaacggatcaacaagatcagaagaagacttgtgaaagacagcaacaccaagaaggccggcaagacaggccccatgaaaaccctgctggttagagtgatgacacccgatctgagagagcggctggaaaacctgagaaagaagcctgaaaatatcccccagcccatcagcaatacatctagagccaacctgaataagctgctgaccgattacaccgaaatgaagaaggcgatcctgcatgtgtactgggaagagttccagaaggaccctgtgggcctgatgagccgggtggcccagcctgccagcaagaagatcgatcagaacaagctgaaacctgagatggacgagaagggcaacctgaccaccgccggctttgcctgctctcagtgtggccagcccctgttcgtgtacaagctggagcaggtgtctgagaagggcaaggcttacaccaactacttcggacggtgcaatgtggccgagcacgaaaagctgatcctgctggcccagctgaagcccgagaaggatagcgacgaagccgtgacatatagcctgggaaagtttgggcagagggccctggatttctacagcattcatgtgaccaaggagtccacccaccccgtgaagcccctggcccagatcgccggaaacagatacgcctccggacctgtgggaaaggccctgagcgacgcatgtatgggcacaatcgcctccttcctgtctaagtaccaggacatcatcatcgaacaccagaaggtggtgaagggcaaccagaagagactggagagcctgcgggagctggccggcaaggaaaacctggaataccctagcgtgaccctgccacctcagcctcacaccaaggagggcgttgatgcctacaacgaagtgatcgcccgggtgcgaatgtgggtgaacctgaacctgtggcagaagctgaagctaagcagagatgatgccaagcctctgctgagactgaagggattcccttcctttcctctggtcgagagacaggccaacgaagtggactggtgggacatggtgtgtaacgtgaagaagctgatcaacgagaaaaaggaggatggcaaggtgttttggcagaatctggctggctacaagagacaggaagccctgagaccatacctgagcagcgaggaagatcggaagaagggaaagaaattcgctcggtaccagctgggcgacctgctgctgcacctggaaaagaagcacggcgaggactggggaaaggtgtacgacgaggcctgggagcggattgacaagaaagtggaaggcctgagcaagcacatcaagctggaagaggaacggagaagcgaggacgcccagagcaaggccgccctgaccgactggctgcgggctaaggccagcttcgtgatcgagggcctgaaggaggccgacaaggacgagttctgcagatgcgagctgaagctgcagaagtggtacggggacctgcggggaaagcccttcgccatcgaagccgagaacagcatcctggacatcagcggcttcagcaagcagtacaactgtgccttcatctggcagaaggacggcgtgaagaagctgaacctgtacctgatcatcaactacttcaagggcggcaagctgcggttcaagaagatcaaacctgaagccttcgaagccaacagattctacaccgtgatcaacaaaaagagcggcgagatcgtgcccatggaggtgaacttcaacttcgacgaccccaacctgatcatcctgcctctggcctttggcaagagacagggcagagaattcatctggaacgacctgctgtccctggaaaccggcagcctgaagctggccaacggaagagtgatcgagaagacactgtacaacagaagaacccggcaggatgagcctgccctgttcgtggccctgaccttcgagcggcgggaggtcctggactcctccaatatcaaaccaatgaacctgatcggcgtggcaagaggcgaaaacatccccgccgtgatcgccctgaccgaccccgagggctgcccactgagccggtttaaggatagcctgggaaacccaacccacatcctgagaatcggcgagagctataaggagaagcagcggaccatccaggccaagaaggaggtggagcagcggagagccggcggctacagccggaagtacgccagcaaagccaagaatctggcagacgatatggtgagaaacaccgctagagatctgctgtactacgccgtgacccaggatgccatgctgatcttcgccaacctgagccggggcttcggccggcagggcaagcggaccttcatggccgagagacagtacacacggatggaggactggctgaccgccaagctggcctacgagggcctgagcaagacctacctgtccaagacactggcccagtacacctccaagacatgcagcaactgtgggtttaccatcaccagcgccgactacgacagggtgctggagaagctgaagaagacagcaacaggctggatgaccacaattaacggcaaggagctgaaggtggagggccagattacctactacaacagatacaagagacagaacgtagtcaaggacctgtccgtcgagctggatagactgagcgaagaatctgtgaacaacgacatctcctcctggacaaagggcagaagcggagaagctctgagcctcctgaagaaaagattctcccatagacccgtgcaggagaagttcgtgtgcctgaactgcggcttcgagacacacgcagccgagcaagccgccctgaacatcgccagatcctggctgttcctgcggagccaggagtacaagaaataccagacaaacaagacaaccggcaacaccgataagagagccttcgtcgagacctggcagtccttttaccggaagaagcttaaggaggtgtggaaacctgccgtgcggtctggcggatctggcggaggctccaccagccccaagaaaaagagaaaagtctaagctgccttctgcggggcttgccttctggccatgcccttcttctctcccttgcacctgtacctcttggtctttgaataaagcctgagtaggaaggctagcaaaaaaaaaaaaaaaaaaaaaaaaaaaaaaaaaaaaaaaaaaaaaaaaaaaaaaaaaaaaaaaaaaaaaaaaaaaaaaaa

SEQ ID NO: 10394 - RNA, 8787 nt, synthetic construct
  source 1..8787: mol_type = other RNA
aggaaataagagagaaaagaagagtaagaagaaatataagagccaccatggcccctaagaagaagcgtaaagtgagccggatgaaccacgaccaggagttcgacccccctaaggtgtaccctcccgtccccgccgagaagagaaagcccatccgggtcctgagcctgttcgatggcatcgccaccggtctgctggtgctgaaggacctgggcatccaggtggataggtacattgcctccgaggtgtgcgaggactccatcaccgtgggaatggtgcgtcatcagggcaagatcatgtacgtgggcgacgtgcggagcgtgacacagaagcatatccaggagtggggccctttcgacctggtgatcggcggcagcccttgcaatgacctgagcatcgtgaacccagcccggaagggcctgtacgagggaaccggcagactgttcttcgagttttacagactgctgcacgacgcccggcctaaggaaggcgacgaccggcccttcttttggctgttcgagaatgtggtggccatgggagtcagcgacaagcgggatattagccggttcctggagagcaaccccgtgatgatcgatgccaaggaagtgagcgccgcccaccgggccagatacttctggggcaatctgcctggcatgaacagacccctggccagcaccgtgaacgacaagctggagctgcaggagtgcctggagcacggccggatcgccaagttcagcaaggtgagaaccatcaccacccgaagcaacagcatcaaacaaggcaaggaccagcactttcctgtgttcatgaacgagaaggaggacatcctgtggtgtaccgagatggagagagtgttcgggttcccagtccactacacagatgtcagcaacatgtctagactggccagacagagactgctgggaagaagctggtccgtccctgtgatcagacacctgttcgcccctctgaaggagtacttcgcctgcgtgagcagcggcaacagcaacgccaacagccggggccccagcttctctagcggcctggtgccactgtccctgagagggagccacatgggccccatggagatctacaaaaccgtgagcgcctggaagcggcagcctgtgcgcgtgctgagcctgtttcggaatatcgataaagtcctgaaaagcctgggattcctggagagcggctctggctccggcggtggcaccctgaagtacgtggaggatgtgacaaacgtggtcagacgggatgtggagaagtggggccccttcgatctggtgtacggcagcacccaacccctgggcagctcttgtgaccggtgccctggctggtacatgtttcagttccaccggatcctgcagtacgccctgccgagacaggagtcccagcggccattcttttggattttcatggacaacttgctgctgaccgaggatgaccaggaaactaccactcggttcctgcagaccgaagccgtgaccctgcaggacgtgagaggccgggactaccagaacgccatgcgggtgtggtccaacatccctggactgaaaagcaagcacgcacctctgacccctaaagaagaggagtacctgcaggcccaggtgcggagcagaagcaagctggacgcccctaaggtggatctgctggtgaagaattgcctcctgcccctgagagagtacttcaagtatttcagccagaatagtctgcccctgggaggcagcggcggcggcgcccaggagatggtgaccttccaggacgtggccgtggacttcaccagggaggagtggtgcctgctgagccccccccagaaggagctgtacaaggaggtgatgctggagaacgccaggaacctgctgagcgtgggcctgcccgccctgcccgaggacgtgatcagctacctggagcagagggaggccccctggatgctggagagggagggccccaggagctgctgccccggcgagatcctgctgggcggcccaagcagcggcgcccctcctcccagcggcggcaggcggcccaagcagcggcgcccctcctcccagcggcggcagcccagccggctccccaacctctaccgaggagggcacctctgagtccgccacccccgagagcggccctggcacctccaccgagcccagcgagggcagcgcacccggcagccctgccggcagccccacctccacagaggagggaaccagcaccgagcccagcgaaggcagcgccccaggcaccagcaccgagcctagtgagcaggagattaaacggatcaacaagatcagaagaagacttgtgaaagacagcaacaccaagaaggccggcaagacaggccccatgaaaaccctgctggttagagtgatgacacccgatctgagagagcggctggaaaacctgagaaagaagcctgaaaatatcccccagcccatcagcaatacatctagagccaacctgaataagctgctgaccgattacaccgaaatgaagaaggcgatcctgcatgtgtactgggaagagttccagaaggaccctgtgggcctgatgagccgggtggcccagcctgccagcaagaagatcgatcagaacaagctgaaacctgagatggacgagaagggcaacctgaccaccgccggctttgcctgctctcagtgtggccagcccctgttcgtgtacaagctggagcaggtgtctgagaagggcaaggcttacaccaactacttcggacggtgcaatgtggccgagcacgaaaagctgatcctgctggcccagctgaagcccgagaaggatagcgacgaagccgtgacatatagcctgggaaagtttgggcagagggccctggatttctacagcattcatgtgaccaaggagtccacccaccccgtgaagcccctggcccagatcgccggaaacagatacgcctccggacctgtgggaaaggccctgagcgacgcatgtatgggcacaatcgcctccttcctgtctaagtaccaggacatcatcatcgaacaccagaaggtggtgaagggcaaccagaagagactggagagcctgcgggagctggccggcaaggaaaacctggaataccctagcgtgaccctgccacctcagcctcacaccaaggagggcgttgatgcctacaacgaagtgatcgcccgggtgcgaatgtgggtgaacctgaacctgtggcagaagctgaagctaagcagagatgatgccaagcctctgctgagactgaagggattcccttcctttcctctggtcgagagacaggccaacgaagtggactggtgggacatggtgtgtaacgtgaagaagctgatcaacgagaaaaaggaggatggcaaggtgttttggcagaatctggctggctacaagagacaggaagccctgagaccatacctgagcagcgaggaagatcggaagaagggaaagaaattcgctcggtaccagctgggcgacctgctgctgcacctggaaaagaagcacggcgaggactggggaaaggtgtacgacgaggcctgggagcggattgacaagaaagtggaaggcctgagcaagcacatcaagctggaagaggaacggagaagcgaggacgcccagagcaaggccgccctgaccgactggctgcgggctaaggccagcttcgtgatcgagggcctgaaggaggccgacaaggacgagttctgcagatgcgagctgaagctgcagaagtggtacggggacctgcggggaaagcccttcgccatcgaagccgagaacagcatcctggacatcagcggcttcagcaagcagtacaactgtgccttcatctggcagaaggacggcgtgaagaagctgaacctgtacctgatcatcaactacttcaagggcggcaagctgcggttcaagaagatcaaacctgaagccttcgaagccaacagattctacaccgtgatcaacaaaaagagcggcgagatcgtgcccatggaggtgaacttcaacttcgacgaccccaacctgatcatcctgcctctggcctttggcaagagacagggcagagaattcatctggaacgacctgctgtccctggaaaccggcagcctgaagctggccaacggaagagtgatcgagaagacactgtacaacagaagaacccggcaggatgagcctgccctgttcgtggccctgaccttcgagcggcgggaggtcctggactcctccaatatcaaaccaatgaacctgatcggcgtggcaagaggcgaaaacatccccgccgtgatcgccctgaccgaccccgagggctgcccactgagccggtttaaggatagcctgggaaacccaacccacatcctgagaatcggcgagagctataaggagaagcagcggaccatccaggccaagaaggaggtggagcagcggagagccggcggctacagccggaagtacgccagcaaagccaagaatctggcagacgatatggtgagaaacaccgctagagatctgctgtactacgccgtgacccaggatgccatgctgatcttcgccaacctgagccggggcttcggccggcagggcaagcggaccttcatggccgagagacagtacacacggatggaggactggctgaccgccaagctggcctacgagggcctgagcaagacctacctgtccaagacactggcccagtacacctccaagacatgcagcaactgtgggtttaccatcaccagcgccgactacgacagggtgctggagaagctgaagaagacagcaacaggctggatgaccacaattaacggcaaggagctgaaggtggagggccagattacctactacaacagatacaagagacagaacgtagtcaaggacctgtccgtcgagctggatagactgagcgaagaatctgtgaacaacgacatctcctcctggacaaagggcagaagcggagaagctctgagcctcctgaagaaaagattctcccatagacccgtgcaggagaagttcgtgtgcctgaactgcggcttcgagacacacgcagccgagcaagccgccctgaacatcgccagatcctggctgttcctgcggagccaggagtacaagaaataccagacaaacaagacaaccggcaacaccgataagagagccttcgtcgagacctggcagtccttttaccggaagaagcttaaggaggtgtggaaacctgccgtgcggtctggcggatctggcggaggctccaccagccccaagaaaaagagaaaagtctaagctgccttctgcggggcttgccttctggccatgcccttcttctctcccttgcacctgtacctcttggtctttgaataaagcctgagtaggaaggctagcaaaaaaaaaaaaaaaaaaaaaaaaaaaaaaaaaaaaaaaaaaaaaaaaaaaaaaaaaaaaaaaaaaaaaaaaaaaaaaaagcccagccggctccccaacctctaccgaggagggcacctctgagtccgccacccccgagagcggccctggcacctccaccgagcccagcgagggcagcgcacccggcagccctgccggcagccccacctccacagaggagggaaccagcaccgagcccagcgaaggcagcgccccaggcaccagcaccgagcctagtgagcaggagattaaacggatcaacaagatcagaagaagacttgtgaaagacagcaacaccaagaaggccggcaagacaggccccatgaaaaccctgctggttagagtgatgacacccgatctgagagagcggctggaaaacctgagaaagaagcctgaaaatatcccccagcccatcagcaatacatctagagccaacctgaataagctgctgaccgattacaccgaaatgaagaaggcgatcctgcatgtgtactgggaagagttccagaaggaccctgtgggcctgatgagccgggtggcccagcctgccagcaagaagatcgatcagaacaagctgaaacctgagatggacgagaagggcaacctgaccaccgccggctttgcctgctctcagtgtggccagcccctgttcgtgtacaagctggagcaggtgtctgagaagggcaaggcttacaccaactacttcggacggtgcaatgtggccgagcacgaaaagctgatcctgctggcccagctgaagcccgagaaggatagcgacgaagccgtgacatatagcctgggaaagtttgggcagagggccctggatttctacagcattcatgtgaccaaggagtccacccaccccgtgaagcccctggcccagatcgccggaaacagatacgcctccggacctgtgggaaaggccctgagcgacgcatgtatgggcacaatcgcctccttcctgtctaagtaccaggacatcatcatcgaacaccagaaggtggtgaagggcaaccagaagagactggagagcctgcgggagctggccggcaaggaaaacctggaataccctagcgtgaccctgccacctcagcctcacaccaaggagggcgttgatgcctacaacgaagtgatcgcccgggtgcgaatgtgggtgaacctgaacctgtggcagaagctgaagctaagcagagatgatgccaagcctctgctgagactgaagggattcccttcctttcctctggtcgagagacaggccaacgaagtggactggtgggacatggtgtgtaacgtgaagaagctgatcaacgagaaaaaggaggatggcaaggtgttttggcagaatctggctggctacaagagacaggaagccctgagaccatacctgagcagcgaggaagatcggaagaagggaaagaaattcgctcggtaccagctgggcgacctgctgctgcacctggaaaagaagcacggcgaggactggggaaaggtgtacgacgaggcctgggagcggattgacaagaaagtggaaggcctgagcaagcacatcaagctggaagaggaacggagaagcgaggacgcccagagcaaggccgccctgaccgactggctgcgggctaaggccagcttcgtgatcgagggcctgaaggaggccgacaaggacgagttctgcagatgcgagctgaagctgcagaagtggtacggggacctgcggggaaagcccttcgccatcgaagccgagaacagcatcctggacatcagcggcttcagcaagcagtacaactgtgccttcatctggcagaaggacggcgtgaagaagctgaacctgtacctgatcatcaactacttcaagggcggcaagctgcggttcaagaagatcaaacctgaagccttcgaagccaacagattctacaccgtgatcaacaaaaagagcggcgagatcgtgcccatggaggtgaacttcaacttcgacgaccccaacctgatcatcctgcctctggcctttggcaagagacagggcagagaattcatctggaacgacctgctgtccctggaaaccggcagcctgaagctggccaacggaagagtgatcgagaagacactgtacaacagaagaacccggcaggatgagcctgccctgttcgtggccctgaccttcgagcggcgggaggtcctggactcctccaatatcaaaccaatgaacctgatcggcgtggcaagaggcgaaaacatccccgccgtgatcgccctgaccgaccccgagggctgcccactgagccggtttaaggatagcctgggaaacccaacccacatcctgagaatcggcgagagctataaggagaagcagcggaccatccaggccaagaaggaggtggagcagcggagagccggcggctacagccggaagtacgccagcaaagccaagaatctggcagacgatatggtgagaaacaccgctagagatctgctgtactacgccgtgacccaggatgccatgctgatcttcgccaacctgagccggggcttcggccggcagggcaagcggaccttcatggccgagagacagtacacacggatggaggactggctgaccgccaagctggcctacgagggcctgagcaagacctacctgtccaagacactggcccagtacacctccaagacatgcagcaactgtgggtttaccatcaccagcgccgactacgacagggtgctggagaagctgaagaagacagcaacaggctggatgaccacaattaacggcaaggagctgaaggtggagggccagattacctactacaacagatacaagagacagaacgtagtcaaggacctgtccgtcgagctggatagactgagcgaagaatctgtgaacaacgacatctcctcctggacaaagggcagaagcggagaagctctgagcctcctgaagaaaagattctcccatagacccgtgcaggagaagttcgtgtgcctgaactgcggcttcgagacacacgcagccgagcaagccgccctgaacatcgccagatcctggctgttcctgcggagccaggagtacaagaaataccagacaaacaagacaaccggcaacaccgataagagagccttcgtcgagacctggcagtccttttaccggaagaagcttaaggaggtgtggaaacctgccgtgcggtctggcggatctggcggaggctccaccagccccaagaaaaagagaaaagtctaagctgccttctgcggggcttgccttctggccatgcccttcttctctcccttgcacctgtacctcttggtctttgaataaagcctgagtaggaaggctagcaaaaaaaaaaaaaaaaaaaaaaaaaaaaaaaaaaaaaaaaaaaaaaaaaaaaaaaaaaaaaaaaaaaaaaaaaaaaaaaa

SEQ ID NO: 10395 - RNA, 8787 nt, synthetic construct
  source 1..8787: mol_type = other RNA
aggaaataagagagaaaagaagagtaagaagaaatataagagccaccatggcccctaagaagaagcgtaaagtgagccggatgaaccacgaccaggagttcgacccccctaaggtgtaccctcccgtccccgccgagaagagaaagcccatccgggtcctgagcctgttcgatggcatcgccaccggtctgctggtgctgaaggacctgggcatccaggtggataggtacattgcctccgaggtgtgcgaggactccatcaccgtgggaatggtgcgtcatcagggcaagatcatgtacgtgggcgacgtgcggagcgtgacacagaagcatatccaggagtggggccctttcgacctggtgatcggcggcagcccttgcaatgacctgagcatcgtgaacccagcccggaagggcctgtacgagggaaccggcagactgttcttcgagttttacagactgctgcacgacgcccggcctaaggaaggcgacgaccggcccttcttttggctgttcgagaatgtggtggccatgggagtcagcgacaagcgggatattagccggttcctggagagcaaccccgtgatgatcgatgccaaggaagtgagcgccgcccaccgggccagatacttctggggcaatctgcctggcatgaacagacccctggccagcaccgtgaacgacaagctggagctgcaggagtgcctggagcacggccggatcgccaagttcagcaaggtgagaaccatcaccacccgaagcaacagcatcaaacaaggcaaggaccagcactttcctgtgttcatgaacgagaaggaggacatcctgtggtgtaccgagatggagagagtgttcgggttcccagtccactacacagatgtcagcaacatgtctagactggccagacagagactgctgggaagaagctggtccgtccctgtgatcagacacctgttcgcccctctgaaggagtacttcgcctgcgtgagcagcggcaacagcaacgccaacagccggggccccagcttctctagcggcctggtgccactgtccctgagagggagccacatgggccccatggagatctacaaaaccgtgagcgcctggaagcggcagcctgtgcgcgtgctgagcctgtttcggaatatcgataaagtcctgaaaagcctgggattcctggagagcggctctggctccggcggtggcaccctgaagtacgtggaggatgtgacaaacgtggtcagacgggatgtggagaagtggggccccttcgatctggtgtacggcagcacccaacccctgggcagctcttgtgaccggtgccctggctggtacatgtttcagttccaccggatcctgcagtacgccctgccgagacaggagtcccagcggccattcttttggattttcatggacaacttgctgctgaccgaggatgaccaggaaactaccactcggttcctgcagaccgaagccgtgaccctgcaggacgtgagaggccgggactaccagaacgccatgcgggtgtggtccaacatccctggactgaaaagcaagcacgcacctctgacccctaaagaagaggagtacctgcaggcccaggtgcggagcagaagcaagctggacgcccctaaggtggatctgctggtgaagaattgcctcctgcccctgagagagtacttcaagtatttcagccagaatagtctgcccctgggaggcagcggcggcggcgtgagcttcgaggacgtggccgtgtacttcacccaggaggagtggaccctgctggacagcgcccagagggacctgtacagggacgtgatgctggagacctgcgagaacctggccagcatcggcaacctgctgaaccacagcgtgatgtactggctggagggcgaggagaacctgggcaccgtgcaggagggcgacccccaggagtggaggctgaagaccaagggcagcaccctgaggcccgacggcggcccaagcagcggcgcccctcctcccagcggcggcaggcggcccaagcagcggcgcccctcctcccagcggcggcagcccagccggctccccaacctctaccgaggagggcacctctgagtccgccacccccgagagcggccctggcacctccaccgagcccagcgagggcagcgcacccggcagccctgccggcagccccacctccacagaggagggaaccagcaccgagcccagcgaaggcagcgccccaggcaccagcaccgagcctagtgagcaggagattaaacggatcaacaagatcagaagaagacttgtgaaagacagcaacaccaagaaggccggcaagacaggccccatgaaaaccctgctggttagagtgatgacacccgatctgagagagcggctggaaaacctgagaaagaagcctgaaaatatcccccagcccatcagcaatacatctagagccaacctgaataagctgctgaccgattacaccgaaatgaagaaggcgatcctgcatgtgtactgggaagagttccagaaggaccctgtgggcctgatgagccgggtggcccagcctgccagcaagaagatcgatcagaacaagctgaaacctgagatggacgagaagggcaacctgaccaccgccggctttgcctgctctcagtgtggccagcccctgttcgtgtacaagctggagcaggtgtctgagaagggcaaggcttacaccaactacttcggacggtgcaatgtggccgagcacgaaaagctgatcctgctggcccagctgaagcccgagaaggatagcgacgaagccgtgacatatagcctgggaaagtttgggcagagggccctggatttctacagcattcatgtgaccaaggagtccacccaccccgtgaagcccctggcccagatcgccggaaacagatacgcctccggacctgtgggaaaggccctgagcgacgcatgtatgggcacaatcgcctccttcctgtctaagtaccaggacatcatcatcgaacaccagaaggtggtgaagggcaaccagaagagactggagagcctgcgggagctggccggcaaggaaaacctggaataccctagcgtgaccctgccacctcagcctcacaccaaggagggcgttgatgcctacaacgaagtgatcgcccgggtgcgaatgtgggtgaacctgaacctgtggcagaagctgaagctaagcagagatgatgccaagcctctgctgagactgaagggattcccttcctttcctctggtcgagagacaggccaacgaagtggactggtgggacatggtgtgtaacgtgaagaagctgatcaacgagaaaaaggaggatggcaaggtgttttggcagaatctggctggctacaagagacaggaagccctgagaccatacctgagcagcgaggaagatcggaagaagggaaagaaattcgctcggtaccagctgggcgacctgctgctgcacctggaaaagaagcacggcgaggactggggaaaggtgtacgacgaggcctgggagcggattgacaagaaagtggaaggcctgagcaagcacatcaagctggaagaggaacggagaagcgaggacgcccagagcaaggccgccctgaccgactggctgcgggctaaggccagcttcgtgatcgagggcctgaaggaggccgacaaggacgagttctgcagatgcgagctgaagctgcagaagtggtacggggacctgcggggaaagcccttcgccatcgaagccgagaacagcatcctggacatcagcggcttcagcaagcagtacaactgtgccttcatctggcagaaggacggcgtgaagaagctgaacctgtacctgatcatcaactacttcaagggcggcaagctgcggttcaagaagatcaaacctgaagccttcgaagccaacagattctacaccgtgatcaacaaaaagagcggcgagatcgtgcccatggaggtgaacttcaacttcgacgaccccaacctgatcatcctgcctctggcctttggcaagagacagggcagagaattcatctggaacgacctgctgtccctggaaaccggcagcctgaagctggccaacggaagagtgatcgagaagacactgtacaacagaagaacccggcaggatgagcctgccctgttcgtggccctgaccttcgagcggcgggaggtcctggactcctccaatatcaaaccaatgaacctgatcggcgtggcaagaggcgaaaacatccccgccgtgatcgccctgaccgaccccgagggctgcccactgagccggtttaaggatagcctgggaaacccaacccacatcctgagaatcggcgagagctataaggagaagcagcggaccatccaggccaagaaggaggtggagcagcggagagccggcggctacagccggaagtacgccagcaaagccaagaatctggcagacgatatggtgagaaacaccgctagagatctgctgtactacgccgtgacccaggatgccatgctgatcttcgccaacctgagccggggcttcggccggcagggcaagcggaccttcatggccgagagacagtacacacggatggaggactggctgaccgccaagctggcctacgagggcctgagcaagacctacctgtccaagacactggcccagtacacctccaagacatgcagcaactgtgggtttaccatcaccagcgccgactacgacagggtgctggagaagctgaagaagacagcaacaggctggatgaccacaattaacggcaaggagctgaaggtggagggccagattacctactacaacagatacaagagacagaacgtagtcaaggacctgtccgtcgagctggatagactgagcgaagaatctgtgaacaacgacatctcctcctggacaaagggcagaagcggagaagctctgagcctcctgaagaaaagattctcccatagacccgtgcaggagaagttcgtgtgcctgaactgcggcttcgagacacacgcagccgagcaagccgccctgaacatcgccagatcctggctgttcctgcggagccaggagtacaagaaataccagacaaacaagacaaccggcaacaccgataagagagccttcgtcgagacctggcagtccttttaccggaagaagcttaaggaggtgtggaaacctgccgtgcggtctggcggatctggcggaggctccaccagccccaagaaaaagagaaaagtctaagctgccttctgcggggcttgccttctggccatgcccttcttctctcccttgcacctgtacctcttggtctttgaataaagcctgagtaggaaggctagcaaaaaaaaaaaaaaaaaaaaaaaaaaaaaaaaaaaaaaaaaaaaaaaaaaaaaaaaaaaaaaaaaaaaaaaaaaaaaaaagcccagccggctccccaacctctaccgaggagggcacctctgagtccgccacccccgagagcggccctggcacctccaccgagcccagcgagggcagcgcacccggcagccctgccggcagccccacctccacagaggagggaaccagcaccgagcccagcgaaggcagcgccccaggcaccagcaccgagcctagtgagcaggagattaaacggatcaacaagatcagaagaagacttgtgaaagacagcaacaccaagaaggccggcaagacaggccccatgaaaaccctgctggttagagtgatgacacccgatctgagagagcggctggaaaacctgagaaagaagcctgaaaatatcccccagcccatcagcaatacatctagagccaacctgaataagctgctgaccgattacaccgaaatgaagaaggcgatcctgcatgtgtactgggaagagttccagaaggaccctgtgggcctgatgagccgggtggcccagcctgccagcaagaagatcgatcagaacaagctgaaacctgagatggacgagaagggcaacctgaccaccgccggctttgcctgctctcagtgtggccagcccctgttcgtgtacaagctggagcaggtgtctgagaagggcaaggcttacaccaactacttcggacggtgcaatgtggccgagcacgaaaagctgatcctgctggcccagctgaagcccgagaaggatagcgacgaagccgtgacatatagcctgggaaagtttgggcagagggccctggatttctacagcattcatgtgaccaaggagtccacccaccccgtgaagcccctggcccagatcgccggaaacagatacgcctccggacctgtgggaaaggccctgagcgacgcatgtatgggcacaatcgcctccttcctgtctaagtaccaggacatcatcatcgaacaccagaaggtggtgaagggcaaccagaagagactggagagcctgcgggagctggccggcaaggaaaacctggaataccctagcgtgaccctgccacctcagcctcacaccaaggagggcgttgatgcctacaacgaagtgatcgcccgggtgcgaatgtgggtgaacctgaacctgtggcagaagctgaagctaagcagagatgatgccaagcctctgctgagactgaagggattcccttcctttcctctggtcgagagacaggccaacgaagtggactggtgggacatggtgtgtaacgtgaagaagctgatcaacgagaaaaaggaggatggcaaggtgttttggcagaatctggctggctacaagagacaggaagccctgagaccatacctgagcagcgaggaagatcggaagaagggaaagaaattcgctcggtaccagctgggcgacctgctgctgcacctggaaaagaagcacggcgaggactggggaaaggtgtacgacgaggcctgggagcggattgacaagaaagtggaaggcctgagcaagcacatcaagctggaagaggaacggagaagcgaggacgcccagagcaaggccgccctgaccgactggctgcgggctaaggccagcttcgtgatcgagggcctgaaggaggccgacaaggacgagttctgcagatgcgagctgaagctgcagaagtggtacggggacctgcggggaaagcccttcgccatcgaagccgagaacagcatcctggacatcagcggcttcagcaagcagtacaactgtgccttcatctggcagaaggacggcgtgaagaagctgaacctgtacctgatcatcaactacttcaagggcggcaagctgcggttcaagaagatcaaacctgaagccttcgaagccaacagattctacaccgtgatcaacaaaaagagcggcgagatcgtgcccatggaggtgaacttcaacttcgacgaccccaacctgatcatcctgcctctggcctttggcaagagacagggcagagaattcatctggaacgacctgctgtccctggaaaccggcagcctgaagctggccaacggaagagtgatcgagaagacactgtacaacagaagaacccggcaggatgagcctgccctgttcgtggccctgaccttcgagcggcgggaggtcctggactcctccaatatcaaaccaatgaacctgatcggcgtggcaagaggcgaaaacatccccgccgtgatcgccctgaccgaccccgagggctgcccactgagccggtttaaggatagcctgggaaacccaacccacatcctgagaatcggcgagagctataaggagaagcagcggaccatccaggccaagaaggaggtggagcagcggagagccggcggctacagccggaagtacgccagcaaagccaagaatctggcagacgatatggtgagaaacaccgctagagatctgctgtactacgccgtgacccaggatgccatgctgatcttcgccaacctgagccggggcttcggccggcagggcaagcggaccttcatggccgagagacagtacacacggatggaggactggctgaccgccaagctggcctacgagggcctgagcaagacctacctgtccaagacactggcccagtacacctccaagacatgcagcaactgtgggtttaccatcaccagcgccgactacgacagggtgctggagaagctgaagaagacagcaacaggctggatgaccacaattaacggcaaggagctgaaggtggagggccagattacctactacaacagatacaagagacagaacgtagtcaaggacctgtccgtcgagctggatagactgagcgaagaatctgtgaacaacgacatctcctcctggacaaagggcagaagcggagaagctctgagcctcctgaagaaaagattctcccatagacccgtgcaggagaagttcgtgtgcctgaactgcggcttcgagacacacgcagccgagcaagccgccctgaacatcgccagatcctggctgttcctgcggagccaggagtacaagaaataccagacaaacaagacaaccggcaacaccgataagagagccttcgtcgagacctggcagtccttttaccggaagaagcttaaggaggtgtggaaacctgccgtgcggtctggcggatctggcggaggctccaccagccccaagaaaaagagaaaagtctaagctgccttctgcggggcttgccttctggccatgcccttcttctctcccttgcacctgtacctcttggtctttgaataaagcctgagtaggaaggctagcaaaaaaaaaaaaaaaaaaaaaaaaaaaaaaaaaaaaaaaaaaaaaaaaaaaaaaaaaaaaaaaaaaaaaaaaaaaaaaaa

SEQ ID NO: 10396 - RNA, 8787 nt, synthetic construct
  source 1..8787: mol_type = other RNA
aggaaataagagagaaaagaagagtaagaagaaatataagagccaccatggcccctaagaagaagcgtaaagtgagccggatgaaccacgaccaggagttcgacccccctaaggtgtaccctcccgtccccgccgagaagagaaagcccatccgggtcctgagcctgttcgatggcatcgccaccggtctgctggtgctgaaggacctgggcatccaggtggataggtacattgcctccgaggtgtgcgaggactccatcaccgtgggaatggtgcgtcatcagggcaagatcatgtacgtgggcgacgtgcggagcgtgacacagaagcatatccaggagtggggccctttcgacctggtgatcggcggcagcccttgcaatgacctgagcatcgtgaacccagcccggaagggcctgtacgagggaaccggcagactgttcttcgagttttacagactgctgcacgacgcccggcctaaggaaggcgacgaccggcccttcttttggctgttcgagaatgtggtggccatgggagtcagcgacaagcgggatattagccggttcctggagagcaaccccgtgatgatcgatgccaaggaagtgagcgccgcccaccgggccagatacttctggggcaatctgcctggcatgaacagacccctggccagcaccgtgaacgacaagctggagctgcaggagtgcctggagcacggccggatcgccaagttcagcaaggtgagaaccatcaccacccgaagcaacagcatcaaacaaggcaaggaccagcactttcctgtgttcatgaacgagaaggaggacatcctgtggtgtaccgagatggagagagtgttcgggttcccagtccactacacagatgtcagcaacatgtctagactggccagacagagactgctgggaagaagctggtccgtccctgtgatcagacacctgttcgcccctctgaaggagtacttcgcctgcgtgagcagcggcaacagcaacgccaacagccggggccccagcttctctagcggcctggtgccactgtccctgagagggagccacatgggccccatggagatctacaaaaccgtgagcgcctggaagcggcagcctgtgcgcgtgctgagcctgtttcggaatatcgataaagtcctgaaaagcctgggattcctggagagcggctctggctccggcggtggcaccctgaagtacgtggaggatgtgacaaacgtggtcagacgggatgtggagaagtggggccccttcgatctggtgtacggcagcacccaacccctgggcagctcttgtgaccggtgccctggctggtacatgtttcagttccaccggatcctgcagtacgccctgccgagacaggagtcccagcggccattcttttggattttcatggacaacttgctgctgaccgaggatgaccaggaaactaccactcggttcctgcagaccgaagccgtgaccctgcaggacgtgagaggccgggactaccagaacgccatgcgggtgtggtccaacatccctggactgaaaagcaagcacgcacctctgacccctaaagaagaggagtacctgcaggcccaggtgcggagcagaagcaagctggacgcccctaaggtggatctgctggtgaagaattgcctcctgcccctgagagagtacttcaagtatttcagccagaatagtctgcccctgggaggcagcggcggcggcgcctgggcccccctgagcttcgaggacgtggccgtgggcttcagctgggaggagtggcagctgctggcccccagccagaaggacctgtacagggacgtgatgctggagaactacaggaacctggtgagcgtgggctaccaggccagcaagcccgacagcgtgttccagctggagcagggcgagcccccctggatcgtggagggcgccgcccagagccagacctgccaggaggagatctgggagggcggcccaagcagcggcgcccctcctcccagcggcggcaggcggcccaagcagcggcgcccctcctcccagcggcggcagcccagccggctccccaacctctaccgaggagggcacctctgagtccgccacccccgagagcggccctggcacctccaccgagcccagcgagggcagcgcacccggcagccctgccggcagccccacctccacagaggagggaaccagcaccgagcccagcgaaggcagcgccccaggcaccagcaccgagcctagtgagcaggagattaaacggatcaacaagatcagaagaagacttgtgaaagacagcaacaccaagaaggccggcaagacaggccccatgaaaaccctgctggttagagtgatgacacccgatctgagagagcggctggaaaacctgagaaagaagcctgaaaatatcccccagcccatcagcaatacatctagagccaacctgaataagctgctgaccgattacaccgaaatgaagaaggcgatcctgcatgtgtactgggaagagttccagaaggaccctgtgggcctgatgagccgggtggcccagcctgccagcaagaagatcgatcagaacaagctgaaacctgagatggacgagaagggcaacctgaccaccgccggctttgcctgctctcagtgtggccagcccctgttcgtgtacaagctggagcaggtgtctgagaagggcaaggcttacaccaactacttcggacggtgcaatgtggccgagcacgaaaagctgatcctgctggcccagctgaagcccgagaaggatagcgacgaagccgtgacatatagcctgggaaagtttgggcagagggccctggatttctacagcattcatgtgaccaaggagtccacccaccccgtgaagcccctggcccagatcgccggaaacagatacgcctccggacctgtgggaaaggccctgagcgacgcatgtatgggcacaatcgcctccttcctgtctaagtaccaggacatcatcatcgaacaccagaaggtggtgaagggcaaccagaagagactggagagcctgcgggagctggccggcaaggaaaacctggaataccctagcgtgaccctgccacctcagcctcacaccaaggagggcgttgatgcctacaacgaagtgatcgcccgggtgcgaatgtgggtgaacctgaacctgtggcagaagctgaagctaagcagagatgatgccaagcctctgctgagactgaagggattcccttcctttcctctggtcgagagacaggccaacgaagtggactggtgggacatggtgtgtaacgtgaagaagctgatcaacgagaaaaaggaggatggcaaggtgttttggcagaatctggctggctacaagagacaggaagccctgagaccatacctgagcagcgaggaagatcggaagaagggaaagaaattcgctcggtaccagctgggcgacctgctgctgcacctggaaaagaagcacggcgaggactggggaaaggtgtacgacgaggcctgggagcggattgacaagaaagtggaaggcctgagcaagcacatcaagctggaagaggaacggagaagcgaggacgcccagagcaaggccgccctgaccgactggctgcgggctaaggccagcttcgtgatcgagggcctgaaggaggccgacaaggacgagttctgcagatgcgagctgaagctgcagaagtggtacggggacctgcggggaaagcccttcgccatcgaagccgagaacagcatcctggacatcagcggcttcagcaagcagtacaactgtgccttcatctggcagaaggacggcgtgaagaagctgaacctgtacctgatcatcaactacttcaagggcggcaagctgcggttcaagaagatcaaacctgaagccttcgaagccaacagattctacaccgtgatcaacaaaaagagcggcgagatcgtgcccatggaggtgaacttcaacttcgacgaccccaacctgatcatcctgcctctggcctttggcaagagacagggcagagaattcatctggaacgacctgctgtccctggaaaccggcagcctgaagctggccaacggaagagtgatcgagaagacactgtacaacagaagaacccggcaggatgagcctgccctgttcgtggccctgaccttcgagcggcgggaggtcctggactcctccaatatcaaaccaatgaacctgatcggcgtggcaagaggcgaaaacatccccgccgtgatcgccctgaccgaccccgagggctgcccactgagccggtttaaggatagcctgggaaacccaacccacatcctgagaatcggcgagagctataaggagaagcagcggaccatccaggccaagaaggaggtggagcagcggagagccggcggctacagccggaagtacgccagcaaagccaagaatctggcagacgatatggtgagaaacaccgctagagatctgctgtactacgccgtgacccaggatgccatgctgatcttcgccaacctgagccggggcttcggccggcagggcaagcggaccttcatggccgagagacagtacacacggatggaggactggctgaccgccaagctggcctacgagggcctgagcaagacctacctgtccaagacactggcccagtacacctccaagacatgcagcaactgtgggtttaccatcaccagcgccgactacgacagggtgctggagaagctgaagaagacagcaacaggctggatgaccacaattaacggcaaggagctgaaggtggagggccagattacctactacaacagatacaagagacagaacgtagtcaaggacctgtccgtcgagctggatagactgagcgaagaatctgtgaacaacgacatctcctcctggacaaagggcagaagcggagaagctctgagcctcctgaagaaaagattctcccatagacccgtgcaggagaagttcgtgtgcctgaactgcggcttcgagacacacgcagccgagcaagccgccctgaacatcgccagatcctggctgttcctgcggagccaggagtacaagaaataccagacaaacaagacaaccggcaacaccgataagagagccttcgtcgagacctggcagtccttttaccggaagaagcttaaggaggtgtggaaacctgccgtgcggtctggcggatctggcggaggctccaccagccccaagaaaaagagaaaagtctaagctgccttctgcggggcttgccttctggccatgcccttcttctctcccttgcacctgtacctcttggtctttgaataaagcctgagtaggaaggctagcaaaaaaaaaaaaaaaaaaaaaaaaaaaaaaaaaaaaaaaaaaaaaaaaaaaaaaaaaaaaaaaaaaaaaaaaaaaaaaaagcccagccggctccccaacctctaccgaggagggcacctctgagtccgccacccccgagagcggccctggcacctccaccgagcccagcgagggcagcgcacccggcagccctgccggcagccccacctccacagaggagggaaccagcaccgagcccagcgaaggcagcgccccaggcaccagcaccgagcctagtgagcaggagattaaacggatcaacaagatcagaagaagacttgtgaaagacagcaacaccaagaaggccggcaagacaggccccatgaaaaccctgctggttagagtgatgacacccgatctgagagagcggctggaaaacctgagaaagaagcctgaaaatatcccccagcccatcagcaatacatctagagccaacctgaataagctgctgaccgattacaccgaaatgaagaaggcgatcctgcatgtgtactgggaagagttccagaaggaccctgtgggcctgatgagccgggtggcccagcctgccagcaagaagatcgatcagaacaagctgaaacctgagatggacgagaagggcaacctgaccaccgccggctttgcctgctctcagtgtggccagcccctgttcgtgtacaagctggagcaggtgtctgagaagggcaaggcttacaccaactacttcggacggtgcaatgtggccgagcacgaaaagctgatcctgctggcccagctgaagcccgagaaggatagcgacgaagccgtgacatatagcctgggaaagtttgggcagagggccctggatttctacagcattcatgtgaccaaggagtccacccaccccgtgaagcccctggcccagatcgccggaaacagatacgcctccggacctgtgggaaaggccctgagcgacgcatgtatgggcacaatcgcctccttcctgtctaagtaccaggacatcatcatcgaacaccagaaggtggtgaagggcaaccagaagagactggagagcctgcgggagctggccggcaaggaaaacctggaataccctagcgtgaccctgccacctcagcctcacaccaaggagggcgttgatgcctacaacgaagtgatcgcccgggtgcgaatgtgggtgaacctgaacctgtggcagaagctgaagctaagcagagatgatgccaagcctctgctgagactgaagggattcccttcctttcctctggtcgagagacaggccaacgaagtggactggtgggacatggtgtgtaacgtgaagaagctgatcaacgagaaaaaggaggatggcaaggtgttttggcagaatctggctggctacaagagacaggaagccctgagaccatacctgagcagcgaggaagatcggaagaagggaaagaaattcgctcggtaccagctgggcgacctgctgctgcacctggaaaagaagcacggcgaggactggggaaaggtgtacgacgaggcctgggagcggattgacaagaaagtggaaggcctgagcaagcacatcaagctggaagaggaacggagaagcgaggacgcccagagcaaggccgccctgaccgactggctgcgggctaaggccagcttcgtgatcgagggcctgaaggaggccgacaaggacgagttctgcagatgcgagctgaagctgcagaagtggtacggggacctgcggggaaagcccttcgccatcgaagccgagaacagcatcctggacatcagcggcttcagcaagcagtacaactgtgccttcatctggcagaaggacggcgtgaagaagctgaacctgtacctgatcatcaactacttcaagggcggcaagctgcggttcaagaagatcaaacctgaagccttcgaagccaacagattctacaccgtgatcaacaaaaagagcggcgagatcgtgcccatggaggtgaacttcaacttcgacgaccccaacctgatcatcctgcctctggcctttggcaagagacagggcagagaattcatctggaacgacctgctgtccctggaaaccggcagcctgaagctggccaacggaagagtgatcgagaagacactgtacaacagaagaacccggcaggatgagcctgccctgttcgtggccctgaccttcgagcggcgggaggtcctggactcctccaatatcaaaccaatgaacctgatcggcgtggcaagaggcgaaaacatccccgccgtgatcgccctgaccgaccccgagggctgcccactgagccggtttaaggatagcctgggaaacccaacccacatcctgagaatcggcgagagctataaggagaagcagcggaccatccaggccaagaaggaggtggagcagcggagagccggcggctacagccggaagtacgccagcaaagccaagaatctggcagacgatatggtgagaaacaccgctagagatctgctgtactacgccgtgacccaggatgccatgctgatcttcgccaacctgagccggggcttcggccggcagggcaagcggaccttcatggccgagagacagtacacacggatggaggactggctgaccgccaagctggcctacgagggcctgagcaagacctacctgtccaagacactggcccagtacacctccaagacatgcagcaactgtgggtttaccatcaccagcgccgactacgacagggtgctggagaagctgaagaagacagcaacaggctggatgaccacaattaacggcaaggagctgaaggtggagggccagattacctactacaacagatacaagagacagaacgtagtcaaggacctgtccgtcgagctggatagactgagcgaagaatctgtgaacaacgacatctcctcctggacaaagggcagaagcggagaagctctgagcctcctgaagaaaagattctcccatagacccgtgcaggagaagttcgtgtgcctgaactgcggcttcgagacacacgcagccgagcaagccgccctgaacatcgccagatcctggctgttcctgcggagccaggagtacaagaaataccagacaaacaagacaaccggcaacaccgataagagagccttcgtcgagacctggcagtccttttaccggaagaagcttaaggaggtgtggaaacctgccgtgcggtctggcggatctggcggaggctccaccagccccaagaaaaagagaaaagtctaagctgccttctgcggggcttgccttctggccatgcccttcttctctcccttgcacctgtacctcttggtctttgaataaagcctgagtaggaaggctagcaaaaaaaaaaaaaaaaaaaaaaaaaaaaaaaaaaaaaaaaaaaaaaaaaaaaaaaaaaaaaaaaaaaaaaaaaaaaaaaa

SEQ ID NO: 10397 - RNA, 8787 nt, synthetic construct
  source 1..8787: mol_type = other RNA
aggaaataagagagaaaagaagagtaagaagaaatataagagccaccatggcccctaagaagaagcgtaaagtgagccggatgaaccacgaccaggagttcgacccccctaaggtgtaccctcccgtccccgccgagaagagaaagcccatccgggtcctgagcctgttcgatggcatcgccaccggtctgctggtgctgaaggacctgggcatccaggtggataggtacattgcctccgaggtgtgcgaggactccatcaccgtgggaatggtgcgtcatcagggcaagatcatgtacgtgggcgacgtgcggagcgtgacacagaagcatatccaggagtggggccctttcgacctggtgatcggcggcagcccttgcaatgacctgagcatcgtgaacccagcccggaagggcctgtacgagggaaccggcagactgttcttcgagttttacagactgctgcacgacgcccggcctaaggaaggcgacgaccggcccttcttttggctgttcgagaatgtggtggccatgggagtcagcgacaagcgggatattagccggttcctggagagcaaccccgtgatgatcgatgccaaggaagtgagcgccgcccaccgggccagatacttctggggcaatctgcctggcatgaacagacccctggccagcaccgtgaacgacaagctggagctgcaggagtgcctggagcacggccggatcgccaagttcagcaaggtgagaaccatcaccacccgaagcaacagcatcaaacaaggcaaggaccagcactttcctgtgttcatgaacgagaaggaggacatcctgtggtgtaccgagatggagagagtgttcgggttcccagtccactacacagatgtcagcaacatgtctagactggccagacagagactgctgggaagaagctggtccgtccctgtgatcagacacctgttcgcccctctgaaggagtacttcgcctgcgtgagcagcggcaacagcaacgccaacagccggggccccagcttctctagcggcctggtgccactgtccctgagagggagccacatgggccccatggagatctacaaaaccgtgagcgcctggaagcggcagcctgtgcgcgtgctgagcctgtttcggaatatcgataaagtcctgaaaagcctgggattcctggagagcggctctggctccggcggtggcaccctgaagtacgtggaggatgtgacaaacgtggtcagacgggatgtggagaagtggggccccttcgatctggtgtacggcagcacccaacccctgggcagctcttgtgaccggtgccctggctggtacatgtttcagttccaccggatcctgcagtacgccctgccgagacaggagtcccagcggccattcttttggattttcatggacaacttgctgctgaccgaggatgaccaggaaactaccactcggttcctgcagaccgaagccgtgaccctgcaggacgtgagaggccgggactaccagaacgccatgcgggtgtggtccaacatccctggactgaaaagcaagcacgcacctctgacccctaaagaagaggagtacctgcaggcccaggtgcggagcagaagcaagctggacgcccctaaggtggatctgctggtgaagaattgcctcctgcccctgagagagtacttcaagtatttcagccagaatagtctgcccctgggaggcagcggcggcggcatgctgatgatgttcagggacgtggccgtggacttcagccaggaggagtgggagtgcctggacctggagcagaggggcctgtacagggacgtgatgctggagaactacagcaacatggtgagcctgggcctgtgcatctaccagcccgaggccttcagcctgctggagaagggcaaggagccctggaagatcctgagggacgagaccaggggcccctgccccgacatgcagagcaggtgccagggcggcccaagcagcggcgcccctcctcccagcggcggcaggcggcccaagcagcggcgcccctcctcccagcggcggcagcccagccggctccccaacctctaccgaggagggcacctctgagtccgccacccccgagagcggccctggcacctccaccgagcccagcgagggcagcgcacccggcagccctgccggcagccccacctccacagaggagggaaccagcaccgagcccagcgaaggcagcgccccaggcaccagcaccgagcctagtgagcaggagattaaacggatcaacaagatcagaagaagacttgtgaaagacagcaacaccaagaaggccggcaagacaggccccatgaaaaccctgctggttagagtgatgacacccgatctgagagagcggctggaaaacctgagaaagaagcctgaaaatatcccccagcccatcagcaatacatctagagccaacctgaataagctgctgaccgattacaccgaaatgaagaaggcgatcctgcatgtgtactgggaagagttccagaaggaccctgtgggcctgatgagccgggtggcccagcctgccagcaagaagatcgatcagaacaagctgaaacctgagatggacgagaagggcaacctgaccaccgccggctttgcctgctctcagtgtggccagcccctgttcgtgtacaagctggagcaggtgtctgagaagggcaaggcttacaccaactacttcggacggtgcaatgtggccgagcacgaaaagctgatcctgctggcccagctgaagcccgagaaggatagcgacgaagccgtgacatatagcctgggaaagtttgggcagagggccctggatttctacagcattcatgtgaccaaggagtccacccaccccgtgaagcccctggcccagatcgccggaaacagatacgcctccggacctgtgggaaaggccctgagcgacgcatgtatgggcacaatcgcctccttcctgtctaagtaccaggacatcatcatcgaacaccagaaggtggtgaagggcaaccagaagagactggagagcctgcgggagctggccggcaaggaaaacctggaataccctagcgtgaccctgccacctcagcctcacaccaaggagggcgttgatgcctacaacgaagtgatcgcccgggtgcgaatgtgggtgaacctgaacctgtggcagaagctgaagctaagcagagatgatgccaagcctctgctgagactgaagggattcccttcctttcctctggtcgagagacaggccaacgaagtggactggtgggacatggtgtgtaacgtgaagaagctgatcaacgagaaaaaggaggatggcaaggtgttttggcagaatctggctggctacaagagacaggaagccctgagaccatacctgagcagcgaggaagatcggaagaagggaaagaaattcgctcggtaccagctgggcgacctgctgctgcacctggaaaagaagcacggcgaggactggggaaaggtgtacgacgaggcctgggagcggattgacaagaaagtggaaggcctgagcaagcacatcaagctggaagaggaacggagaagcgaggacgcccagagcaaggccgccctgaccgactggctgcgggctaaggccagcttcgtgatcgagggcctgaaggaggccgacaaggacgagttctgcagatgcgagctgaagctgcagaagtggtacggggacctgcggggaaagcccttcgccatcgaagccgagaacagcatcctggacatcagcggcttcagcaagcagtacaactgtgccttcatctggcagaaggacggcgtgaagaagctgaacctgtacctgatcatcaactacttcaagggcggcaagctgcggttcaagaagatcaaacctgaagccttcgaagccaacagattctacaccgtgatcaacaaaaagagcggcgagatcgtgcccatggaggtgaacttcaacttcgacgaccccaacctgatcatcctgcctctggcctttggcaagagacagggcagagaattcatctggaacgacctgctgtccctggaaaccggcagcctgaagctggccaacggaagagtgatcgagaagacactgtacaacagaagaacccggcaggatgagcctgccctgttcgtggccctgaccttcgagcggcgggaggtcctggactcctccaatatcaaaccaatgaacctgatcggcgtggcaagaggcgaaaacatccccgccgtgatcgccctgaccgaccccgagggctgcccactgagccggtttaaggatagcctgggaaacccaacccacatcctgagaatcggcgagagctataaggagaagcagcggaccatccaggccaagaaggaggtggagcagcggagagccggcggctacagccggaagtacgccagcaaagccaagaatctggcagacgatatggtgagaaacaccgctagagatctgctgtactacgccgtgacccaggatgccatgctgatcttcgccaacctgagccggggcttcggccggcagggcaagcggaccttcatggccgagagacagtacacacggatggaggactggctgaccgccaagctggcctacgagggcctgagcaagacctacctgtccaagacactggcccagtacacctccaagacatgcagcaactgtgggtttaccatcaccagcgccgactacgacagggtgctggagaagctgaagaagacagcaacaggctggatgaccacaattaacggcaaggagctgaaggtggagggccagattacctactacaacagatacaagagacagaacgtagtcaaggacctgtccgtcgagctggatagactgagcgaagaatctgtgaacaacgacatctcctcctggacaaagggcagaagcggagaagctctgagcctcctgaagaaaagattctcccatagacccgtgcaggagaagttcgtgtgcctgaactgcggcttcgagacacacgcagccgagcaagccgccctgaacatcgccagatcctggctgttcctgcggagccaggagtacaagaaataccagacaaacaagacaaccggcaacaccgataagagagccttcgtcgagacctggcagtccttttaccggaagaagcttaaggaggtgtggaaacctgccgtgcggtctggcggatctggcggaggctccaccagccccaagaaaaagagaaaagtctaagctgccttctgcggggcttgccttctggccatgcccttcttctctcccttgcacctgtacctcttggtctttgaataaagcctgagtaggaaggctagcaaaaaaaaaaaaaaaaaaaaaaaaaaaaaaaaaaaaaaaaaaaaaaaaaaaaaaaaaaaaaaaaaaaaaaaaaaaaaaaagcccagccggctccccaacctctaccgaggagggcacctctgagtccgccacccccgagagcggccctggcacctccaccgagcccagcgagggcagcgcacccggcagccctgccggcagccccacctccacagaggagggaaccagcaccgagcccagcgaaggcagcgccccaggcaccagcaccgagcctagtgagcaggagattaaacggatcaacaagatcagaagaagacttgtgaaagacagcaacaccaagaaggccggcaagacaggccccatgaaaaccctgctggttagagtgatgacacccgatctgagagagcggctggaaaacctgagaaagaagcctgaaaatatcccccagcccatcagcaatacatctagagccaacctgaataagctgctgaccgattacaccgaaatgaagaaggcgatcctgcatgtgtactgggaagagttccagaaggaccctgtgggcctgatgagccgggtggcccagcctgccagcaagaagatcgatcagaacaagctgaaacctgagatggacgagaagggcaacctgaccaccgccggctttgcctgctctcagtgtggccagcccctgttcgtgtacaagctggagcaggtgtctgagaagggcaaggcttacaccaactacttcggacggtgcaatgtggccgagcacgaaaagctgatcctgctggcccagctgaagcccgagaaggatagcgacgaagccgtgacatatagcctgggaaagtttgggcagagggccctggatttctacagcattcatgtgaccaaggagtccacccaccccgtgaagcccctggcccagatcgccggaaacagatacgcctccggacctgtgggaaaggccctgagcgacgcatgtatgggcacaatcgcctccttcctgtctaagtaccaggacatcatcatcgaacaccagaaggtggtgaagggcaaccagaagagactggagagcctgcgggagctggccggcaaggaaaacctggaataccctagcgtgaccctgccacctcagcctcacaccaaggagggcgttgatgcctacaacgaagtgatcgcccgggtgcgaatgtgggtgaacctgaacctgtggcagaagctgaagctaagcagagatgatgccaagcctctgctgagactgaagggattcccttcctttcctctggtcgagagacaggccaacgaagtggactggtgggacatggtgtgtaacgtgaagaagctgatcaacgagaaaaaggaggatggcaaggtgttttggcagaatctggctggctacaagagacaggaagccctgagaccatacctgagcagcgaggaagatcggaagaagggaaagaaattcgctcggtaccagctgggcgacctgctgctgcacctggaaaagaagcacggcgaggactggggaaaggtgtacgacgaggcctgggagcggattgacaagaaagtggaaggcctgagcaagcacatcaagctggaagaggaacggagaagcgaggacgcccagagcaaggccgccctgaccgactggctgcgggctaaggccagcttcgtgatcgagggcctgaaggaggccgacaaggacgagttctgcagatgcgagctgaagctgcagaagtggtacggggacctgcggggaaagcccttcgccatcgaagccgagaacagcatcctggacatcagcggcttcagcaagcagtacaactgtgccttcatctggcagaaggacggcgtgaagaagctgaacctgtacctgatcatcaactacttcaagggcggcaagctgcggttcaagaagatcaaacctgaagccttcgaagccaacagattctacaccgtgatcaacaaaaagagcggcgagatcgtgcccatggaggtgaacttcaacttcgacgaccccaacctgatcatcctgcctctggcctttggcaagagacagggcagagaattcatctggaacgacctgctgtccctggaaaccggcagcctgaagctggccaacggaagagtgatcgagaagacactgtacaacagaagaacccggcaggatgagcctgccctgttcgtggccctgaccttcgagcggcgggaggtcctggactcctccaatatcaaaccaatgaacctgatcggcgtggcaagaggcgaaaacatccccgccgtgatcgccctgaccgaccccgagggctgcccactgagccggtttaaggatagcctgggaaacccaacccacatcctgagaatcggcgagagctataaggagaagcagcggaccatccaggccaagaaggaggtggagcagcggagagccggcggctacagccggaagtacgccagcaaagccaagaatctggcagacgatatggtgagaaacaccgctagagatctgctgtactacgccgtgacccaggatgccatgctgatcttcgccaacctgagccggggcttcggccggcagggcaagcggaccttcatggccgagagacagtacacacggatggaggactggctgaccgccaagctggcctacgagggcctgagcaagacctacctgtccaagacactggcccagtacacctccaagacatgcagcaactgtgggtttaccatcaccagcgccgactacgacagggtgctggagaagctgaagaagacagcaacaggctggatgaccacaattaacggcaaggagctgaaggtggagggccagattacctactacaacagatacaagagacagaacgtagtcaaggacctgtccgtcgagctggatagactgagcgaagaatctgtgaacaacgacatctcctcctggacaaagggcagaagcggagaagctctgagcctcctgaagaaaagattctcccatagacccgtgcaggagaagttcgtgtgcctgaactgcggcttcgagacacacgcagccgagcaagccgccctgaacatcgccagatcctggctgttcctgcggagccaggagtacaagaaataccagacaaacaagacaaccggcaacaccgataagagagccttcgtcgagacctggcagtccttttaccggaagaagcttaaggaggtgtggaaacctgccgtgcggtctggcggatctggcggaggctccaccagccccaagaaaaagagaaaagtctaagctgccttctgcggggcttgccttctggccatgcccttcttctctcccttgcacctgtacctcttggtctttgaataaagcctgagtaggaaggctagcaaaaaaaaaaaaaaaaaaaaaaaaaaaaaaaaaaaaaaaaaaaaaaaaaaaaaaaaaaaaaaaaaaaaaaaaaaaaaaaa

SEQ ID NO: 10398 - RNA, 8787 nt, synthetic construct
  source 1..8787: mol_type = other RNA
aggaaataagagagaaaagaagagtaagaagaaatataagagccaccatggcccctaagaagaagcgtaaagtgagccggatgaaccacgaccaggagttcgacccccctaaggtgtaccctcccgtccccgccgagaagagaaagcccatccgggtcctgagcctgttcgatggcatcgccaccggtctgctggtgctgaaggacctgggcatccaggtggataggtacattgcctccgaggtgtgcgaggactccatcaccgtgggaatggtgcgtcatcagggcaagatcatgtacgtgggcgacgtgcggagcgtgacacagaagcatatccaggagtggggccctttcgacctggtgatcggcggcagcccttgcaatgacctgagcatcgtgaacccagcccggaagggcctgtacgagggaaccggcagactgttcttcgagttttacagactgctgcacgacgcccggcctaaggaaggcgacgaccggcccttcttttggctgttcgagaatgtggtggccatgggagtcagcgacaagcgggatattagccggttcctggagagcaaccccgtgatgatcgatgccaaggaagtgagcgccgcccaccgggccagatacttctggggcaatctgcctggcatgaacagacccctggccagcaccgtgaacgacaagctggagctgcaggagtgcctggagcacggccggatcgccaagttcagcaaggtgagaaccatcaccacccgaagcaacagcatcaaacaaggcaaggaccagcactttcctgtgttcatgaacgagaaggaggacatcctgtggtgtaccgagatggagagagtgttcgggttcccagtccactacacagatgtcagcaacatgtctagactggccagacagagactgctgggaagaagctggtccgtccctgtgatcagacacctgttcgcccctctgaaggagtacttcgcctgcgtgagcagcggcaacagcaacgccaacagccggggccccagcttctctagcggcctggtgccactgtccctgagagggagccacatgggccccatggagatctacaaaaccgtgagcgcctggaagcggcagcctgtgcgcgtgctgagcctgtttcggaatatcgataaagtcctgaaaagcctgggattcctggagagcggctctggctccggcggtggcaccctgaagtacgtggaggatgtgacaaacgtggtcagacgggatgtggagaagtggggccccttcgatctggtgtacggcagcacccaacccctgggcagctcttgtgaccggtgccctggctggtacatgtttcagttccaccggatcctgcagtacgccctgccgagacaggagtcccagcggccattcttttggattttcatggacaacttgctgctgaccgaggatgaccaggaaactaccactcggttcctgcagaccgaagccgtgaccctgcaggacgtgagaggccgggactaccagaacgccatgcgggtgtggtccaacatccctggactgaaaagcaagcacgcacctctgacccctaaagaagaggagtacctgcaggcccaggtgcggagcagaagcaagctggacgcccctaaggtggatctgctggtgaagaattgcctcctgcccctgagagagtacttcaagtatttcagccagaatagtctgcccctgggaggcagcggcggcggcgagcccggcgccgtgaccttcggcgacgtggccgtgtacttcagcagggaggagtggggctgcctgaggcccgcccagagggccctgtacagggacgtgaccagggagacctacagccacctgggcgccctgggcgtgggcggcagcaagcccgccctgatcagctggatggaggaggaggccgagctgtggggccccgccgcccaggaccccgaggtggccaagtgccccaccgaggccgacggcggcccaagcagcggcgcccctcctcccagcggcggcaggcggcccaagcagcggcgcccctcctcccagcggcggcagcccagccggctccccaacctctaccgaggagggcacctctgagtccgccacccccgagagcggccctggcacctccaccgagcccagcgagggcagcgcacccggcagccctgccggcagccccacctccacagaggagggaaccagcaccgagcccagcgaaggcagcgccccaggcaccagcaccgagcctagtgagcaggagattaaacggatcaacaagatcagaagaagacttgtgaaagacagcaacaccaagaaggccggcaagacaggccccatgaaaaccctgctggttagagtgatgacacccgatctgagagagcggctggaaaacctgagaaagaagcctgaaaatatcccccagcccatcagcaatacatctagagccaacctgaataagctgctgaccgattacaccgaaatgaagaaggcgatcctgcatgtgtactgggaagagttccagaaggaccctgtgggcctgatgagccgggtggcccagcctgccagcaagaagatcgatcagaacaagctgaaacctgagatggacgagaagggcaacctgaccaccgccggctttgcctgctctcagtgtggccagcccctgttcgtgtacaagctggagcaggtgtctgagaagggcaaggcttacaccaactacttcggacggtgcaatgtggccgagcacgaaaagctgatcctgctggcccagctgaagcccgagaaggatagcgacgaagccgtgacatatagcctgggaaagtttgggcagagggccctggatttctacagcattcatgtgaccaaggagtccacccaccccgtgaagcccctggcccagatcgccggaaacagatacgcctccggacctgtgggaaaggccctgagcgacgcatgtatgggcacaatcgcctccttcctgtctaagtaccaggacatcatcatcgaacaccagaaggtggtgaagggcaaccagaagagactggagagcctgcgggagctggccggcaaggaaaacctggaataccctagcgtgaccctgccacctcagcctcacaccaaggagggcgttgatgcctacaacgaagtgatcgcccgggtgcgaatgtgggtgaacctgaacctgtggcagaagctgaagctaagcagagatgatgccaagcctctgctgagactgaagggattcccttcctttcctctggtcgagagacaggccaacgaagtggactggtgggacatggtgtgtaacgtgaagaagctgatcaacgagaaaaaggaggatggcaaggtgttttggcagaatctggctggctacaagagacaggaagccctgagaccatacctgagcagcgaggaagatcggaagaagggaaagaaattcgctcggtaccagctgggcgacctgctgctgcacctggaaaagaagcacggcgaggactggggaaaggtgtacgacgaggcctgggagcggattgacaagaaagtggaaggcctgagcaagcacatcaagctggaagaggaacggagaagcgaggacgcccagagcaaggccgccctgaccgactggctgcgggctaaggccagcttcgtgatcgagggcctgaaggaggccgacaaggacgagttctgcagatgcgagctgaagctgcagaagtggtacggggacctgcggggaaagcccttcgccatcgaagccgagaacagcatcctggacatcagcggcttcagcaagcagtacaactgtgccttcatctggcagaaggacggcgtgaagaagctgaacctgtacctgatcatcaactacttcaagggcggcaagctgcggttcaagaagatcaaacctgaagccttcgaagccaacagattctacaccgtgatcaacaaaaagagcggcgagatcgtgcccatggaggtgaacttcaacttcgacgaccccaacctgatcatcctgcctctggcctttggcaagagacagggcagagaattcatctggaacgacctgctgtccctggaaaccggcagcctgaagctggccaacggaagagtgatcgagaagacactgtacaacagaagaacccggcaggatgagcctgccctgttcgtggccctgaccttcgagcggcgggaggtcctggactcctccaatatcaaaccaatgaacctgatcggcgtggcaagaggcgaaaacatccccgccgtgatcgccctgaccgaccccgagggctgcccactgagccggtttaaggatagcctgggaaacccaacccacatcctgagaatcggcgagagctataaggagaagcagcggaccatccaggccaagaaggaggtggagcagcggagagccggcggctacagccggaagtacgccagcaaagccaagaatctggcagacgatatggtgagaaacaccgctagagatctgctgtactacgccgtgacccaggatgccatgctgatcttcgccaacctgagccggggcttcggccggcagggcaagcggaccttcatggccgagagacagtacacacggatggaggactggctgaccgccaagctggcctacgagggcctgagcaagacctacctgtccaagacactggcccagtacacctccaagacatgcagcaactgtgggtttaccatcaccagcgccgactacgacagggtgctggagaagctgaagaagacagcaacaggctggatgaccacaattaacggcaaggagctgaaggtggagggccagattacctactacaacagatacaagagacagaacgtagtcaaggacctgtccgtcgagctggatagactgagcgaagaatctgtgaacaacgacatctcctcctggacaaagggcagaagcggagaagctctgagcctcctgaagaaaagattctcccatagacccgtgcaggagaagttcgtgtgcctgaactgcggcttcgagacacacgcagccgagcaagccgccctgaacatcgccagatcctggctgttcctgcggagccaggagtacaagaaataccagacaaacaagacaaccggcaacaccgataagagagccttcgtcgagacctggcagtccttttaccggaagaagcttaaggaggtgtggaaacctgccgtgcggtctggcggatctggcggaggctccaccagccccaagaaaaagagaaaagtctaagctgccttctgcggggcttgccttctggccatgcccttcttctctcccttgcacctgtacctcttggtctttgaataaagcctgagtaggaaggctagcaaaaaaaaaaaaaaaaaaaaaaaaaaaaaaaaaaaaaaaaaaaaaaaaaaaaaaaaaaaaaaaaaaaaaaaaaaaaaaaagcccagccggctccccaacctctaccgaggagggcacctctgagtccgccacccccgagagcggccctggcacctccaccgagcccagcgagggcagcgcacccggcagccctgccggcagccccacctccacagaggagggaaccagcaccgagcccagcgaaggcagcgccccaggcaccagcaccgagcctagtgagcaggagattaaacggatcaacaagatcagaagaagacttgtgaaagacagcaacaccaagaaggccggcaagacaggccccatgaaaaccctgctggttagagtgatgacacccgatctgagagagcggctggaaaacctgagaaagaagcctgaaaatatcccccagcccatcagcaatacatctagagccaacctgaataagctgctgaccgattacaccgaaatgaagaaggcgatcctgcatgtgtactgggaagagttccagaaggaccctgtgggcctgatgagccgggtggcccagcctgccagcaagaagatcgatcagaacaagctgaaacctgagatggacgagaagggcaacctgaccaccgccggctttgcctgctctcagtgtggccagcccctgttcgtgtacaagctggagcaggtgtctgagaagggcaaggcttacaccaactacttcggacggtgcaatgtggccgagcacgaaaagctgatcctgctggcccagctgaagcccgagaaggatagcgacgaagccgtgacatatagcctgggaaagtttgggcagagggccctggatttctacagcattcatgtgaccaaggagtccacccaccccgtgaagcccctggcccagatcgccggaaacagatacgcctccggacctgtgggaaaggccctgagcgacgcatgtatgggcacaatcgcctccttcctgtctaagtaccaggacatcatcatcgaacaccagaaggtggtgaagggcaaccagaagagactggagagcctgcgggagctggccggcaaggaaaacctggaataccctagcgtgaccctgccacctcagcctcacaccaaggagggcgttgatgcctacaacgaagtgatcgcccgggtgcgaatgtgggtgaacctgaacctgtggcagaagctgaagctaagcagagatgatgccaagcctctgctgagactgaagggattcccttcctttcctctggtcgagagacaggccaacgaagtggactggtgggacatggtgtgtaacgtgaagaagctgatcaacgagaaaaaggaggatggcaaggtgttttggcagaatctggctggctacaagagacaggaagccctgagaccatacctgagcagcgaggaagatcggaagaagggaaagaaattcgctcggtaccagctgggcgacctgctgctgcacctggaaaagaagcacggcgaggactggggaaaggtgtacgacgaggcctgggagcggattgacaagaaagtggaaggcctgagcaagcacatcaagctggaagaggaacggagaagcgaggacgcccagagcaaggccgccctgaccgactggctgcgggctaaggccagcttcgtgatcgagggcctgaaggaggccgacaaggacgagttctgcagatgcgagctgaagctgcagaagtggtacggggacctgcggggaaagcccttcgccatcgaagccgagaacagcatcctggacatcagcggcttcagcaagcagtacaactgtgccttcatctggcagaaggacggcgtgaagaagctgaacctgtacctgatcatcaactacttcaagggcggcaagctgcggttcaagaagatcaaacctgaagccttcgaagccaacagattctacaccgtgatcaacaaaaagagcggcgagatcgtgcccatggaggtgaacttcaacttcgacgaccccaacctgatcatcctgcctctggcctttggcaagagacagggcagagaattcatctggaacgacctgctgtccctggaaaccggcagcctgaagctggccaacggaagagtgatcgagaagacactgtacaacagaagaacccggcaggatgagcctgccctgttcgtggccctgaccttcgagcggcgggaggtcctggactcctccaatatcaaaccaatgaacctgatcggcgtggcaagaggcgaaaacatccccgccgtgatcgccctgaccgaccccgagggctgcccactgagccggtttaaggatagcctgggaaacccaacccacatcctgagaatcggcgagagctataaggagaagcagcggaccatccaggccaagaaggaggtggagcagcggagagccggcggctacagccggaagtacgccagcaaagccaagaatctggcagacgatatggtgagaaacaccgctagagatctgctgtactacgccgtgacccaggatgccatgctgatcttcgccaacctgagccggggcttcggccggcagggcaagcggaccttcatggccgagagacagtacacacggatggaggactggctgaccgccaagctggcctacgagggcctgagcaagacctacctgtccaagacactggcccagtacacctccaagacatgcagcaactgtgggtttaccatcaccagcgccgactacgacagggtgctggagaagctgaagaagacagcaacaggctggatgaccacaattaacggcaaggagctgaaggtggagggccagattacctactacaacagatacaagagacagaacgtagtcaaggacctgtccgtcgagctggatagactgagcgaagaatctgtgaacaacgacatctcctcctggacaaagggcagaagcggagaagctctgagcctcctgaagaaaagattctcccatagacccgtgcaggagaagttcgtgtgcctgaactgcggcttcgagacacacgcagccgagcaagccgccctgaacatcgccagatcctggctgttcctgcggagccaggagtacaagaaataccagacaaacaagacaaccggcaacaccgataagagagccttcgtcgagacctggcagtccttttaccggaagaagcttaaggaggtgtggaaacctgccgtgcggtctggcggatctggcggaggctccaccagccccaagaaaaagagaaaagtctaagctgccttctgcggggcttgccttctggccatgcccttcttctctcccttgcacctgtacctcttggtctttgaataaagcctgagtaggaaggctagcaaaaaaaaaaaaaaaaaaaaaaaaaaaaaaaaaaaaaaaaaaaaaaaaaaaaaaaaaaaaaaaaaaaaaaaaaaaaaaaa

SEQ ID NO: 10399 - RNA, 8787 nt, synthetic construct
  source 1..8787: mol_type = other RNA
aggaaataagagagaaaagaagagtaagaagaaatataagagccaccatggcccctaagaagaagcgtaaagtgagccggatgaaccacgaccaggagttcgacccccctaaggtgtaccctcccgtccccgccgagaagagaaagcccatccgggtcctgagcctgttcgatggcatcgccaccggtctgctggtgctgaaggacctgggcatccaggtggataggtacattgcctccgaggtgtgcgaggactccatcaccgtgggaatggtgcgtcatcagggcaagatcatgtacgtgggcgacgtgcggagcgtgacacagaagcatatccaggagtggggccctttcgacctggtgatcggcggcagcccttgcaatgacctgagcatcgtgaacccagcccggaagggcctgtacgagggaaccggcagactgttcttcgagttttacagactgctgcacgacgcccggcctaaggaaggcgacgaccggcccttcttttggctgttcgagaatgtggtggccatgggagtcagcgacaagcgggatattagccggttcctggagagcaaccccgtgatgatcgatgccaaggaagtgagcgccgcccaccgggccagatacttctggggcaatctgcctggcatgaacagacccctggccagcaccgtgaacgacaagctggagctgcaggagtgcctggagcacggccggatcgccaagttcagcaaggtgagaaccatcaccacccgaagcaacagcatcaaacaaggcaaggaccagcactttcctgtgttcatgaacgagaaggaggacatcctgtggtgtaccgagatggagagagtgttcgggttcccagtccactacacagatgtcagcaacatgtctagactggccagacagagactgctgggaagaagctggtccgtccctgtgatcagacacctgttcgcccctctgaaggagtacttcgcctgcgtgagcagcggcaacagcaacgccaacagccggggccccagcttctctagcggcctggtgccactgtccctgagagggagccacatgggccccatggagatctacaaaaccgtgagcgcctggaagcggcagcctgtgcgcgtgctgagcctgtttcggaatatcgataaagtcctgaaaagcctgggattcctggagagcggctctggctccggcggtggcaccctgaagtacgtggaggatgtgacaaacgtggtcagacgggatgtggagaagtggggccccttcgatctggtgtacggcagcacccaacccctgggcagctcttgtgaccggtgccctggctggtacatgtttcagttccaccggatcctgcagtacgccctgccgagacaggagtcccagcggccattcttttggattttcatggacaacttgctgctgaccgaggatgaccaggaaactaccactcggttcctgcagaccgaagccgtgaccctgcaggacgtgagaggccgggactaccagaacgccatgcgggtgtggtccaacatccctggactgaaaagcaagcacgcacctctgacccctaaagaagaggagtacctgcaggcccaggtgcggagcagaagcaagctggacgcccctaaggtggatctgctggtgaagaattgcctcctgcccctgagagagtacttcaagtatttcagccagaatagtctgcccctgggaggcagcggcggcggcttccaggacagcgtgaccttcgaggacgtggccgtgaggttcagcagcggcgagtggcagtgcctgaccagggcccagaggcacctgtacgccgacgtgatgctggagaactacggcaacatgatcagcgtgggcttcgccgtgcccaagccccccctgatcagccacctggagcagggcgccgagccctgcgtgcaggacctgcaggacggcggcttcctgagctgcagcttccccgtgagcggcggcccaagcagcggcgcccctcctcccagcggcggcaggcggcccaagcagcggcgcccctcctcccagcggcggcagcccagccggctccccaacctctaccgaggagggcacctctgagtccgccacccccgagagcggccctggcacctccaccgagcccagcgagggcagcgcacccggcagccctgccggcagccccacctccacagaggagggaaccagcaccgagcccagcgaaggcagcgccccaggcaccagcaccgagcctagtgagcaggagattaaacggatcaacaagatcagaagaagacttgtgaaagacagcaacaccaagaaggccggcaagacaggccccatgaaaaccctgctggttagagtgatgacacccgatctgagagagcggctggaaaacctgagaaagaagcctgaaaatatcccccagcccatcagcaatacatctagagccaacctgaataagctgctgaccgattacaccgaaatgaagaaggcgatcctgcatgtgtactgggaagagttccagaaggaccctgtgggcctgatgagccgggtggcccagcctgccagcaagaagatcgatcagaacaagctgaaacctgagatggacgagaagggcaacctgaccaccgccggctttgcctgctctcagtgtggccagcccctgttcgtgtacaagctggagcaggtgtctgagaagggcaaggcttacaccaactacttcggacggtgcaatgtggccgagcacgaaaagctgatcctgctggcccagctgaagcccgagaaggatagcgacgaagccgtgacatatagcctgggaaagtttgggcagagggccctggatttctacagcattcatgtgaccaaggagtccacccaccccgtgaagcccctggcccagatcgccggaaacagatacgcctccggacctgtgggaaaggccctgagcgacgcatgtatgggcacaatcgcctccttcctgtctaagtaccaggacatcatcatcgaacaccagaaggtggtgaagggcaaccagaagagactggagagcctgcgggagctggccggcaaggaaaacctggaataccctagcgtgaccctgccacctcagcctcacaccaaggagggcgttgatgcctacaacgaagtgatcgcccgggtgcgaatgtgggtgaacctgaacctgtggcagaagctgaagctaagcagagatgatgccaagcctctgctgagactgaagggattcccttcctttcctctggtcgagagacaggccaacgaagtggactggtgggacatggtgtgtaacgtgaagaagctgatcaacgagaaaaaggaggatggcaaggtgttttggcagaatctggctggctacaagagacaggaagccctgagaccatacctgagcagcgaggaagatcggaagaagggaaagaaattcgctcggtaccagctgggcgacctgctgctgcacctggaaaagaagcacggcgaggactggggaaaggtgtacgacgaggcctgggagcggattgacaagaaagtggaaggcctgagcaagcacatcaagctggaagaggaacggagaagcgaggacgcccagagcaaggccgccctgaccgactggctgcgggctaaggccagcttcgtgatcgagggcctgaaggaggccgacaaggacgagttctgcagatgcgagctgaagctgcagaagtggtacggggacctgcggggaaagcccttcgccatcgaagccgagaacagcatcctggacatcagcggcttcagcaagcagtacaactgtgccttcatctggcagaaggacggcgtgaagaagctgaacctgtacctgatcatcaactacttcaagggcggcaagctgcggttcaagaagatcaaacctgaagccttcgaagccaacagattctacaccgtgatcaacaaaaagagcggcgagatcgtgcccatggaggtgaacttcaacttcgacgaccccaacctgatcatcctgcctctggcctttggcaagagacagggcagagaattcatctggaacgacctgctgtccctggaaaccggcagcctgaagctggccaacggaagagtgatcgagaagacactgtacaacagaagaacccggcaggatgagcctgccctgttcgtggccctgaccttcgagcggcgggaggtcctggactcctccaatatcaaaccaatgaacctgatcggcgtggcaagaggcgaaaacatccccgccgtgatcgccctgaccgaccccgagggctgcccactgagccggtttaaggatagcctgggaaacccaacccacatcctgagaatcggcgagagctataaggagaagcagcggaccatccaggccaagaaggaggtggagcagcggagagccggcggctacagccggaagtacgccagcaaagccaagaatctggcagacgatatggtgagaaacaccgctagagatctgctgtactacgccgtgacccaggatgccatgctgatcttcgccaacctgagccggggcttcggccggcagggcaagcggaccttcatggccgagagacagtacacacggatggaggactggctgaccgccaagctggcctacgagggcctgagcaagacctacctgtccaagacactggcccagtacacctccaagacatgcagcaactgtgggtttaccatcaccagcgccgactacgacagggtgctggagaagctgaagaagacagcaacaggctggatgaccacaattaacggcaaggagctgaaggtggagggccagattacctactacaacagatacaagagacagaacgtagtcaaggacctgtccgtcgagctggatagactgagcgaagaatctgtgaacaacgacatctcctcctggacaaagggcagaagcggagaagctctgagcctcctgaagaaaagattctcccatagacccgtgcaggagaagttcgtgtgcctgaactgcggcttcgagacacacgcagccgagcaagccgccctgaacatcgccagatcctggctgttcctgcggagccaggagtacaagaaataccagacaaacaagacaaccggcaacaccgataagagagccttcgtcgagacctggcagtccttttaccggaagaagcttaaggaggtgtggaaacctgccgtgcggtctggcggatctggcggaggctccaccagccccaagaaaaagagaaaagtctaagctgccttctgcggggcttgccttctggccatgcccttcttctctcccttgcacctgtacctcttggtctttgaataaagcctgagtaggaaggctagcaaaaaaaaaaaaaaaaaaaaaaaaaaaaaaaaaaaaaaaaaaaaaaaaaaaaaaaaaaaaaaaaaaaaaaaaaaaaaaaagcccagccggctccccaacctctaccgaggagggcacctctgagtccgccacccccgagagcggccctggcacctccaccgagcccagcgagggcagcgcacccggcagccctgccggcagccccacctccacagaggagggaaccagcaccgagcccagcgaaggcagcgccccaggcaccagcaccgagcctagtgagcaggagattaaacggatcaacaagatcagaagaagacttgtgaaagacagcaacaccaagaaggccggcaagacaggccccatgaaaaccctgctggttagagtgatgacacccgatctgagagagcggctggaaaacctgagaaagaagcctgaaaatatcccccagcccatcagcaatacatctagagccaacctgaataagctgctgaccgattacaccgaaatgaagaaggcgatcctgcatgtgtactgggaagagttccagaaggaccctgtgggcctgatgagccgggtggcccagcctgccagcaagaagatcgatcagaacaagctgaaacctgagatggacgagaagggcaacctgaccaccgccggctttgcctgctctcagtgtggccagcccctgttcgtgtacaagctggagcaggtgtctgagaagggcaaggcttacaccaactacttcggacggtgcaatgtggccgagcacgaaaagctgatcctgctggcccagctgaagcccgagaaggatagcgacgaagccgtgacatatagcctgggaaagtttgggcagagggccctggatttctacagcattcatgtgaccaaggagtccacccaccccgtgaagcccctggcccagatcgccggaaacagatacgcctccggacctgtgggaaaggccctgagcgacgcatgtatgggcacaatcgcctccttcctgtctaagtaccaggacatcatcatcgaacaccagaaggtggtgaagggcaaccagaagagactggagagcctgcgggagctggccggcaaggaaaacctggaataccctagcgtgaccctgccacctcagcctcacaccaaggagggcgttgatgcctacaacgaagtgatcgcccgggtgcgaatgtgggtgaacctgaacctgtggcagaagctgaagctaagcagagatgatgccaagcctctgctgagactgaagggattcccttcctttcctctggtcgagagacaggccaacgaagtggactggtgggacatggtgtgtaacgtgaagaagctgatcaacgagaaaaaggaggatggcaaggtgttttggcagaatctggctggctacaagagacaggaagccctgagaccatacctgagcagcgaggaagatcggaagaagggaaagaaattcgctcggtaccagctgggcgacctgctgctgcacctggaaaagaagcacggcgaggactggggaaaggtgtacgacgaggcctgggagcggattgacaagaaagtggaaggcctgagcaagcacatcaagctggaagaggaacggagaagcgaggacgcccagagcaaggccgccctgaccgactggctgcgggctaaggccagcttcgtgatcgagggcctgaaggaggccgacaaggacgagttctgcagatgcgagctgaagctgcagaagtggtacggggacctgcggggaaagcccttcgccatcgaagccgagaacagcatcctggacatcagcggcttcagcaagcagtacaactgtgccttcatctggcagaaggacggcgtgaagaagctgaacctgtacctgatcatcaactacttcaagggcggcaagctgcggttcaagaagatcaaacctgaagccttcgaagccaacagattctacaccgtgatcaacaaaaagagcggcgagatcgtgcccatggaggtgaacttcaacttcgacgaccccaacctgatcatcctgcctctggcctttggcaagagacagggcagagaattcatctggaacgacctgctgtccctggaaaccggcagcctgaagctggccaacggaagagtgatcgagaagacactgtacaacagaagaacccggcaggatgagcctgccctgttcgtggccctgaccttcgagcggcgggaggtcctggactcctccaatatcaaaccaatgaacctgatcggcgtggcaagaggcgaaaacatccccgccgtgatcgccctgaccgaccccgagggctgcccactgagccggtttaaggatagcctgggaaacccaacccacatcctgagaatcggcgagagctataaggagaagcagcggaccatccaggccaagaaggaggtggagcagcggagagccggcggctacagccggaagtacgccagcaaagccaagaatctggcagacgatatggtgagaaacaccgctagagatctgctgtactacgccgtgacccaggatgccatgctgatcttcgccaacctgagccggggcttcggccggcagggcaagcggaccttcatggccgagagacagtacacacggatggaggactggctgaccgccaagctggcctacgagggcctgagcaagacctacctgtccaagacactggcccagtacacctccaagacatgcagcaactgtgggtttaccatcaccagcgccgactacgacagggtgctggagaagctgaagaagacagcaacaggctggatgaccacaattaacggcaaggagctgaaggtggagggccagattacctactacaacagatacaagagacagaacgtagtcaaggacctgtccgtcgagctggatagactgagcgaagaatctgtgaacaacgacatctcctcctggacaaagggcagaagcggagaagctctgagcctcctgaagaaaagattctcccatagacccgtgcaggagaagttcgtgtgcctgaactgcggcttcgagacacacgcagccgagcaagccgccctgaacatcgccagatcctggctgttcctgcggagccaggagtacaagaaataccagacaaacaagacaaccggcaacaccgataagagagccttcgtcgagacctggcagtccttttaccggaagaagcttaaggaggtgtggaaacctgccgtgcggtctggcggatctggcggaggctccaccagccccaagaaaaagagaaaagtctaagctgccttctgcggggcttgccttctggccatgcccttcttctctcccttgcacctgtacctcttggtctttgaataaagcctgagtaggaaggctagcaaaaaaaaaaaaaaaaaaaaaaaaaaaaaaaaaaaaaaaaaaaaaaaaaaaaaaaaaaaaaaaaaaaaaaaaaaaaaaaa

SEQ ID NO: 10400 - RNA, 8787 nt, synthetic construct
  source 1..8787: mol_type = other RNA
aggaaataagagagaaaagaagagtaagaagaaatataagagccaccatggcccctaagaagaagcgtaaagtgagccggatgaaccacgaccaggagttcgacccccctaaggtgtaccctcccgtccccgccgagaagagaaagcccatccgggtcctgagcctgttcgatggcatcgccaccggtctgctggtgctgaaggacctgggcatccaggtggataggtacattgcctccgaggtgtgcgaggactccatcaccgtgggaatggtgcgtcatcagggcaagatcatgtacgtgggcgacgtgcggagcgtgacacagaagcatatccaggagtggggccctttcgacctggtgatcggcggcagcccttgcaatgacctgagcatcgtgaacccagcccggaagggcctgtacgagggaaccggcagactgttcttcgagttttacagactgctgcacgacgcccggcctaaggaaggcgacgaccggcccttcttttggctgttcgagaatgtggtggccatgggagtcagcgacaagcgggatattagccggttcctggagagcaaccccgtgatgatcgatgccaaggaagtgagcgccgcccaccgggccagatacttctggggcaatctgcctggcatgaacagacccctggccagcaccgtgaacgacaagctggagctgcaggagtgcctggagcacggccggatcgccaagttcagcaaggtgagaaccatcaccacccgaagcaacagcatcaaacaaggcaaggaccagcactttcctgtgttcatgaacgagaaggaggacatcctgtggtgtaccgagatggagagagtgttcgggttcccagtccactacacagatgtcagcaacatgtctagactggccagacagagactgctgggaagaagctggtccgtccctgtgatcagacacctgttcgcccctctgaaggagtacttcgcctgcgtgagcagcggcaacagcaacgccaacagccggggccccagcttctctagcggcctggtgccactgtccctgagagggagccacatgggccccatggagatctacaaaaccgtgagcgcctggaagcggcagcctgtgcgcgtgctgagcctgtttcggaatatcgataaagtcctgaaaagcctgggattcctggagagcggctctggctccggcggtggcaccctgaagtacgtggaggatgtgacaaacgtggtcagacgggatgtggagaagtggggccccttcgatctggtgtacggcagcacccaacccctgggcagctcttgtgaccggtgccctggctggtacatgtttcagttccaccggatcctgcagtacgccctgccgagacaggagtcccagcggccattcttttggattttcatggacaacttgctgctgaccgaggatgaccaggaaactaccactcggttcctgcagaccgaagccgtgaccctgcaggacgtgagaggccgggactaccagaacgccatgcgggtgtggtccaacatccctggactgaaaagcaagcacgcacctctgacccctaaagaagaggagtacctgcaggcccaggtgcggagcagaagcaagctggacgcccctaaggtggatctgctggtgaagaattgcctcctgcccctgagagagtacttcaagtatttcagccagaatagtctgcccctgggaggcagcggcggcggcatgaccttcgaggacgtggccgtggagttcacccagtgggagtggggccagctggaccccgcccagcaggacctgtacagggaggtgatgctggagaacttcaagaacctggccagcctgggcctgcccgtgagcaagccctacgtgatcacccagctggaggagggcaaggacccctgcgtgctggacggcgagatcagcaccgagtacctgagccccccccccgactgggagaagaggcccggcggcccaagcagcggcgcccctcctcccagcggcggcaggcggcccaagcagcggcgcccctcctcccagcggcggcagcccagccggctccccaacctctaccgaggagggcacctctgagtccgccacccccgagagcggccctggcacctccaccgagcccagcgagggcagcgcacccggcagccctgccggcagccccacctccacagaggagggaaccagcaccgagcccagcgaaggcagcgccccaggcaccagcaccgagcctagtgagcaggagattaaacggatcaacaagatcagaagaagacttgtgaaagacagcaacaccaagaaggccggcaagacaggccccatgaaaaccctgctggttagagtgatgacacccgatctgagagagcggctggaaaacctgagaaagaagcctgaaaatatcccccagcccatcagcaatacatctagagccaacctgaataagctgctgaccgattacaccgaaatgaagaaggcgatcctgcatgtgtactgggaagagttccagaaggaccctgtgggcctgatgagccgggtggcccagcctgccagcaagaagatcgatcagaacaagctgaaacctgagatggacgagaagggcaacctgaccaccgccggctttgcctgctctcagtgtggccagcccctgttcgtgtacaagctggagcaggtgtctgagaagggcaaggcttacaccaactacttcggacggtgcaatgtggccgagcacgaaaagctgatcctgctggcccagctgaagcccgagaaggatagcgacgaagccgtgacatatagcctgggaaagtttgggcagagggccctggatttctacagcattcatgtgaccaaggagtccacccaccccgtgaagcccctggcccagatcgccggaaacagatacgcctccggacctgtgggaaaggccctgagcgacgcatgtatgggcacaatcgcctccttcctgtctaagtaccaggacatcatcatcgaacaccagaaggtggtgaagggcaaccagaagagactggagagcctgcgggagctggccggcaaggaaaacctggaataccctagcgtgaccctgccacctcagcctcacaccaaggagggcgttgatgcctacaacgaagtgatcgcccgggtgcgaatgtgggtgaacctgaacctgtggcagaagctgaagctaagcagagatgatgccaagcctctgctgagactgaagggattcccttcctttcctctggtcgagagacaggccaacgaagtggactggtgggacatggtgtgtaacgtgaagaagctgatcaacgagaaaaaggaggatggcaaggtgttttggcagaatctggctggctacaagagacaggaagccctgagaccatacctgagcagcgaggaagatcggaagaagggaaagaaattcgctcggtaccagctgggcgacctgctgctgcacctggaaaagaagcacggcgaggactggggaaaggtgtacgacgaggcctgggagcggattgacaagaaagtggaaggcctgagcaagcacatcaagctggaagaggaacggagaagcgaggacgcccagagcaaggccgccctgaccgactggctgcgggctaaggccagcttcgtgatcgagggcctgaaggaggccgacaaggacgagttctgcagatgcgagctgaagctgcagaagtggtacggggacctgcggggaaagcccttcgccatcgaagccgagaacagcatcctggacatcagcggcttcagcaagcagtacaactgtgccttcatctggcagaaggacggcgtgaagaagctgaacctgtacctgatcatcaactacttcaagggcggcaagctgcggttcaagaagatcaaacctgaagccttcgaagccaacagattctacaccgtgatcaacaaaaagagcggcgagatcgtgcccatggaggtgaacttcaacttcgacgaccccaacctgatcatcctgcctctggcctttggcaagagacagggcagagaattcatctggaacgacctgctgtccctggaaaccggcagcctgaagctggccaacggaagagtgatcgagaagacactgtacaacagaagaacccggcaggatgagcctgccctgttcgtggccctgaccttcgagcggcgggaggtcctggactcctccaatatcaaaccaatgaacctgatcggcgtggcaagaggcgaaaacatccccgccgtgatcgccctgaccgaccccgagggctgcccactgagccggtttaaggatagcctgggaaacccaacccacatcctgagaatcggcgagagctataaggagaagcagcggaccatccaggccaagaaggaggtggagcagcggagagccggcggctacagccggaagtacgccagcaaagccaagaatctggcagacgatatggtgagaaacaccgctagagatctgctgtactacgccgtgacccaggatgccatgctgatcttcgccaacctgagccggggcttcggccggcagggcaagcggaccttcatggccgagagacagtacacacggatggaggactggctgaccgccaagctggcctacgagggcctgagcaagacctacctgtccaagacactggcccagtacacctccaagacatgcagcaactgtgggtttaccatcaccagcgccgactacgacagggtgctggagaagctgaagaagacagcaacaggctggatgaccacaattaacggcaaggagctgaaggtggagggccagattacctactacaacagatacaagagacagaacgtagtcaaggacctgtccgtcgagctggatagactgagcgaagaatctgtgaacaacgacatctcctcctggacaaagggcagaagcggagaagctctgagcctcctgaagaaaagattctcccatagacccgtgcaggagaagttcgtgtgcctgaactgcggcttcgagacacacgcagccgagcaagccgccctgaacatcgccagatcctggctgttcctgcggagccaggagtacaagaaataccagacaaacaagacaaccggcaacaccgataagagagccttcgtcgagacctggcagtccttttaccggaagaagcttaaggaggtgtggaaacctgccgtgcggtctggcggatctggcggaggctccaccagccccaagaaaaagagaaaagtctaagctgccttctgcggggcttgccttctggccatgcccttcttctctcccttgcacctgtacctcttggtctttgaataaagcctgagtaggaaggctagcaaaaaaaaaaaaaaaaaaaaaaaaaaaaaaaaaaaaaaaaaaaaaaaaaaaaaaaaaaaaaaaaaaaaaaaaaaaaaaaagcccagccggctccccaacctctaccgaggagggcacctctgagtccgccacccccgagagcggccctggcacctccaccgagcccagcgagggcagcgcacccggcagccctgccggcagccccacctccacagaggagggaaccagcaccgagcccagcgaaggcagcgccccaggcaccagcaccgagcctagtgagcaggagattaaacggatcaacaagatcagaagaagacttgtgaaagacagcaacaccaagaaggccggcaagacaggccccatgaaaaccctgctggttagagtgatgacacccgatctgagagagcggctggaaaacctgagaaagaagcctgaaaatatcccccagcccatcagcaatacatctagagccaacctgaataagctgctgaccgattacaccgaaatgaagaaggcgatcctgcatgtgtactgggaagagttccagaaggaccctgtgggcctgatgagccgggtggcccagcctgccagcaagaagatcgatcagaacaagctgaaacctgagatggacgagaagggcaacctgaccaccgccggctttgcctgctctcagtgtggccagcccctgttcgtgtacaagctggagcaggtgtctgagaagggcaaggcttacaccaactacttcggacggtgcaatgtggccgagcacgaaaagctgatcctgctggcccagctgaagcccgagaaggatagcgacgaagccgtgacatatagcctgggaaagtttgggcagagggccctggatttctacagcattcatgtgaccaaggagtccacccaccccgtgaagcccctggcccagatcgccggaaacagatacgcctccggacctgtgggaaaggccctgagcgacgcatgtatgggcacaatcgcctccttcctgtctaagtaccaggacatcatcatcgaacaccagaaggtggtgaagggcaaccagaagagactggagagcctgcgggagctggccggcaaggaaaacctggaataccctagcgtgaccctgccacctcagcctcacaccaaggagggcgttgatgcctacaacgaagtgatcgcccgggtgcgaatgtgggtgaacctgaacctgtggcagaagctgaagctaagcagagatgatgccaagcctctgctgagactgaagggattcccttcctttcctctggtcgagagacaggccaacgaagtggactggtgggacatggtgtgtaacgtgaagaagctgatcaacgagaaaaaggaggatggcaaggtgttttggcagaatctggctggctacaagagacaggaagccctgagaccatacctgagcagcgaggaagatcggaagaagggaaagaaattcgctcggtaccagctgggcgacctgctgctgcacctggaaaagaagcacggcgaggactggggaaaggtgtacgacgaggcctgggagcggattgacaagaaagtggaaggcctgagcaagcacatcaagctggaagaggaacggagaagcgaggacgcccagagcaaggccgccctgaccgactggctgcgggctaaggccagcttcgtgatcgagggcctgaaggaggccgacaaggacgagttctgcagatgcgagctgaagctgcagaagtggtacggggacctgcggggaaagcccttcgccatcgaagccgagaacagcatcctggacatcagcggcttcagcaagcagtacaactgtgccttcatctggcagaaggacggcgtgaagaagctgaacctgtacctgatcatcaactacttcaagggcggcaagctgcggttcaagaagatcaaacctgaagccttcgaagccaacagattctacaccgtgatcaacaaaaagagcggcgagatcgtgcccatggaggtgaacttcaacttcgacgaccccaacctgatcatcctgcctctggcctttggcaagagacagggcagagaattcatctggaacgacctgctgtccctggaaaccggcagcctgaagctggccaacggaagagtgatcgagaagacactgtacaacagaagaacccggcaggatgagcctgccctgttcgtggccctgaccttcgagcggcgggaggtcctggactcctccaatatcaaaccaatgaacctgatcggcgtggcaagaggcgaaaacatccccgccgtgatcgccctgaccgaccccgagggctgcccactgagccggtttaaggatagcctgggaaacccaacccacatcctgagaatcggcgagagctataaggagaagcagcggaccatccaggccaagaaggaggtggagcagcggagagccggcggctacagccggaagtacgccagcaaagccaagaatctggcagacgatatggtgagaaacaccgctagagatctgctgtactacgccgtgacccaggatgccatgctgatcttcgccaacctgagccggggcttcggccggcagggcaagcggaccttcatggccgagagacagtacacacggatggaggactggctgaccgccaagctggcctacgagggcctgagcaagacctacctgtccaagacactggcccagtacacctccaagacatgcagcaactgtgggtttaccatcaccagcgccgactacgacagggtgctggagaagctgaagaagacagcaacaggctggatgaccacaattaacggcaaggagctgaaggtggagggccagattacctactacaacagatacaagagacagaacgtagtcaaggacctgtccgtcgagctggatagactgagcgaagaatctgtgaacaacgacatctcctcctggacaaagggcagaagcggagaagctctgagcctcctgaagaaaagattctcccatagacccgtgcaggagaagttcgtgtgcctgaactgcggcttcgagacacacgcagccgagcaagccgccctgaacatcgccagatcctggctgttcctgcggagccaggagtacaagaaataccagacaaacaagacaaccggcaacaccgataagagagccttcgtcgagacctggcagtccttttaccggaagaagcttaaggaggtgtggaaacctgccgtgcggtctggcggatctggcggaggctccaccagccccaagaaaaagagaaaagtctaagctgccttctgcggggcttgccttctggccatgcccttcttctctcccttgcacctgtacctcttggtctttgaataaagcctgagtaggaaggctagcaaaaaaaaaaaaaaaaaaaaaaaaaaaaaaaaaaaaaaaaaaaaaaaaaaaaaaaaaaaaaaaaaaaaaaaaaaaaaaaa

SEQ ID NO: 10401 - RNA, 8787 nt, synthetic construct
  source 1..8787: mol_type = other RNA
aggaaataagagagaaaagaagagtaagaagaaatataagagccaccatggcccctaagaagaagcgtaaagtgagccggatgaaccacgaccaggagttcgacccccctaaggtgtaccctcccgtccccgccgagaagagaaagcccatccgggtcctgagcctgttcgatggcatcgccaccggtctgctggtgctgaaggacctgggcatccaggtggataggtacattgcctccgaggtgtgcgaggactccatcaccgtgggaatggtgcgtcatcagggcaagatcatgtacgtgggcgacgtgcggagcgtgacacagaagcatatccaggagtggggccctttcgacctggtgatcggcggcagcccttgcaatgacctgagcatcgtgaacccagcccggaagggcctgtacgagggaaccggcagactgttcttcgagttttacagactgctgcacgacgcccggcctaaggaaggcgacgaccggcccttcttttggctgttcgagaatgtggtggccatgggagtcagcgacaagcgggatattagccggttcctggagagcaaccccgtgatgatcgatgccaaggaagtgagcgccgcccaccgggccagatacttctggggcaatctgcctggcatgaacagacccctggccagcaccgtgaacgacaagctggagctgcaggagtgcctggagcacggccggatcgccaagttcagcaaggtgagaaccatcaccacccgaagcaacagcatcaaacaaggcaaggaccagcactttcctgtgttcatgaacgagaaggaggacatcctgtggtgtaccgagatggagagagtgttcgggttcccagtccactacacagatgtcagcaacatgtctagactggccagacagagactgctgggaagaagctggtccgtccctgtgatcagacacctgttcgcccctctgaaggagtacttcgcctgcgtgagcagcggcaacagcaacgccaacagccggggccccagcttctctagcggcctggtgccactgtccctgagagggagccacatgggccccatggagatctacaaaaccgtgagcgcctggaagcggcagcctgtgcgcgtgctgagcctgtttcggaatatcgataaagtcctgaaaagcctgggattcctggagagcggctctggctccggcggtggcaccctgaagtacgtggaggatgtgacaaacgtggtcagacgggatgtggagaagtggggccccttcgatctggtgtacggcagcacccaacccctgggcagctcttgtgaccggtgccctggctggtacatgtttcagttccaccggatcctgcagtacgccctgccgagacaggagtcccagcggccattcttttggattttcatggacaacttgctgctgaccgaggatgaccaggaaactaccactcggttcctgcagaccgaagccgtgaccctgcaggacgtgagaggccgggactaccagaacgccatgcgggtgtggtccaacatccctggactgaaaagcaagcacgcacctctgacccctaaagaagaggagtacctgcaggcccaggtgcggagcagaagcaagctggacgcccctaaggtggatctgctggtgaagaattgcctcctgcccctgagagagtacttcaagtatttcagccagaatagtctgcccctgggaggcagcggcggcggcatgctgcagaccgcctggccccagaggctgagcaggaacctgtggttccaggagagcgtggccttcgaggacgtggccgtgtacttcacccagaaccagtgggccagcctggaccccgcccagagggccctgtacagggaggtgatgctggagaactacgccaacgtgaccagcctggtggccttccccttccccaagcccgccctgatcagccacctggagaagggcgaggccccctggggcggcggcccaagcagcggcgcccctcctcccagcggcggcaggcggcccaagcagcggcgcccctcctcccagcggcggcagcccagccggctccccaacctctaccgaggagggcacctctgagtccgccacccccgagagcggccctggcacctccaccgagcccagcgagggcagcgcacccggcagccctgccggcagccccacctccacagaggagggaaccagcaccgagcccagcgaaggcagcgccccaggcaccagcaccgagcctagtgagcaggagattaaacggatcaacaagatcagaagaagacttgtgaaagacagcaacaccaagaaggccggcaagacaggccccatgaaaaccctgctggttagagtgatgacacccgatctgagagagcggctggaaaacctgagaaagaagcctgaaaatatcccccagcccatcagcaatacatctagagccaacctgaataagctgctgaccgattacaccgaaatgaagaaggcgatcctgcatgtgtactgggaagagttccagaaggaccctgtgggcctgatgagccgggtggcccagcctgccagcaagaagatcgatcagaacaagctgaaacctgagatggacgagaagggcaacctgaccaccgccggctttgcctgctctcagtgtggccagcccctgttcgtgtacaagctggagcaggtgtctgagaagggcaaggcttacaccaactacttcggacggtgcaatgtggccgagcacgaaaagctgatcctgctggcccagctgaagcccgagaaggatagcgacgaagccgtgacatatagcctgggaaagtttgggcagagggccctggatttctacagcattcatgtgaccaaggagtccacccaccccgtgaagcccctggcccagatcgccggaaacagatacgcctccggacctgtgggaaaggccctgagcgacgcatgtatgggcacaatcgcctccttcctgtctaagtaccaggacatcatcatcgaacaccagaaggtggtgaagggcaaccagaagagactggagagcctgcgggagctggccggcaaggaaaacctggaataccctagcgtgaccctgccacctcagcctcacaccaaggagggcgttgatgcctacaacgaagtgatcgcccgggtgcgaatgtgggtgaacctgaacctgtggcagaagctgaagctaagcagagatgatgccaagcctctgctgagactgaagggattcccttcctttcctctggtcgagagacaggccaacgaagtggactggtgggacatggtgtgtaacgtgaagaagctgatcaacgagaaaaaggaggatggcaaggtgttttggcagaatctggctggctacaagagacaggaagccctgagaccatacctgagcagcgaggaagatcggaagaagggaaagaaattcgctcggtaccagctgggcgacctgctgctgcacctggaaaagaagcacggcgaggactggggaaaggtgtacgacgaggcctgggagcggattgacaagaaagtggaaggcctgagcaagcacatcaagctggaagaggaacggagaagcgaggacgcccagagcaaggccgccctgaccgactggctgcgggctaaggccagcttcgtgatcgagggcctgaaggaggccgacaaggacgagttctgcagatgcgagctgaagctgcagaagtggtacggggacctgcggggaaagcccttcgccatcgaagccgagaacagcatcctggacatcagcggcttcagcaagcagtacaactgtgccttcatctggcagaaggacggcgtgaagaagctgaacctgtacctgatcatcaactacttcaagggcggcaagctgcggttcaagaagatcaaacctgaagccttcgaagccaacagattctacaccgtgatcaacaaaaagagcggcgagatcgtgcccatggaggtgaacttcaacttcgacgaccccaacctgatcatcctgcctctggcctttggcaagagacagggcagagaattcatctggaacgacctgctgtccctggaaaccggcagcctgaagctggccaacggaagagtgatcgagaagacactgtacaacagaagaacccggcaggatgagcctgccctgttcgtggccctgaccttcgagcggcgggaggtcctggactcctccaatatcaaaccaatgaacctgatcggcgtggcaagaggcgaaaacatccccgccgtgatcgccctgaccgaccccgagggctgcccactgagccggtttaaggatagcctgggaaacccaacccacatcctgagaatcggcgagagctataaggagaagcagcggaccatccaggccaagaaggaggtggagcagcggagagccggcggctacagccggaagtacgccagcaaagccaagaatctggcagacgatatggtgagaaacaccgctagagatctgctgtactacgccgtgacccaggatgccatgctgatcttcgccaacctgagccggggcttcggccggcagggcaagcggaccttcatggccgagagacagtacacacggatggaggactggctgaccgccaagctggcctacgagggcctgagcaagacctacctgtccaagacactggcccagtacacctccaagacatgcagcaactgtgggtttaccatcaccagcgccgactacgacagggtgctggagaagctgaagaagacagcaacaggctggatgaccacaattaacggcaaggagctgaaggtggagggccagattacctactacaacagatacaagagacagaacgtagtcaaggacctgtccgtcgagctggatagactgagcgaagaatctgtgaacaacgacatctcctcctggacaaagggcagaagcggagaagctctgagcctcctgaagaaaagattctcccatagacccgtgcaggagaagttcgtgtgcctgaactgcggcttcgagacacacgcagccgagcaagccgccctgaacatcgccagatcctggctgttcctgcggagccaggagtacaagaaataccagacaaacaagacaaccggcaacaccgataagagagccttcgtcgagacctggcagtccttttaccggaagaagcttaaggaggtgtggaaacctgccgtgcggtctggcggatctggcggaggctccaccagccccaagaaaaagagaaaagtctaagctgccttctgcggggcttgccttctggccatgcccttcttctctcccttgcacctgtacctcttggtctttgaataaagcctgagtaggaaggctagcaaaaaaaaaaaaaaaaaaaaaaaaaaaaaaaaaaaaaaaaaaaaaaaaaaaaaaaaaaaaaaaaaaaaaaaaaaaaaaaagcccagccggctccccaacctctaccgaggagggcacctctgagtccgccacccccgagagcggccctggcacctccaccgagcccagcgagggcagcgcacccggcagccctgccggcagccccacctccacagaggagggaaccagcaccgagcccagcgaaggcagcgccccaggcaccagcaccgagcctagtgagcaggagattaaacggatcaacaagatcagaagaagacttgtgaaagacagcaacaccaagaaggccggcaagacaggccccatgaaaaccctgctggttagagtgatgacacccgatctgagagagcggctggaaaacctgagaaagaagcctgaaaatatcccccagcccatcagcaatacatctagagccaacctgaataagctgctgaccgattacaccgaaatgaagaaggcgatcctgcatgtgtactgggaagagttccagaaggaccctgtgggcctgatgagccgggtggcccagcctgccagcaagaagatcgatcagaacaagctgaaacctgagatggacgagaagggcaacctgaccaccgccggctttgcctgctctcagtgtggccagcccctgttcgtgtacaagctggagcaggtgtctgagaagggcaaggcttacaccaactacttcggacggtgcaatgtggccgagcacgaaaagctgatcctgctggcccagctgaagcccgagaaggatagcgacgaagccgtgacatatagcctgggaaagtttgggcagagggccctggatttctacagcattcatgtgaccaaggagtccacccaccccgtgaagcccctggcccagatcgccggaaacagatacgcctccggacctgtgggaaaggccctgagcgacgcatgtatgggcacaatcgcctccttcctgtctaagtaccaggacatcatcatcgaacaccagaaggtggtgaagggcaaccagaagagactggagagcctgcgggagctggccggcaaggaaaacctggaataccctagcgtgaccctgccacctcagcctcacaccaaggagggcgttgatgcctacaacgaagtgatcgcccgggtgcgaatgtgggtgaacctgaacctgtggcagaagctgaagctaagcagagatgatgccaagcctctgctgagactgaagggattcccttcctttcctctggtcgagagacaggccaacgaagtggactggtgggacatggtgtgtaacgtgaagaagctgatcaacgagaaaaaggaggatggcaaggtgttttggcagaatctggctggctacaagagacaggaagccctgagaccatacctgagcagcgaggaagatcggaagaagggaaagaaattcgctcggtaccagctgggcgacctgctgctgcacctggaaaagaagcacggcgaggactggggaaaggtgtacgacgaggcctgggagcggattgacaagaaagtggaaggcctgagcaagcacatcaagctggaagaggaacggagaagcgaggacgcccagagcaaggccgccctgaccgactggctgcgggctaaggccagcttcgtgatcgagggcctgaaggaggccgacaaggacgagttctgcagatgcgagctgaagctgcagaagtggtacggggacctgcggggaaagcccttcgccatcgaagccgagaacagcatcctggacatcagcggcttcagcaagcagtacaactgtgccttcatctggcagaaggacggcgtgaagaagctgaacctgtacctgatcatcaactacttcaagggcggcaagctgcggttcaagaagatcaaacctgaagccttcgaagccaacagattctacaccgtgatcaacaaaaagagcggcgagatcgtgcccatggaggtgaacttcaacttcgacgaccccaacctgatcatcctgcctctggcctttggcaagagacagggcagagaattcatctggaacgacctgctgtccctggaaaccggcagcctgaagctggccaacggaagagtgatcgagaagacactgtacaacagaagaacccggcaggatgagcctgccctgttcgtggccctgaccttcgagcggcgggaggtcctggactcctccaatatcaaaccaatgaacctgatcggcgtggcaagaggcgaaaacatccccgccgtgatcgccctgaccgaccccgagggctgcccactgagccggtttaaggatagcctgggaaacccaacccacatcctgagaatcggcgagagctataaggagaagcagcggaccatccaggccaagaaggaggtggagcagcggagagccggcggctacagccggaagtacgccagcaaagccaagaatctggcagacgatatggtgagaaacaccgctagagatctgctgtactacgccgtgacccaggatgccatgctgatcttcgccaacctgagccggggcttcggccggcagggcaagcggaccttcatggccgagagacagtacacacggatggaggactggctgaccgccaagctggcctacgagggcctgagcaagacctacctgtccaagacactggcccagtacacctccaagacatgcagcaactgtgggtttaccatcaccagcgccgactacgacagggtgctggagaagctgaagaagacagcaacaggctggatgaccacaattaacggcaaggagctgaaggtggagggccagattacctactacaacagatacaagagacagaacgtagtcaaggacctgtccgtcgagctggatagactgagcgaagaatctgtgaacaacgacatctcctcctggacaaagggcagaagcggagaagctctgagcctcctgaagaaaagattctcccatagacccgtgcaggagaagttcgtgtgcctgaactgcggcttcgagacacacgcagccgagcaagccgccctgaacatcgccagatcctggctgttcctgcggagccaggagtacaagaaataccagacaaacaagacaaccggcaacaccgataagagagccttcgtcgagacctggcagtccttttaccggaagaagcttaaggaggtgtggaaacctgccgtgcggtctggcggatctggcggaggctccaccagccccaagaaaaagagaaaagtctaagctgccttctgcggggcttgccttctggccatgcccttcttctctcccttgcacctgtacctcttggtctttgaataaagcctgagtaggaaggctagcaaaaaaaaaaaaaaaaaaaaaaaaaaaaaaaaaaaaaaaaaaaaaaaaaaaaaaaaaaaaaaaaaaaaaaaaaaaaaaaa

SEQ ID NO: 10402 - RNA, 8787 nt, synthetic construct
  source 1..8787: mol_type = other RNA
aggaaataagagagaaaagaagagtaagaagaaatataagagccaccatggcccctaagaagaagcgtaaagtgagccggatgaaccacgaccaggagttcgacccccctaaggtgtaccctcccgtccccgccgagaagagaaagcccatccgggtcctgagcctgttcgatggcatcgccaccggtctgctggtgctgaaggacctgggcatccaggtggataggtacattgcctccgaggtgtgcgaggactccatcaccgtgggaatggtgcgtcatcagggcaagatcatgtacgtgggcgacgtgcggagcgtgacacagaagcatatccaggagtggggccctttcgacctggtgatcggcggcagcccttgcaatgacctgagcatcgtgaacccagcccggaagggcctgtacgagggaaccggcagactgttcttcgagttttacagactgctgcacgacgcccggcctaaggaaggcgacgaccggcccttcttttggctgttcgagaatgtggtggccatgggagtcagcgacaagcgggatattagccggttcctggagagcaaccccgtgatgatcgatgccaaggaagtgagcgccgcccaccgggccagatacttctggggcaatctgcctggcatgaacagacccctggccagcaccgtgaacgacaagctggagctgcaggagtgcctggagcacggccggatcgccaagttcagcaaggtgagaaccatcaccacccgaagcaacagcatcaaacaaggcaaggaccagcactttcctgtgttcatgaacgagaaggaggacatcctgtggtgtaccgagatggagagagtgttcgggttcccagtccactacacagatgtcagcaacatgtctagactggccagacagagactgctgggaagaagctggtccgtccctgtgatcagacacctgttcgcccctctgaaggagtacttcgcctgcgtgagcagcggcaacagcaacgccaacagccggggccccagcttctctagcggcctggtgccactgtccctgagagggagccacatgggccccatggagatctacaaaaccgtgagcgcctggaagcggcagcctgtgcgcgtgctgagcctgtttcggaatatcgataaagtcctgaaaagcctgggattcctggagagcggctctggctccggcggtggcaccctgaagtacgtggaggatgtgacaaacgtggtcagacgggatgtggagaagtggggccccttcgatctggtgtacggcagcacccaacccctgggcagctcttgtgaccggtgccctggctggtacatgtttcagttccaccggatcctgcagtacgccctgccgagacaggagtcccagcggccattcttttggattttcatggacaacttgctgctgaccgaggatgaccaggaaactaccactcggttcctgcagaccgaagccgtgaccctgcaggacgtgagaggccgggactaccagaacgccatgcgggtgtggtccaacatccctggactgaaaagcaagcacgcacctctgacccctaaagaagaggagtacctgcaggcccaggtgcggagcagaagcaagctggacgcccctaaggtggatctgctggtgaagaattgcctcctgcccctgagagagtacttcaagtatttcagccagaatagtctgcccctgggaggcagcggcggcggcatggagcccctgaagttcagggacgtggccatcgagttcagcctggaggagtggcagtgcctggacagcatccagcagaacctgtacaggaacgtgatgctggagaactacaggaacctggtgttcctgggcatcgccgccagcaagcccgacctgatcatctgcctggagcaggagaaggagccctggagcaggaagaggaggaggatggtggccgagctgcccgtgatctgcagccacttcggcggcccaagcagcggcgcccctcctcccagcggcggcaggcggcccaagcagcggcgcccctcctcccagcggcggcagcccagccggctccccaacctctaccgaggagggcacctctgagtccgccacccccgagagcggccctggcacctccaccgagcccagcgagggcagcgcacccggcagccctgccggcagccccacctccacagaggagggaaccagcaccgagcccagcgaaggcagcgccccaggcaccagcaccgagcctagtgagcaggagattaaacggatcaacaagatcagaagaagacttgtgaaagacagcaacaccaagaaggccggcaagacaggccccatgaaaaccctgctggttagagtgatgacacccgatctgagagagcggctggaaaacctgagaaagaagcctgaaaatatcccccagcccatcagcaatacatctagagccaacctgaataagctgctgaccgattacaccgaaatgaagaaggcgatcctgcatgtgtactgggaagagttccagaaggaccctgtgggcctgatgagccgggtggcccagcctgccagcaagaagatcgatcagaacaagctgaaacctgagatggacgagaagggcaacctgaccaccgccggctttgcctgctctcagtgtggccagcccctgttcgtgtacaagctggagcaggtgtctgagaagggcaaggcttacaccaactacttcggacggtgcaatgtggccgagcacgaaaagctgatcctgctggcccagctgaagcccgagaaggatagcgacgaagccgtgacatatagcctgggaaagtttgggcagagggccctggatttctacagcattcatgtgaccaaggagtccacccaccccgtgaagcccctggcccagatcgccggaaacagatacgcctccggacctgtgggaaaggccctgagcgacgcatgtatgggcacaatcgcctccttcctgtctaagtaccaggacatcatcatcgaacaccagaaggtggtgaagggcaaccagaagagactggagagcctgcgggagctggccggcaaggaaaacctggaataccctagcgtgaccctgccacctcagcctcacaccaaggagggcgttgatgcctacaacgaagtgatcgcccgggtgcgaatgtgggtgaacctgaacctgtggcagaagctgaagctaagcagagatgatgccaagcctctgctgagactgaagggattcccttcctttcctctggtcgagagacaggccaacgaagtggactggtgggacatggtgtgtaacgtgaagaagctgatcaacgagaaaaaggaggatggcaaggtgttttggcagaatctggctggctacaagagacaggaagccctgagaccatacctgagcagcgaggaagatcggaagaagggaaagaaattcgctcggtaccagctgggcgacctgctgctgcacctggaaaagaagcacggcgaggactggggaaaggtgtacgacgaggcctgggagcggattgacaagaaagtggaaggcctgagcaagcacatcaagctggaagaggaacggagaagcgaggacgcccagagcaaggccgccctgaccgactggctgcgggctaaggccagcttcgtgatcgagggcctgaaggaggccgacaaggacgagttctgcagatgcgagctgaagctgcagaagtggtacggggacctgcggggaaagcccttcgccatcgaagccgagaacagcatcctggacatcagcggcttcagcaagcagtacaactgtgccttcatctggcagaaggacggcgtgaagaagctgaacctgtacctgatcatcaactacttcaagggcggcaagctgcggttcaagaagatcaaacctgaagccttcgaagccaacagattctacaccgtgatcaacaaaaagagcggcgagatcgtgcccatggaggtgaacttcaacttcgacgaccccaacctgatcatcctgcctctggcctttggcaagagacagggcagagaattcatctggaacgacctgctgtccctggaaaccggcagcctgaagctggccaacggaagagtgatcgagaagacactgtacaacagaagaacccggcaggatgagcctgccctgttcgtggccctgaccttcgagcggcgggaggtcctggactcctccaatatcaaaccaatgaacctgatcggcgtggcaagaggcgaaaacatccccgccgtgatcgccctgaccgaccccgagggctgcccactgagccggtttaaggatagcctgggaaacccaacccacatcctgagaatcggcgagagctataaggagaagcagcggaccatccaggccaagaaggaggtggagcagcggagagccggcggctacagccggaagtacgccagcaaagccaagaatctggcagacgatatggtgagaaacaccgctagagatctgctgtactacgccgtgacccaggatgccatgctgatcttcgccaacctgagccggggcttcggccggcagggcaagcggaccttcatggccgagagacagtacacacggatggaggactggctgaccgccaagctggcctacgagggcctgagcaagacctacctgtccaagacactggcccagtacacctccaagacatgcagcaactgtgggtttaccatcaccagcgccgactacgacagggtgctggagaagctgaagaagacagcaacaggctggatgaccacaattaacggcaaggagctgaaggtggagggccagattacctactacaacagatacaagagacagaacgtagtcaaggacctgtccgtcgagctggatagactgagcgaagaatctgtgaacaacgacatctcctcctggacaaagggcagaagcggagaagctctgagcctcctgaagaaaagattctcccatagacccgtgcaggagaagttcgtgtgcctgaactgcggcttcgagacacacgcagccgagcaagccgccctgaacatcgccagatcctggctgttcctgcggagccaggagtacaagaaataccagacaaacaagacaaccggcaacaccgataagagagccttcgtcgagacctggcagtccttttaccggaagaagcttaaggaggtgtggaaacctgccgtgcggtctggcggatctggcggaggctccaccagccccaagaaaaagagaaaagtctaagctgccttctgcggggcttgccttctggccatgcccttcttctctcccttgcacctgtacctcttggtctttgaataaagcctgagtaggaaggctagcaaaaaaaaaaaaaaaaaaaaaaaaaaaaaaaaaaaaaaaaaaaaaaaaaaaaaaaaaaaaaaaaaaaaaaaaaaaaaaaagcccagccggctccccaacctctaccgaggagggcacctctgagtccgccacccccgagagcggccctggcacctccaccgagcccagcgagggcagcgcacccggcagccctgccggcagccccacctccacagaggagggaaccagcaccgagcccagcgaaggcagcgccccaggcaccagcaccgagcctagtgagcaggagattaaacggatcaacaagatcagaagaagacttgtgaaagacagcaacaccaagaaggccggcaagacaggccccatgaaaaccctgctggttagagtgatgacacccgatctgagagagcggctggaaaacctgagaaagaagcctgaaaatatcccccagcccatcagcaatacatctagagccaacctgaataagctgctgaccgattacaccgaaatgaagaaggcgatcctgcatgtgtactgggaagagttccagaaggaccctgtgggcctgatgagccgggtggcccagcctgccagcaagaagatcgatcagaacaagctgaaacctgagatggacgagaagggcaacctgaccaccgccggctttgcctgctctcagtgtggccagcccctgttcgtgtacaagctggagcaggtgtctgagaagggcaaggcttacaccaactacttcggacggtgcaatgtggccgagcacgaaaagctgatcctgctggcccagctgaagcccgagaaggatagcgacgaagccgtgacatatagcctgggaaagtttgggcagagggccctggatttctacagcattcatgtgaccaaggagtccacccaccccgtgaagcccctggcccagatcgccggaaacagatacgcctccggacctgtgggaaaggccctgagcgacgcatgtatgggcacaatcgcctccttcctgtctaagtaccaggacatcatcatcgaacaccagaaggtggtgaagggcaaccagaagagactggagagcctgcgggagctggccggcaaggaaaacctggaataccctagcgtgaccctgccacctcagcctcacaccaaggagggcgttgatgcctacaacgaagtgatcgcccgggtgcgaatgtgggtgaacctgaacctgtggcagaagctgaagctaagcagagatgatgccaagcctctgctgagactgaagggattcccttcctttcctctggtcgagagacaggccaacgaagtggactggtgggacatggtgtgtaacgtgaagaagctgatcaacgagaaaaaggaggatggcaaggtgttttggcagaatctggctggctacaagagacaggaagccctgagaccatacctgagcagcgaggaagatcggaagaagggaaagaaattcgctcggtaccagctgggcgacctgctgctgcacctggaaaagaagcacggcgaggactggggaaaggtgtacgacgaggcctgggagcggattgacaagaaagtggaaggcctgagcaagcacatcaagctggaagaggaacggagaagcgaggacgcccagagcaaggccgccctgaccgactggctgcgggctaaggccagcttcgtgatcgagggcctgaaggaggccgacaaggacgagttctgcagatgcgagctgaagctgcagaagtggtacggggacctgcggggaaagcccttcgccatcgaagccgagaacagcatcctggacatcagcggcttcagcaagcagtacaactgtgccttcatctggcagaaggacggcgtgaagaagctgaacctgtacctgatcatcaactacttcaagggcggcaagctgcggttcaagaagatcaaacctgaagccttcgaagccaacagattctacaccgtgatcaacaaaaagagcggcgagatcgtgcccatggaggtgaacttcaacttcgacgaccccaacctgatcatcctgcctctggcctttggcaagagacagggcagagaattcatctggaacgacctgctgtccctggaaaccggcagcctgaagctggccaacggaagagtgatcgagaagacactgtacaacagaagaacccggcaggatgagcctgccctgttcgtggccctgaccttcgagcggcgggaggtcctggactcctccaatatcaaaccaatgaacctgatcggcgtggcaagaggcgaaaacatccccgccgtgatcgccctgaccgaccccgagggctgcccactgagccggtttaaggatagcctgggaaacccaacccacatcctgagaatcggcgagagctataaggagaagcagcggaccatccaggccaagaaggaggtggagcagcggagagccggcggctacagccggaagtacgccagcaaagccaagaatctggcagacgatatggtgagaaacaccgctagagatctgctgtactacgccgtgacccaggatgccatgctgatcttcgccaacctgagccggggcttcggccggcagggcaagcggaccttcatggccgagagacagtacacacggatggaggactggctgaccgccaagctggcctacgagggcctgagcaagacctacctgtccaagacactggcccagtacacctccaagacatgcagcaactgtgggtttaccatcaccagcgccgactacgacagggtgctggagaagctgaagaagacagcaacaggctggatgaccacaattaacggcaaggagctgaaggtggagggccagattacctactacaacagatacaagagacagaacgtagtcaaggacctgtccgtcgagctggatagactgagcgaagaatctgtgaacaacgacatctcctcctggacaaagggcagaagcggagaagctctgagcctcctgaagaaaagattctcccatagacccgtgcaggagaagttcgtgtgcctgaactgcggcttcgagacacacgcagccgagcaagccgccctgaacatcgccagatcctggctgttcctgcggagccaggagtacaagaaataccagacaaacaagacaaccggcaacaccgataagagagccttcgtcgagacctggcagtccttttaccggaagaagcttaaggaggtgtggaaacctgccgtgcggtctggcggatctggcggaggctccaccagccccaagaaaaagagaaaagtctaagctgccttctgcggggcttgccttctggccatgcccttcttctctcccttgcacctgtacctcttggtctttgaataaagcctgagtaggaaggctagcaaaaaaaaaaaaaaaaaaaaaaaaaaaaaaaaaaaaaaaaaaaaaaaaaaaaaaaaaaaaaaaaaaaaaaaaaaaaaaaa

SEQ ID NO: 10403 - RNA, 8787 nt, synthetic construct
  source 1..8787: mol_type = other RNA
aggaaataagagagaaaagaagagtaagaagaaatataagagccaccatggcccctaagaagaagcgtaaagtgagccggatgaaccacgaccaggagttcgacccccctaaggtgtaccctcccgtccccgccgagaagagaaagcccatccgggtcctgagcctgttcgatggcatcgccaccggtctgctggtgctgaaggacctgggcatccaggtggataggtacattgcctccgaggtgtgcgaggactccatcaccgtgggaatggtgcgtcatcagggcaagatcatgtacgtgggcgacgtgcggagcgtgacacagaagcatatccaggagtggggccctttcgacctggtgatcggcggcagcccttgcaatgacctgagcatcgtgaacccagcccggaagggcctgtacgagggaaccggcagactgttcttcgagttttacagactgctgcacgacgcccggcctaaggaaggcgacgaccggcccttcttttggctgttcgagaatgtggtggccatgggagtcagcgacaagcgggatattagccggttcctggagagcaaccccgtgatgatcgatgccaaggaagtgagcgccgcccaccgggccagatacttctggggcaatctgcctggcatgaacagacccctggccagcaccgtgaacgacaagctggagctgcaggagtgcctggagcacggccggatcgccaagttcagcaaggtgagaaccatcaccacccgaagcaacagcatcaaacaaggcaaggaccagcactttcctgtgttcatgaacgagaaggaggacatcctgtggtgtaccgagatggagagagtgttcgggttcccagtccactacacagatgtcagcaacatgtctagactggccagacagagactgctgggaagaagctggtccgtccctgtgatcagacacctgttcgcccctctgaaggagtacttcgcctgcgtgagcagcggcaacagcaacgccaacagccggggccccagcttctctagcggcctggtgccactgtccctgagagggagccacatgggccccatggagatctacaaaaccgtgagcgcctggaagcggcagcctgtgcgcgtgctgagcctgtttcggaatatcgataaagtcctgaaaagcctgggattcctggagagcggctctggctccggcggtggcaccctgaagtacgtggaggatgtgacaaacgtggtcagacgggatgtggagaagtggggccccttcgatctggtgtacggcagcacccaacccctgggcagctcttgtgaccggtgccctggctggtacatgtttcagttccaccggatcctgcagtacgccctgccgagacaggagtcccagcggccattcttttggattttcatggacaacttgctgctgaccgaggatgaccaggaaactaccactcggttcctgcagaccgaagccgtgaccctgcaggacgtgagaggccgggactaccagaacgccatgcgggtgtggtccaacatccctggactgaaaagcaagcacgcacctctgacccctaaagaagaggagtacctgcaggcccaggtgcggagcagaagcaagctggacgcccctaaggtggatctgctggtgaagaattgcctcctgcccctgagagagtacttcaagtatttcagccagaatagtctgcccctgggaggcagcggcggcggcatggagagcgtgagcttcgaggacgtggccgtgaacttcacccccgaggagtgggccctgctgaacagcagccagaagaggctgcacagggacgtgatgcaggagaacttcaggaacctggccgccatcgccaagaaccaggaggaccccaccctggaggacgactacgagtacctgaggaagatcctgcccttcgccgtgcagaccggctacaggctgtgcgagaaccaggactacgccgagggcggcccaagcagcggcgcccctcctcccagcggcggcaggcggcccaagcagcggcgcccctcctcccagcggcggcagcccagccggctccccaacctctaccgaggagggcacctctgagtccgccacccccgagagcggccctggcacctccaccgagcccagcgagggcagcgcacccggcagccctgccggcagccccacctccacagaggagggaaccagcaccgagcccagcgaaggcagcgccccaggcaccagcaccgagcctagtgagcaggagattaaacggatcaacaagatcagaagaagacttgtgaaagacagcaacaccaagaaggccggcaagacaggccccatgaaaaccctgctggttagagtgatgacacccgatctgagagagcggctggaaaacctgagaaagaagcctgaaaatatcccccagcccatcagcaatacatctagagccaacctgaataagctgctgaccgattacaccgaaatgaagaaggcgatcctgcatgtgtactgggaagagttccagaaggaccctgtgggcctgatgagccgggtggcccagcctgccagcaagaagatcgatcagaacaagctgaaacctgagatggacgagaagggcaacctgaccaccgccggctttgcctgctctcagtgtggccagcccctgttcgtgtacaagctggagcaggtgtctgagaagggcaaggcttacaccaactacttcggacggtgcaatgtggccgagcacgaaaagctgatcctgctggcccagctgaagcccgagaaggatagcgacgaagccgtgacatatagcctgggaaagtttgggcagagggccctggatttctacagcattcatgtgaccaaggagtccacccaccccgtgaagcccctggcccagatcgccggaaacagatacgcctccggacctgtgggaaaggccctgagcgacgcatgtatgggcacaatcgcctccttcctgtctaagtaccaggacatcatcatcgaacaccagaaggtggtgaagggcaaccagaagagactggagagcctgcgggagctggccggcaaggaaaacctggaataccctagcgtgaccctgccacctcagcctcacaccaaggagggcgttgatgcctacaacgaagtgatcgcccgggtgcgaatgtgggtgaacctgaacctgtggcagaagctgaagctaagcagagatgatgccaagcctctgctgagactgaagggattcccttcctttcctctggtcgagagacaggccaacgaagtggactggtgggacatggtgtgtaacgtgaagaagctgatcaacgagaaaaaggaggatggcaaggtgttttggcagaatctggctggctacaagagacaggaagccctgagaccatacctgagcagcgaggaagatcggaagaagggaaagaaattcgctcggtaccagctgggcgacctgctgctgcacctggaaaagaagcacggcgaggactggggaaaggtgtacgacgaggcctgggagcggattgacaagaaagtggaaggcctgagcaagcacatcaagctggaagaggaacggagaagcgaggacgcccagagcaaggccgccctgaccgactggctgcgggctaaggccagcttcgtgatcgagggcctgaaggaggccgacaaggacgagttctgcagatgcgagctgaagctgcagaagtggtacggggacctgcggggaaagcccttcgccatcgaagccgagaacagcatcctggacatcagcggcttcagcaagcagtacaactgtgccttcatctggcagaaggacggcgtgaagaagctgaacctgtacctgatcatcaactacttcaagggcggcaagctgcggttcaagaagatcaaacctgaagccttcgaagccaacagattctacaccgtgatcaacaaaaagagcggcgagatcgtgcccatggaggtgaacttcaacttcgacgaccccaacctgatcatcctgcctctggcctttggcaagagacagggcagagaattcatctggaacgacctgctgtccctggaaaccggcagcctgaagctggccaacggaagagtgatcgagaagacactgtacaacagaagaacccggcaggatgagcctgccctgttcgtggccctgaccttcgagcggcgggaggtcctggactcctccaatatcaaaccaatgaacctgatcggcgtggcaagaggcgaaaacatccccgccgtgatcgccctgaccgaccccgagggctgcccactgagccggtttaaggatagcctgggaaacccaacccacatcctgagaatcggcgagagctataaggagaagcagcggaccatccaggccaagaaggaggtggagcagcggagagccggcggctacagccggaagtacgccagcaaagccaagaatctggcagacgatatggtgagaaacaccgctagagatctgctgtactacgccgtgacccaggatgccatgctgatcttcgccaacctgagccggggcttcggccggcagggcaagcggaccttcatggccgagagacagtacacacggatggaggactggctgaccgccaagctggcctacgagggcctgagcaagacctacctgtccaagacactggcccagtacacctccaagacatgcagcaactgtgggtttaccatcaccagcgccgactacgacagggtgctggagaagctgaagaagacagcaacaggctggatgaccacaattaacggcaaggagctgaaggtggagggccagattacctactacaacagatacaagagacagaacgtagtcaaggacctgtccgtcgagctggatagactgagcgaagaatctgtgaacaacgacatctcctcctggacaaagggcagaagcggagaagctctgagcctcctgaagaaaagattctcccatagacccgtgcaggagaagttcgtgtgcctgaactgcggcttcgagacacacgcagccgagcaagccgccctgaacatcgccagatcctggctgttcctgcggagccaggagtacaagaaataccagacaaacaagacaaccggcaacaccgataagagagccttcgtcgagacctggcagtccttttaccggaagaagcttaaggaggtgtggaaacctgccgtgcggtctggcggatctggcggaggctccaccagccccaagaaaaagagaaaagtctaagctgccttctgcggggcttgccttctggccatgcccttcttctctcccttgcacctgtacctcttggtctttgaataaagcctgagtaggaaggctagcaaaaaaaaaaaaaaaaaaaaaaaaaaaaaaaaaaaaaaaaaaaaaaaaaaaaaaaaaaaaaaaaaaaaaaaaaaaaaaaagcccagccggctccccaacctctaccgaggagggcacctctgagtccgccacccccgagagcggccctggcacctccaccgagcccagcgagggcagcgcacccggcagccctgccggcagccccacctccacagaggagggaaccagcaccgagcccagcgaaggcagcgccccaggcaccagcaccgagcctagtgagcaggagattaaacggatcaacaagatcagaagaagacttgtgaaagacagcaacaccaagaaggccggcaagacaggccccatgaaaaccctgctggttagagtgatgacacccgatctgagagagcggctggaaaacctgagaaagaagcctgaaaatatcccccagcccatcagcaatacatctagagccaacctgaataagctgctgaccgattacaccgaaatgaagaaggcgatcctgcatgtgtactgggaagagttccagaaggaccctgtgggcctgatgagccgggtggcccagcctgccagcaagaagatcgatcagaacaagctgaaacctgagatggacgagaagggcaacctgaccaccgccggctttgcctgctctcagtgtggccagcccctgttcgtgtacaagctggagcaggtgtctgagaagggcaaggcttacaccaactacttcggacggtgcaatgtggccgagcacgaaaagctgatcctgctggcccagctgaagcccgagaaggatagcgacgaagccgtgacatatagcctgggaaagtttgggcagagggccctggatttctacagcattcatgtgaccaaggagtccacccaccccgtgaagcccctggcccagatcgccggaaacagatacgcctccggacctgtgggaaaggccctgagcgacgcatgtatgggcacaatcgcctccttcctgtctaagtaccaggacatcatcatcgaacaccagaaggtggtgaagggcaaccagaagagactggagagcctgcgggagctggccggcaaggaaaacctggaataccctagcgtgaccctgccacctcagcctcacaccaaggagggcgttgatgcctacaacgaagtgatcgcccgggtgcgaatgtgggtgaacctgaacctgtggcagaagctgaagctaagcagagatgatgccaagcctctgctgagactgaagggattcccttcctttcctctggtcgagagacaggccaacgaagtggactggtgggacatggtgtgtaacgtgaagaagctgatcaacgagaaaaaggaggatggcaaggtgttttggcagaatctggctggctacaagagacaggaagccctgagaccatacctgagcagcgaggaagatcggaagaagggaaagaaattcgctcggtaccagctgggcgacctgctgctgcacctggaaaagaagcacggcgaggactggggaaaggtgtacgacgaggcctgggagcggattgacaagaaagtggaaggcctgagcaagcacatcaagctggaagaggaacggagaagcgaggacgcccagagcaaggccgccctgaccgactggctgcgggctaaggccagcttcgtgatcgagggcctgaaggaggccgacaaggacgagttctgcagatgcgagctgaagctgcagaagtggtacggggacctgcggggaaagcccttcgccatcgaagccgagaacagcatcctggacatcagcggcttcagcaagcagtacaactgtgccttcatctggcagaaggacggcgtgaagaagctgaacctgtacctgatcatcaactacttcaagggcggcaagctgcggttcaagaagatcaaacctgaagccttcgaagccaacagattctacaccgtgatcaacaaaaagagcggcgagatcgtgcccatggaggtgaacttcaacttcgacgaccccaacctgatcatcctgcctctggcctttggcaagagacagggcagagaattcatctggaacgacctgctgtccctggaaaccggcagcctgaagctggccaacggaagagtgatcgagaagacactgtacaacagaagaacccggcaggatgagcctgccctgttcgtggccctgaccttcgagcggcgggaggtcctggactcctccaatatcaaaccaatgaacctgatcggcgtggcaagaggcgaaaacatccccgccgtgatcgccctgaccgaccccgagggctgcccactgagccggtttaaggatagcctgggaaacccaacccacatcctgagaatcggcgagagctataaggagaagcagcggaccatccaggccaagaaggaggtggagcagcggagagccggcggctacagccggaagtacgccagcaaagccaagaatctggcagacgatatggtgagaaacaccgctagagatctgctgtactacgccgtgacccaggatgccatgctgatcttcgccaacctgagccggggcttcggccggcagggcaagcggaccttcatggccgagagacagtacacacggatggaggactggctgaccgccaagctggcctacgagggcctgagcaagacctacctgtccaagacactggcccagtacacctccaagacatgcagcaactgtgggtttaccatcaccagcgccgactacgacagggtgctggagaagctgaagaagacagcaacaggctggatgaccacaattaacggcaaggagctgaaggtggagggccagattacctactacaacagatacaagagacagaacgtagtcaaggacctgtccgtcgagctggatagactgagcgaagaatctgtgaacaacgacatctcctcctggacaaagggcagaagcggagaagctctgagcctcctgaagaaaagattctcccatagacccgtgcaggagaagttcgtgtgcctgaactgcggcttcgagacacacgcagccgagcaagccgccctgaacatcgccagatcctggctgttcctgcggagccaggagtacaagaaataccagacaaacaagacaaccggcaacaccgataagagagccttcgtcgagacctggcagtccttttaccggaagaagcttaaggaggtgtggaaacctgccgtgcggtctggcggatctggcggaggctccaccagccccaagaaaaagagaaaagtctaagctgccttctgcggggcttgccttctggccatgcccttcttctctcccttgcacctgtacctcttggtctttgaataaagcctgagtaggaaggctagcaaaaaaaaaaaaaaaaaaaaaaaaaaaaaaaaaaaaaaaaaaaaaaaaaaaaaaaaaaaaaaaaaaaaaaaaaaaaaaaa

SEQ ID NO: 10404 - RNA, 8787 nt, synthetic construct
  source 1..8787: mol_type = other RNA
aggaaataagagagaaaagaagagtaagaagaaatataagagccaccatggcccctaagaagaagcgtaaagtgagccggatgaaccacgaccaggagttcgacccccctaaggtgtaccctcccgtccccgccgagaagagaaagcccatccgggtcctgagcctgttcgatggcatcgccaccggtctgctggtgctgaaggacctgggcatccaggtggataggtacattgcctccgaggtgtgcgaggactccatcaccgtgggaatggtgcgtcatcagggcaagatcatgtacgtgggcgacgtgcggagcgtgacacagaagcatatccaggagtggggccctttcgacctggtgatcggcggcagcccttgcaatgacctgagcatcgtgaacccagcccggaagggcctgtacgagggaaccggcagactgttcttcgagttttacagactgctgcacgacgcccggcctaaggaaggcgacgaccggcccttcttttggctgttcgagaatgtggtggccatgggagtcagcgacaagcgggatattagccggttcctggagagcaaccccgtgatgatcgatgccaaggaagtgagcgccgcccaccgggccagatacttctggggcaatctgcctggcatgaacagacccctggccagcaccgtgaacgacaagctggagctgcaggagtgcctggagcacggccggatcgccaagttcagcaaggtgagaaccatcaccacccgaagcaacagcatcaaacaaggcaaggaccagcactttcctgtgttcatgaacgagaaggaggacatcctgtggtgtaccgagatggagagagtgttcgggttcccagtccactacacagatgtcagcaacatgtctagactggccagacagagactgctgggaagaagctggtccgtccctgtgatcagacacctgttcgcccctctgaaggagtacttcgcctgcgtgagcagcggcaacagcaacgccaacagccggggccccagcttctctagcggcctggtgccactgtccctgagagggagccacatgggccccatggagatctacaaaaccgtgagcgcctggaagcggcagcctgtgcgcgtgctgagcctgtttcggaatatcgataaagtcctgaaaagcctgggattcctggagagcggctctggctccggcggtggcaccctgaagtacgtggaggatgtgacaaacgtggtcagacgggatgtggagaagtggggccccttcgatctggtgtacggcagcacccaacccctgggcagctcttgtgaccggtgccctggctggtacatgtttcagttccaccggatcctgcagtacgccctgccgagacaggagtcccagcggccattcttttggattttcatggacaacttgctgctgaccgaggatgaccaggaaactaccactcggttcctgcagaccgaagccgtgaccctgcaggacgtgagaggccgggactaccagaacgccatgcgggtgtggtccaacatccctggactgaaaagcaagcacgcacctctgacccctaaagaagaggagtacctgcaggcccaggtgcggagcagaagcaagctggacgcccctaaggtggatctgctggtgaagaattgcctcctgcccctgagagagtacttcaagtatttcagccagaatagtctgcccctgggaggcagcggcggcggcaccccccagaccctgaagcccagggcccccggcgcctgcagcagggccaggagccccggccccggcatccaggacagcgacgccgtgggcagcgtgaccttcgaggacgtggccgtgtacttcagctgggaggagtgggccctgctggacgaggcccagaggtgcctgtaccacgacgtgatgctggagaacttcgccctgaccagcagcctgggcggccccaccggcggcggcagggtggtgggcggcccaagcagcggcgcccctcctcccagcggcggcaggcggcccaagcagcggcgcccctcctcccagcggcggcagcccagccggctccccaacctctaccgaggagggcacctctgagtccgccacccccgagagcggccctggcacctccaccgagcccagcgagggcagcgcacccggcagccctgccggcagccccacctccacagaggagggaaccagcaccgagcccagcgaaggcagcgccccaggcaccagcaccgagcctagtgagcaggagattaaacggatcaacaagatcagaagaagacttgtgaaagacagcaacaccaagaaggccggcaagacaggccccatgaaaaccctgctggttagagtgatgacacccgatctgagagagcggctggaaaacctgagaaagaagcctgaaaatatcccccagcccatcagcaatacatctagagccaacctgaataagctgctgaccgattacaccgaaatgaagaaggcgatcctgcatgtgtactgggaagagttccagaaggaccctgtgggcctgatgagccgggtggcccagcctgccagcaagaagatcgatcagaacaagctgaaacctgagatggacgagaagggcaacctgaccaccgccggctttgcctgctctcagtgtggccagcccctgttcgtgtacaagctggagcaggtgtctgagaagggcaaggcttacaccaactacttcggacggtgcaatgtggccgagcacgaaaagctgatcctgctggcccagctgaagcccgagaaggatagcgacgaagccgtgacatatagcctgggaaagtttgggcagagggccctggatttctacagcattcatgtgaccaaggagtccacccaccccgtgaagcccctggcccagatcgccggaaacagatacgcctccggacctgtgggaaaggccctgagcgacgcatgtatgggcacaatcgcctccttcctgtctaagtaccaggacatcatcatcgaacaccagaaggtggtgaagggcaaccagaagagactggagagcctgcgggagctggccggcaaggaaaacctggaataccctagcgtgaccctgccacctcagcctcacaccaaggagggcgttgatgcctacaacgaagtgatcgcccgggtgcgaatgtgggtgaacctgaacctgtggcagaagctgaagctaagcagagatgatgccaagcctctgctgagactgaagggattcccttcctttcctctggtcgagagacaggccaacgaagtggactggtgggacatggtgtgtaacgtgaagaagctgatcaacgagaaaaaggaggatggcaaggtgttttggcagaatctggctggctacaagagacaggaagccctgagaccatacctgagcagcgaggaagatcggaagaagggaaagaaattcgctcggtaccagctgggcgacctgctgctgcacctggaaaagaagcacggcgaggactggggaaaggtgtacgacgaggcctgggagcggattgacaagaaagtggaaggcctgagcaagcacatcaagctggaagaggaacggagaagcgaggacgcccagagcaaggccgccctgaccgactggctgcgggctaaggccagcttcgtgatcgagggcctgaaggaggccgacaaggacgagttctgcagatgcgagctgaagctgcagaagtggtacggggacctgcggggaaagcccttcgccatcgaagccgagaacagcatcctggacatcagcggcttcagcaagcagtacaactgtgccttcatctggcagaaggacggcgtgaagaagctgaacctgtacctgatcatcaactacttcaagggcggcaagctgcggttcaagaagatcaaacctgaagccttcgaagccaacagattctacaccgtgatcaacaaaaagagcggcgagatcgtgcccatggaggtgaacttcaacttcgacgaccccaacctgatcatcctgcctctggcctttggcaagagacagggcagagaattcatctggaacgacctgctgtccctggaaaccggcagcctgaagctggccaacggaagagtgatcgagaagacactgtacaacagaagaacccggcaggatgagcctgccctgttcgtggccctgaccttcgagcggcgggaggtcctggactcctccaatatcaaaccaatgaacctgatcggcgtggcaagaggcgaaaacatccccgccgtgatcgccctgaccgaccccgagggctgcccactgagccggtttaaggatagcctgggaaacccaacccacatcctgagaatcggcgagagctataaggagaagcagcggaccatccaggccaagaaggaggtggagcagcggagagccggcggctacagccggaagtacgccagcaaagccaagaatctggcagacgatatggtgagaaacaccgctagagatctgctgtactacgccgtgacccaggatgccatgctgatcttcgccaacctgagccggggcttcggccggcagggcaagcggaccttcatggccgagagacagtacacacggatggaggactggctgaccgccaagctggcctacgagggcctgagcaagacctacctgtccaagacactggcccagtacacctccaagacatgcagcaactgtgggtttaccatcaccagcgccgactacgacagggtgctggagaagctgaagaagacagcaacaggctggatgaccacaattaacggcaaggagctgaaggtggagggccagattacctactacaacagatacaagagacagaacgtagtcaaggacctgtccgtcgagctggatagactgagcgaagaatctgtgaacaacgacatctcctcctggacaaagggcagaagcggagaagctctgagcctcctgaagaaaagattctcccatagacccgtgcaggagaagttcgtgtgcctgaactgcggcttcgagacacacgcagccgagcaagccgccctgaacatcgccagatcctggctgttcctgcggagccaggagtacaagaaataccagacaaacaagacaaccggcaacaccgataagagagccttcgtcgagacctggcagtccttttaccggaagaagcttaaggaggtgtggaaacctgccgtgcggtctggcggatctggcggaggctccaccagccccaagaaaaagagaaaagtctaagctgccttctgcggggcttgccttctggccatgcccttcttctctcccttgcacctgtacctcttggtctttgaataaagcctgagtaggaaggctagcaaaaaaaaaaaaaaaaaaaaaaaaaaaaaaaaaaaaaaaaaaaaaaaaaaaaaaaaaaaaaaaaaaaaaaaaaaaaaaaagcccagccggctccccaacctctaccgaggagggcacctctgagtccgccacccccgagagcggccctggcacctccaccgagcccagcgagggcagcgcacccggcagccctgccggcagccccacctccacagaggagggaaccagcaccgagcccagcgaaggcagcgccccaggcaccagcaccgagcctagtgagcaggagattaaacggatcaacaagatcagaagaagacttgtgaaagacagcaacaccaagaaggccggcaagacaggccccatgaaaaccctgctggttagagtgatgacacccgatctgagagagcggctggaaaacctgagaaagaagcctgaaaatatcccccagcccatcagcaatacatctagagccaacctgaataagctgctgaccgattacaccgaaatgaagaaggcgatcctgcatgtgtactgggaagagttccagaaggaccctgtgggcctgatgagccgggtggcccagcctgccagcaagaagatcgatcagaacaagctgaaacctgagatggacgagaagggcaacctgaccaccgccggctttgcctgctctcagtgtggccagcccctgttcgtgtacaagctggagcaggtgtctgagaagggcaaggcttacaccaactacttcggacggtgcaatgtggccgagcacgaaaagctgatcctgctggcccagctgaagcccgagaaggatagcgacgaagccgtgacatatagcctgggaaagtttgggcagagggccctggatttctacagcattcatgtgaccaaggagtccacccaccccgtgaagcccctggcccagatcgccggaaacagatacgcctccggacctgtgggaaaggccctgagcgacgcatgtatgggcacaatcgcctccttcctgtctaagtaccaggacatcatcatcgaacaccagaaggtggtgaagggcaaccagaagagactggagagcctgcgggagctggccggcaaggaaaacctggaataccctagcgtgaccctgccacctcagcctcacaccaaggagggcgttgatgcctacaacgaagtgatcgcccgggtgcgaatgtgggtgaacctgaacctgtggcagaagctgaagctaagcagagatgatgccaagcctctgctgagactgaagggattcccttcctttcctctggtcgagagacaggccaacgaagtggactggtgggacatggtgtgtaacgtgaagaagctgatcaacgagaaaaaggaggatggcaaggtgttttggcagaatctggctggctacaagagacaggaagccctgagaccatacctgagcagcgaggaagatcggaagaagggaaagaaattcgctcggtaccagctgggcgacctgctgctgcacctggaaaagaagcacggcgaggactggggaaaggtgtacgacgaggcctgggagcggattgacaagaaagtggaaggcctgagcaagcacatcaagctggaagaggaacggagaagcgaggacgcccagagcaaggccgccctgaccgactggctgcgggctaaggccagcttcgtgatcgagggcctgaaggaggccgacaaggacgagttctgcagatgcgagctgaagctgcagaagtggtacggggacctgcggggaaagcccttcgccatcgaagccgagaacagcatcctggacatcagcggcttcagcaagcagtacaactgtgccttcatctggcagaaggacggcgtgaagaagctgaacctgtacctgatcatcaactacttcaagggcggcaagctgcggttcaagaagatcaaacctgaagccttcgaagccaacagattctacaccgtgatcaacaaaaagagcggcgagatcgtgcccatggaggtgaacttcaacttcgacgaccccaacctgatcatcctgcctctggcctttggcaagagacagggcagagaattcatctggaacgacctgctgtccctggaaaccggcagcctgaagctggccaacggaagagtgatcgagaagacactgtacaacagaagaacccggcaggatgagcctgccctgttcgtggccctgaccttcgagcggcgggaggtcctggactcctccaatatcaaaccaatgaacctgatcggcgtggcaagaggcgaaaacatccccgccgtgatcgccctgaccgaccccgagggctgcccactgagccggtttaaggatagcctgggaaacccaacccacatcctgagaatcggcgagagctataaggagaagcagcggaccatccaggccaagaaggaggtggagcagcggagagccggcggctacagccggaagtacgccagcaaagccaagaatctggcagacgatatggtgagaaacaccgctagagatctgctgtactacgccgtgacccaggatgccatgctgatcttcgccaacctgagccggggcttcggccggcagggcaagcggaccttcatggccgagagacagtacacacggatggaggactggctgaccgccaagctggcctacgagggcctgagcaagacctacctgtccaagacactggcccagtacacctccaagacatgcagcaactgtgggtttaccatcaccagcgccgactacgacagggtgctggagaagctgaagaagacagcaacaggctggatgaccacaattaacggcaaggagctgaaggtggagggccagattacctactacaacagatacaagagacagaacgtagtcaaggacctgtccgtcgagctggatagactgagcgaagaatctgtgaacaacgacatctcctcctggacaaagggcagaagcggagaagctctgagcctcctgaagaaaagattctcccatagacccgtgcaggagaagttcgtgtgcctgaactgcggcttcgagacacacgcagccgagcaagccgccctgaacatcgccagatcctggctgttcctgcggagccaggagtacaagaaataccagacaaacaagacaaccggcaacaccgataagagagccttcgtcgagacctggcagtccttttaccggaagaagcttaaggaggtgtggaaacctgccgtgcggtctggcggatctggcggaggctccaccagccccaagaaaaagagaaaagtctaagctgccttctgcggggcttgccttctggccatgcccttcttctctcccttgcacctgtacctcttggtctttgaataaagcctgagtaggaaggctagcaaaaaaaaaaaaaaaaaaaaaaaaaaaaaaaaaaaaaaaaaaaaaaaaaaaaaaaaaaaaaaaaaaaaaaaaaaaaaaaa

SEQ ID NO: 10405 - RNA, 8787 nt, synthetic construct
  source 1..8787: mol_type = other RNA
aggaaataagagagaaaagaagagtaagaagaaatataagagccaccatggcccctaagaagaagcgtaaagtgagccggatgaaccacgaccaggagttcgacccccctaaggtgtaccctcccgtccccgccgagaagagaaagcccatccgggtcctgagcctgttcgatggcatcgccaccggtctgctggtgctgaaggacctgggcatccaggtggataggtacattgcctccgaggtgtgcgaggactccatcaccgtgggaatggtgcgtcatcagggcaagatcatgtacgtgggcgacgtgcggagcgtgacacagaagcatatccaggagtggggccctttcgacctggtgatcggcggcagcccttgcaatgacctgagcatcgtgaacccagcccggaagggcctgtacgagggaaccggcagactgttcttcgagttttacagactgctgcacgacgcccggcctaaggaaggcgacgaccggcccttcttttggctgttcgagaatgtggtggccatgggagtcagcgacaagcgggatattagccggttcctggagagcaaccccgtgatgatcgatgccaaggaagtgagcgccgcccaccgggccagatacttctggggcaatctgcctggcatgaacagacccctggccagcaccgtgaacgacaagctggagctgcaggagtgcctggagcacggccggatcgccaagttcagcaaggtgagaaccatcaccacccgaagcaacagcatcaaacaaggcaaggaccagcactttcctgtgttcatgaacgagaaggaggacatcctgtggtgtaccgagatggagagagtgttcgggttcccagtccactacacagatgtcagcaacatgtctagactggccagacagagactgctgggaagaagctggtccgtccctgtgatcagacacctgttcgcccctctgaaggagtacttcgcctgcgtgagcagcggcaacagcaacgccaacagccggggccccagcttctctagcggcctggtgccactgtccctgagagggagccacatgggccccatggagatctacaaaaccgtgagcgcctggaagcggcagcctgtgcgcgtgctgagcctgtttcggaatatcgataaagtcctgaaaagcctgggattcctggagagcggctctggctccggcggtggcaccctgaagtacgtggaggatgtgacaaacgtggtcagacgggatgtggagaagtggggccccttcgatctggtgtacggcagcacccaacccctgggcagctcttgtgaccggtgccctggctggtacatgtttcagttccaccggatcctgcagtacgccctgccgagacaggagtcccagcggccattcttttggattttcatggacaacttgctgctgaccgaggatgaccaggaaactaccactcggttcctgcagaccgaagccgtgaccctgcaggacgtgagaggccgggactaccagaacgccatgcgggtgtggtccaacatccctggactgaaaagcaagcacgcacctctgacccctaaagaagaggagtacctgcaggcccaggtgcggagcagaagcaagctggacgcccctaaggtggatctgctggtgaagaattgcctcctgcccctgagagagtacttcaagtatttcagccagaatagtctgcccctgggaggcagcggcggcggccagggcagcgtgaccttcagggacgtggccatcgacttcagccaggaggagtgggagtggctgcagcccgcccagagggacctgtacaggcacgtgatgctggagaactacggccacctggtgagcctgggcctgaacatcagcaagccctacgtggtgagcctgctggagcagggcagggacccctggctggagaaggacgtgaggagggacctgttcagcgagagcagcggcgagatcaggggcggcccaagcagcggcgcccctcctcccagcggcggcaggcggcccaagcagcggcgcccctcctcccagcggcggcagcccagccggctccccaacctctaccgaggagggcacctctgagtccgccacccccgagagcggccctggcacctccaccgagcccagcgagggcagcgcacccggcagccctgccggcagccccacctccacagaggagggaaccagcaccgagcccagcgaaggcagcgccccaggcaccagcaccgagcctagtgagcaggagattaaacggatcaacaagatcagaagaagacttgtgaaagacagcaacaccaagaaggccggcaagacaggccccatgaaaaccctgctggttagagtgatgacacccgatctgagagagcggctggaaaacctgagaaagaagcctgaaaatatcccccagcccatcagcaatacatctagagccaacctgaataagctgctgaccgattacaccgaaatgaagaaggcgatcctgcatgtgtactgggaagagttccagaaggaccctgtgggcctgatgagccgggtggcccagcctgccagcaagaagatcgatcagaacaagctgaaacctgagatggacgagaagggcaacctgaccaccgccggctttgcctgctctcagtgtggccagcccctgttcgtgtacaagctggagcaggtgtctgagaagggcaaggcttacaccaactacttcggacggtgcaatgtggccgagcacgaaaagctgatcctgctggcccagctgaagcccgagaaggatagcgacgaagccgtgacatatagcctgggaaagtttgggcagagggccctggatttctacagcattcatgtgaccaaggagtccacccaccccgtgaagcccctggcccagatcgccggaaacagatacgcctccggacctgtgggaaaggccctgagcgacgcatgtatgggcacaatcgcctccttcctgtctaagtaccaggacatcatcatcgaacaccagaaggtggtgaagggcaaccagaagagactggagagcctgcgggagctggccggcaaggaaaacctggaataccctagcgtgaccctgccacctcagcctcacaccaaggagggcgttgatgcctacaacgaagtgatcgcccgggtgcgaatgtgggtgaacctgaacctgtggcagaagctgaagctaagcagagatgatgccaagcctctgctgagactgaagggattcccttcctttcctctggtcgagagacaggccaacgaagtggactggtgggacatggtgtgtaacgtgaagaagctgatcaacgagaaaaaggaggatggcaaggtgttttggcagaatctggctggctacaagagacaggaagccctgagaccatacctgagcagcgaggaagatcggaagaagggaaagaaattcgctcggtaccagctgggcgacctgctgctgcacctggaaaagaagcacggcgaggactggggaaaggtgtacgacgaggcctgggagcggattgacaagaaagtggaaggcctgagcaagcacatcaagctggaagaggaacggagaagcgaggacgcccagagcaaggccgccctgaccgactggctgcgggctaaggccagcttcgtgatcgagggcctgaaggaggccgacaaggacgagttctgcagatgcgagctgaagctgcagaagtggtacggggacctgcggggaaagcccttcgccatcgaagccgagaacagcatcctggacatcagcggcttcagcaagcagtacaactgtgccttcatctggcagaaggacggcgtgaagaagctgaacctgtacctgatcatcaactacttcaagggcggcaagctgcggttcaagaagatcaaacctgaagccttcgaagccaacagattctacaccgtgatcaacaaaaagagcggcgagatcgtgcccatggaggtgaacttcaacttcgacgaccccaacctgatcatcctgcctctggcctttggcaagagacagggcagagaattcatctggaacgacctgctgtccctggaaaccggcagcctgaagctggccaacggaagagtgatcgagaagacactgtacaacagaagaacccggcaggatgagcctgccctgttcgtggccctgaccttcgagcggcgggaggtcctggactcctccaatatcaaaccaatgaacctgatcggcgtggcaagaggcgaaaacatccccgccgtgatcgccctgaccgaccccgagggctgcccactgagccggtttaaggatagcctgggaaacccaacccacatcctgagaatcggcgagagctataaggagaagcagcggaccatccaggccaagaaggaggtggagcagcggagagccggcggctacagccggaagtacgccagcaaagccaagaatctggcagacgatatggtgagaaacaccgctagagatctgctgtactacgccgtgacccaggatgccatgctgatcttcgccaacctgagccggggcttcggccggcagggcaagcggaccttcatggccgagagacagtacacacggatggaggactggctgaccgccaagctggcctacgagggcctgagcaagacctacctgtccaagacactggcccagtacacctccaagacatgcagcaactgtgggtttaccatcaccagcgccgactacgacagggtgctggagaagctgaagaagacagcaacaggctggatgaccacaattaacggcaaggagctgaaggtggagggccagattacctactacaacagatacaagagacagaacgtagtcaaggacctgtccgtcgagctggatagactgagcgaagaatctgtgaacaacgacatctcctcctggacaaagggcagaagcggagaagctctgagcctcctgaagaaaagattctcccatagacccgtgcaggagaagttcgtgtgcctgaactgcggcttcgagacacacgcagccgagcaagccgccctgaacatcgccagatcctggctgttcctgcggagccaggagtacaagaaataccagacaaacaagacaaccggcaacaccgataagagagccttcgtcgagacctggcagtccttttaccggaagaagcttaaggaggtgtggaaacctgccgtgcggtctggcggatctggcggaggctccaccagccccaagaaaaagagaaaagtctaagctgccttctgcggggcttgccttctggccatgcccttcttctctcccttgcacctgtacctcttggtctttgaataaagcctgagtaggaaggctagcaaaaaaaaaaaaaaaaaaaaaaaaaaaaaaaaaaaaaaaaaaaaaaaaaaaaaaaaaaaaaaaaaaaaaaaaaaaaaaaagcccagccggctccccaacctctaccgaggagggcacctctgagtccgccacccccgagagcggccctggcacctccaccgagcccagcgagggcagcgcacccggcagccctgccggcagccccacctccacagaggagggaaccagcaccgagcccagcgaaggcagcgccccaggcaccagcaccgagcctagtgagcaggagattaaacggatcaacaagatcagaagaagacttgtgaaagacagcaacaccaagaaggccggcaagacaggccccatgaaaaccctgctggttagagtgatgacacccgatctgagagagcggctggaaaacctgagaaagaagcctgaaaatatcccccagcccatcagcaatacatctagagccaacctgaataagctgctgaccgattacaccgaaatgaagaaggcgatcctgcatgtgtactgggaagagttccagaaggaccctgtgggcctgatgagccgggtggcccagcctgccagcaagaagatcgatcagaacaagctgaaacctgagatggacgagaagggcaacctgaccaccgccggctttgcctgctctcagtgtggccagcccctgttcgtgtacaagctggagcaggtgtctgagaagggcaaggcttacaccaactacttcggacggtgcaatgtggccgagcacgaaaagctgatcctgctggcccagctgaagcccgagaaggatagcgacgaagccgtgacatatagcctgggaaagtttgggcagagggccctggatttctacagcattcatgtgaccaaggagtccacccaccccgtgaagcccctggcccagatcgccggaaacagatacgcctccggacctgtgggaaaggccctgagcgacgcatgtatgggcacaatcgcctccttcctgtctaagtaccaggacatcatcatcgaacaccagaaggtggtgaagggcaaccagaagagactggagagcctgcgggagctggccggcaaggaaaacctggaataccctagcgtgaccctgccacctcagcctcacaccaaggagggcgttgatgcctacaacgaagtgatcgcccgggtgcgaatgtgggtgaacctgaacctgtggcagaagctgaagctaagcagagatgatgccaagcctctgctgagactgaagggattcccttcctttcctctggtcgagagacaggccaacgaagtggactggtgggacatggtgtgtaacgtgaagaagctgatcaacgagaaaaaggaggatggcaaggtgttttggcagaatctggctggctacaagagacaggaagccctgagaccatacctgagcagcgaggaagatcggaagaagggaaagaaattcgctcggtaccagctgggcgacctgctgctgcacctggaaaagaagcacggcgaggactggggaaaggtgtacgacgaggcctgggagcggattgacaagaaagtggaaggcctgagcaagcacatcaagctggaagaggaacggagaagcgaggacgcccagagcaaggccgccctgaccgactggctgcgggctaaggccagcttcgtgatcgagggcctgaaggaggccgacaaggacgagttctgcagatgcgagctgaagctgcagaagtggtacggggacctgcggggaaagcccttcgccatcgaagccgagaacagcatcctggacatcagcggcttcagcaagcagtacaactgtgccttcatctggcagaaggacggcgtgaagaagctgaacctgtacctgatcatcaactacttcaagggcggcaagctgcggttcaagaagatcaaacctgaagccttcgaagccaacagattctacaccgtgatcaacaaaaagagcggcgagatcgtgcccatggaggtgaacttcaacttcgacgaccccaacctgatcatcctgcctctggcctttggcaagagacagggcagagaattcatctggaacgacctgctgtccctggaaaccggcagcctgaagctggccaacggaagagtgatcgagaagacactgtacaacagaagaacccggcaggatgagcctgccctgttcgtggccctgaccttcgagcggcgggaggtcctggactcctccaatatcaaaccaatgaacctgatcggcgtggcaagaggcgaaaacatccccgccgtgatcgccctgaccgaccccgagggctgcccactgagccggtttaaggatagcctgggaaacccaacccacatcctgagaatcggcgagagctataaggagaagcagcggaccatccaggccaagaaggaggtggagcagcggagagccggcggctacagccggaagtacgccagcaaagccaagaatctggcagacgatatggtgagaaacaccgctagagatctgctgtactacgccgtgacccaggatgccatgctgatcttcgccaacctgagccggggcttcggccggcagggcaagcggaccttcatggccgagagacagtacacacggatggaggactggctgaccgccaagctggcctacgagggcctgagcaagacctacctgtccaagacactggcccagtacacctccaagacatgcagcaactgtgggtttaccatcaccagcgccgactacgacagggtgctggagaagctgaagaagacagcaacaggctggatgaccacaattaacggcaaggagctgaaggtggagggccagattacctactacaacagatacaagagacagaacgtagtcaaggacctgtccgtcgagctggatagactgagcgaagaatctgtgaacaacgacatctcctcctggacaaagggcagaagcggagaagctctgagcctcctgaagaaaagattctcccatagacccgtgcaggagaagttcgtgtgcctgaactgcggcttcgagacacacgcagccgagcaagccgccctgaacatcgccagatcctggctgttcctgcggagccaggagtacaagaaataccagacaaacaagacaaccggcaacaccgataagagagccttcgtcgagacctggcagtccttttaccggaagaagcttaaggaggtgtggaaacctgccgtgcggtctggcggatctggcggaggctccaccagccccaagaaaaagagaaaagtctaagctgccttctgcggggcttgccttctggccatgcccttcttctctcccttgcacctgtacctcttggtctttgaataaagcctgagtaggaaggctagcaaaaaaaaaaaaaaaaaaaaaaaaaaaaaaaaaaaaaaaaaaaaaaaaaaaaaaaaaaaaaaaaaaaaaaaaaaaaaaaa

SEQ ID NO: 10406 - RNA, 8787 nt, synthetic construct
  source 1..8787: mol_type = other RNA
aggaaataagagagaaaagaagagtaagaagaaatataagagccaccatggcccctaagaagaagcgtaaagtgagccggatgaaccacgaccaggagttcgacccccctaaggtgtaccctcccgtccccgccgagaagagaaagcccatccgggtcctgagcctgttcgatggcatcgccaccggtctgctggtgctgaaggacctgggcatccaggtggataggtacattgcctccgaggtgtgcgaggactccatcaccgtgggaatggtgcgtcatcagggcaagatcatgtacgtgggcgacgtgcggagcgtgacacagaagcatatccaggagtggggccctttcgacctggtgatcggcggcagcccttgcaatgacctgagcatcgtgaacccagcccggaagggcctgtacgagggaaccggcagactgttcttcgagttttacagactgctgcacgacgcccggcctaaggaaggcgacgaccggcccttcttttggctgttcgagaatgtggtggccatgggagtcagcgacaagcgggatattagccggttcctggagagcaaccccgtgatgatcgatgccaaggaagtgagcgccgcccaccgggccagatacttctggggcaatctgcctggcatgaacagacccctggccagcaccgtgaacgacaagctggagctgcaggagtgcctggagcacggccggatcgccaagttcagcaaggtgagaaccatcaccacccgaagcaacagcatcaaacaaggcaaggaccagcactttcctgtgttcatgaacgagaaggaggacatcctgtggtgtaccgagatggagagagtgttcgggttcccagtccactacacagatgtcagcaacatgtctagactggccagacagagactgctgggaagaagctggtccgtccctgtgatcagacacctgttcgcccctctgaaggagtacttcgcctgcgtgagcagcggcaacagcaacgccaacagccggggccccagcttctctagcggcctggtgccactgtccctgagagggagccacatgggccccatggagatctacaaaaccgtgagcgcctggaagcggcagcctgtgcgcgtgctgagcctgtttcggaatatcgataaagtcctgaaaagcctgggattcctggagagcggctctggctccggcggtggcaccctgaagtacgtggaggatgtgacaaacgtggtcagacgggatgtggagaagtggggccccttcgatctggtgtacggcagcacccaacccctgggcagctcttgtgaccggtgccctggctggtacatgtttcagttccaccggatcctgcagtacgccctgccgagacaggagtcccagcggccattcttttggattttcatggacaacttgctgctgaccgaggatgaccaggaaactaccactcggttcctgcagaccgaagccgtgaccctgcaggacgtgagaggccgggactaccagaacgccatgcgggtgtggtccaacatccctggactgaaaagcaagcacgcacctctgacccctaaagaagaggagtacctgcaggcccaggtgcggagcagaagcaagctggacgcccctaaggtggatctgctggtgaagaattgcctcctgcccctgagagagtacttcaagtatttcagccagaatagtctgcccctgggaggcagcggcggcggcatgaccaccctgaaggagaccgtgaccttcaaggacgtggccgtggtgttcaccgaggaggagctgcagctgctggaccccgcccagaagaagctgtaccaggacgtgatgctggagaacttcaggaacctgctgagcgtgggccaccagcccttccacggcgacaccttccacttccccagggaggagaagttctggatggtggagaccgccacccagaaggagggcaacctggacggcgtgggcggcccaagcagcggcgcccctcctcccagcggcggcaggcggcccaagcagcggcgcccctcctcccagcggcggcagcccagccggctccccaacctctaccgaggagggcacctctgagtccgccacccccgagagcggccctggcacctccaccgagcccagcgagggcagcgcacccggcagccctgccggcagccccacctccacagaggagggaaccagcaccgagcccagcgaaggcagcgccccaggcaccagcaccgagcctagtgagcaggagattaaacggatcaacaagatcagaagaagacttgtgaaagacagcaacaccaagaaggccggcaagacaggccccatgaaaaccctgctggttagagtgatgacacccgatctgagagagcggctggaaaacctgagaaagaagcctgaaaatatcccccagcccatcagcaatacatctagagccaacctgaataagctgctgaccgattacaccgaaatgaagaaggcgatcctgcatgtgtactgggaagagttccagaaggaccctgtgggcctgatgagccgggtggcccagcctgccagcaagaagatcgatcagaacaagctgaaacctgagatggacgagaagggcaacctgaccaccgccggctttgcctgctctcagtgtggccagcccctgttcgtgtacaagctggagcaggtgtctgagaagggcaaggcttacaccaactacttcggacggtgcaatgtggccgagcacgaaaagctgatcctgctggcccagctgaagcccgagaaggatagcgacgaagccgtgacatatagcctgggaaagtttgggcagagggccctggatttctacagcattcatgtgaccaaggagtccacccaccccgtgaagcccctggcccagatcgccggaaacagatacgcctccggacctgtgggaaaggccctgagcgacgcatgtatgggcacaatcgcctccttcctgtctaagtaccaggacatcatcatcgaacaccagaaggtggtgaagggcaaccagaagagactggagagcctgcgggagctggccggcaaggaaaacctggaataccctagcgtgaccctgccacctcagcctcacaccaaggagggcgttgatgcctacaacgaagtgatcgcccgggtgcgaatgtgggtgaacctgaacctgtggcagaagctgaagctaagcagagatgatgccaagcctctgctgagactgaagggattcccttcctttcctctggtcgagagacaggccaacgaagtggactggtgggacatggtgtgtaacgtgaagaagctgatcaacgagaaaaaggaggatggcaaggtgttttggcagaatctggctggctacaagagacaggaagccctgagaccatacctgagcagcgaggaagatcggaagaagggaaagaaattcgctcggtaccagctgggcgacctgctgctgcacctggaaaagaagcacggcgaggactggggaaaggtgtacgacgaggcctgggagcggattgacaagaaagtggaaggcctgagcaagcacatcaagctggaagaggaacggagaagcgaggacgcccagagcaaggccgccctgaccgactggctgcgggctaaggccagcttcgtgatcgagggcctgaaggaggccgacaaggacgagttctgcagatgcgagctgaagctgcagaagtggtacggggacctgcggggaaagcccttcgccatcgaagccgagaacagcatcctggacatcagcggcttcagcaagcagtacaactgtgccttcatctggcagaaggacggcgtgaagaagctgaacctgtacctgatcatcaactacttcaagggcggcaagctgcggttcaagaagatcaaacctgaagccttcgaagccaacagattctacaccgtgatcaacaaaaagagcggcgagatcgtgcccatggaggtgaacttcaacttcgacgaccccaacctgatcatcctgcctctggcctttggcaagagacagggcagagaattcatctggaacgacctgctgtccctggaaaccggcagcctgaagctggccaacggaagagtgatcgagaagacactgtacaacagaagaacccggcaggatgagcctgccctgttcgtggccctgaccttcgagcggcgggaggtcctggactcctccaatatcaaaccaatgaacctgatcggcgtggcaagaggcgaaaacatccccgccgtgatcgccctgaccgaccccgagggctgcccactgagccggtttaaggatagcctgggaaacccaacccacatcctgagaatcggcgagagctataaggagaagcagcggaccatccaggccaagaaggaggtggagcagcggagagccggcggctacagccggaagtacgccagcaaagccaagaatctggcagacgatatggtgagaaacaccgctagagatctgctgtactacgccgtgacccaggatgccatgctgatcttcgccaacctgagccggggcttcggccggcagggcaagcggaccttcatggccgagagacagtacacacggatggaggactggctgaccgccaagctggcctacgagggcctgagcaagacctacctgtccaagacactggcccagtacacctccaagacatgcagcaactgtgggtttaccatcaccagcgccgactacgacagggtgctggagaagctgaagaagacagcaacaggctggatgaccacaattaacggcaaggagctgaaggtggagggccagattacctactacaacagatacaagagacagaacgtagtcaaggacctgtccgtcgagctggatagactgagcgaagaatctgtgaacaacgacatctcctcctggacaaagggcagaagcggagaagctctgagcctcctgaagaaaagattctcccatagacccgtgcaggagaagttcgtgtgcctgaactgcggcttcgagacacacgcagccgagcaagccgccctgaacatcgccagatcctggctgttcctgcggagccaggagtacaagaaataccagacaaacaagacaaccggcaacaccgataagagagccttcgtcgagacctggcagtccttttaccggaagaagcttaaggaggtgtggaaacctgccgtgcggtctggcggatctggcggaggctccaccagccccaagaaaaagagaaaagtctaagctgccttctgcggggcttgccttctggccatgcccttcttctctcccttgcacctgtacctcttggtctttgaataaagcctgagtaggaaggctagcaaaaaaaaaaaaaaaaaaaaaaaaaaaaaaaaaaaaaaaaaaaaaaaaaaaaaaaaaaaaaaaaaaaaaaaaaaaaaaaagcccagccggctccccaacctctaccgaggagggcacctctgagtccgccacccccgagagcggccctggcacctccaccgagcccagcgagggcagcgcacccggcagccctgccggcagccccacctccacagaggagggaaccagcaccgagcccagcgaaggcagcgccccaggcaccagcaccgagcctagtgagcaggagattaaacggatcaacaagatcagaagaagacttgtgaaagacagcaacaccaagaaggccggcaagacaggccccatgaaaaccctgctggttagagtgatgacacccgatctgagagagcggctggaaaacctgagaaagaagcctgaaaatatcccccagcccatcagcaatacatctagagccaacctgaataagctgctgaccgattacaccgaaatgaagaaggcgatcctgcatgtgtactgggaagagttccagaaggaccctgtgggcctgatgagccgggtggcccagcctgccagcaagaagatcgatcagaacaagctgaaacctgagatggacgagaagggcaacctgaccaccgccggctttgcctgctctcagtgtggccagcccctgttcgtgtacaagctggagcaggtgtctgagaagggcaaggcttacaccaactacttcggacggtgcaatgtggccgagcacgaaaagctgatcctgctggcccagctgaagcccgagaaggatagcgacgaagccgtgacatatagcctgggaaagtttgggcagagggccctggatttctacagcattcatgtgaccaaggagtccacccaccccgtgaagcccctggcccagatcgccggaaacagatacgcctccggacctgtgggaaaggccctgagcgacgcatgtatgggcacaatcgcctccttcctgtctaagtaccaggacatcatcatcgaacaccagaaggtggtgaagggcaaccagaagagactggagagcctgcgggagctggccggcaaggaaaacctggaataccctagcgtgaccctgccacctcagcctcacaccaaggagggcgttgatgcctacaacgaagtgatcgcccgggtgcgaatgtgggtgaacctgaacctgtggcagaagctgaagctaagcagagatgatgccaagcctctgctgagactgaagggattcccttcctttcctctggtcgagagacaggccaacgaagtggactggtgggacatggtgtgtaacgtgaagaagctgatcaacgagaaaaaggaggatggcaaggtgttttggcagaatctggctggctacaagagacaggaagccctgagaccatacctgagcagcgaggaagatcggaagaagggaaagaaattcgctcggtaccagctgggcgacctgctgctgcacctggaaaagaagcacggcgaggactggggaaaggtgtacgacgaggcctgggagcggattgacaagaaagtggaaggcctgagcaagcacatcaagctggaagaggaacggagaagcgaggacgcccagagcaaggccgccctgaccgactggctgcgggctaaggccagcttcgtgatcgagggcctgaaggaggccgacaaggacgagttctgcagatgcgagctgaagctgcagaagtggtacggggacctgcggggaaagcccttcgccatcgaagccgagaacagcatcctggacatcagcggcttcagcaagcagtacaactgtgccttcatctggcagaaggacggcgtgaagaagctgaacctgtacctgatcatcaactacttcaagggcggcaagctgcggttcaagaagatcaaacctgaagccttcgaagccaacagattctacaccgtgatcaacaaaaagagcggcgagatcgtgcccatggaggtgaacttcaacttcgacgaccccaacctgatcatcctgcctctggcctttggcaagagacagggcagagaattcatctggaacgacctgctgtccctggaaaccggcagcctgaagctggccaacggaagagtgatcgagaagacactgtacaacagaagaacccggcaggatgagcctgccctgttcgtggccctgaccttcgagcggcgggaggtcctggactcctccaatatcaaaccaatgaacctgatcggcgtggcaagaggcgaaaacatccccgccgtgatcgccctgaccgaccccgagggctgcccactgagccggtttaaggatagcctgggaaacccaacccacatcctgagaatcggcgagagctataaggagaagcagcggaccatccaggccaagaaggaggtggagcagcggagagccggcggctacagccggaagtacgccagcaaagccaagaatctggcagacgatatggtgagaaacaccgctagagatctgctgtactacgccgtgacccaggatgccatgctgatcttcgccaacctgagccggggcttcggccggcagggcaagcggaccttcatggccgagagacagtacacacggatggaggactggctgaccgccaagctggcctacgagggcctgagcaagacctacctgtccaagacactggcccagtacacctccaagacatgcagcaactgtgggtttaccatcaccagcgccgactacgacagggtgctggagaagctgaagaagacagcaacaggctggatgaccacaattaacggcaaggagctgaaggtggagggccagattacctactacaacagatacaagagacagaacgtagtcaaggacctgtccgtcgagctggatagactgagcgaagaatctgtgaacaacgacatctcctcctggacaaagggcagaagcggagaagctctgagcctcctgaagaaaagattctcccatagacccgtgcaggagaagttcgtgtgcctgaactgcggcttcgagacacacgcagccgagcaagccgccctgaacatcgccagatcctggctgttcctgcggagccaggagtacaagaaataccagacaaacaagacaaccggcaacaccgataagagagccttcgtcgagacctggcagtccttttaccggaagaagcttaaggaggtgtggaaacctgccgtgcggtctggcggatctggcggaggctccaccagccccaagaaaaagagaaaagtctaagctgccttctgcggggcttgccttctggccatgcccttcttctctcccttgcacctgtacctcttggtctttgaataaagcctgagtaggaaggctagcaaaaaaaaaaaaaaaaaaaaaaaaaaaaaaaaaaaaaaaaaaaaaaaaaaaaaaaaaaaaaaaaaaaaaaaaaaaaaaaa

SEQ ID NO: 10407 - RNA, 8787 nt, synthetic construct
  source 1..8787: mol_type = other RNA
aggaaataagagagaaaagaagagtaagaagaaatataagagccaccatggcccctaagaagaagcgtaaagtgagccggatgaaccacgaccaggagttcgacccccctaaggtgtaccctcccgtccccgccgagaagagaaagcccatccgggtcctgagcctgttcgatggcatcgccaccggtctgctggtgctgaaggacctgggcatccaggtggataggtacattgcctccgaggtgtgcgaggactccatcaccgtgggaatggtgcgtcatcagggcaagatcatgtacgtgggcgacgtgcggagcgtgacacagaagcatatccaggagtggggccctttcgacctggtgatcggcggcagcccttgcaatgacctgagcatcgtgaacccagcccggaagggcctgtacgagggaaccggcagactgttcttcgagttttacagactgctgcacgacgcccggcctaaggaaggcgacgaccggcccttcttttggctgttcgagaatgtggtggccatgggagtcagcgacaagcgggatattagccggttcctggagagcaaccccgtgatgatcgatgccaaggaagtgagcgccgcccaccgggccagatacttctggggcaatctgcctggcatgaacagacccctggccagcaccgtgaacgacaagctggagctgcaggagtgcctggagcacggccggatcgccaagttcagcaaggtgagaaccatcaccacccgaagcaacagcatcaaacaaggcaaggaccagcactttcctgtgttcatgaacgagaaggaggacatcctgtggtgtaccgagatggagagagtgttcgggttcccagtccactacacagatgtcagcaacatgtctagactggccagacagagactgctgggaagaagctggtccgtccctgtgatcagacacctgttcgcccctctgaaggagtacttcgcctgcgtgagcagcggcaacagcaacgccaacagccggggccccagcttctctagcggcctggtgccactgtccctgagagggagccacatgggccccatggagatctacaaaaccgtgagcgcctggaagcggcagcctgtgcgcgtgctgagcctgtttcggaatatcgataaagtcctgaaaagcctgggattcctggagagcggctctggctccggcggtggcaccctgaagtacgtggaggatgtgacaaacgtggtcagacgggatgtggagaagtggggccccttcgatctggtgtacggcagcacccaacccctgggcagctcttgtgaccggtgccctggctggtacatgtttcagttccaccggatcctgcagtacgccctgccgagacaggagtcccagcggccattcttttggattttcatggacaacttgctgctgaccgaggatgaccaggaaactaccactcggttcctgcagaccgaagccgtgaccctgcaggacgtgagaggccgggactaccagaacgccatgcgggtgtggtccaacatccctggactgaaaagcaagcacgcacctctgacccctaaagaagaggagtacctgcaggcccaggtgcggagcagaagcaagctggacgcccctaaggtggatctgctggtgaagaattgcctcctgcccctgagagagtacttcaagtatttcagccagaatagtctgcccctgggaggcagcggcggcggcatgaccttcagcgacgtggccgtggacttcagccagcaggagtgggagtgcctggaccccgtgcagaagaccctgtacagggacgtgatgatggagaactacggcaacctggtgagcctgggccacagcatcagcaagcccgacgtgatcgccctgctggagcagggcaaggagccctgggtggtgaccaaggaggagaccaggaggtgctgcaccgacctggagagcaggtacgagatcatcggcggcccaagcagcggcgcccctcctcccagcggcggcaggcggcccaagcagcggcgcccctcctcccagcggcggcagcccagccggctccccaacctctaccgaggagggcacctctgagtccgccacccccgagagcggccctggcacctccaccgagcccagcgagggcagcgcacccggcagccctgccggcagccccacctccacagaggagggaaccagcaccgagcccagcgaaggcagcgccccaggcaccagcaccgagcctagtgagcaggagattaaacggatcaacaagatcagaagaagacttgtgaaagacagcaacaccaagaaggccggcaagacaggccccatgaaaaccctgctggttagagtgatgacacccgatctgagagagcggctggaaaacctgagaaagaagcctgaaaatatcccccagcccatcagcaatacatctagagccaacctgaataagctgctgaccgattacaccgaaatgaagaaggcgatcctgcatgtgtactgggaagagttccagaaggaccctgtgggcctgatgagccgggtggcccagcctgccagcaagaagatcgatcagaacaagctgaaacctgagatggacgagaagggcaacctgaccaccgccggctttgcctgctctcagtgtggccagcccctgttcgtgtacaagctggagcaggtgtctgagaagggcaaggcttacaccaactacttcggacggtgcaatgtggccgagcacgaaaagctgatcctgctggcccagctgaagcccgagaaggatagcgacgaagccgtgacatatagcctgggaaagtttgggcagagggccctggatttctacagcattcatgtgaccaaggagtccacccaccccgtgaagcccctggcccagatcgccggaaacagatacgcctccggacctgtgggaaaggccctgagcgacgcatgtatgggcacaatcgcctccttcctgtctaagtaccaggacatcatcatcgaacaccagaaggtggtgaagggcaaccagaagagactggagagcctgcgggagctggccggcaaggaaaacctggaataccctagcgtgaccctgccacctcagcctcacaccaaggagggcgttgatgcctacaacgaagtgatcgcccgggtgcgaatgtgggtgaacctgaacctgtggcagaagctgaagctaagcagagatgatgccaagcctctgctgagactgaagggattcccttcctttcctctggtcgagagacaggccaacgaagtggactggtgggacatggtgtgtaacgtgaagaagctgatcaacgagaaaaaggaggatggcaaggtgttttggcagaatctggctggctacaagagacaggaagccctgagaccatacctgagcagcgaggaagatcggaagaagggaaagaaattcgctcggtaccagctgggcgacctgctgctgcacctggaaaagaagcacggcgaggactggggaaaggtgtacgacgaggcctgggagcggattgacaagaaagtggaaggcctgagcaagcacatcaagctggaagaggaacggagaagcgaggacgcccagagcaaggccgccctgaccgactggctgcgggctaaggccagcttcgtgatcgagggcctgaaggaggccgacaaggacgagttctgcagatgcgagctgaagctgcagaagtggtacggggacctgcggggaaagcccttcgccatcgaagccgagaacagcatcctggacatcagcggcttcagcaagcagtacaactgtgccttcatctggcagaaggacggcgtgaagaagctgaacctgtacctgatcatcaactacttcaagggcggcaagctgcggttcaagaagatcaaacctgaagccttcgaagccaacagattctacaccgtgatcaacaaaaagagcggcgagatcgtgcccatggaggtgaacttcaacttcgacgaccccaacctgatcatcctgcctctggcctttggcaagagacagggcagagaattcatctggaacgacctgctgtccctggaaaccggcagcctgaagctggccaacggaagagtgatcgagaagacactgtacaacagaagaacccggcaggatgagcctgccctgttcgtggccctgaccttcgagcggcgggaggtcctggactcctccaatatcaaaccaatgaacctgatcggcgtggcaagaggcgaaaacatccccgccgtgatcgccctgaccgaccccgagggctgcccactgagccggtttaaggatagcctgggaaacccaacccacatcctgagaatcggcgagagctataaggagaagcagcggaccatccaggccaagaaggaggtggagcagcggagagccggcggctacagccggaagtacgccagcaaagccaagaatctggcagacgatatggtgagaaacaccgctagagatctgctgtactacgccgtgacccaggatgccatgctgatcttcgccaacctgagccggggcttcggccggcagggcaagcggaccttcatggccgagagacagtacacacggatggaggactggctgaccgccaagctggcctacgagggcctgagcaagacctacctgtccaagacactggcccagtacacctccaagacatgcagcaactgtgggtttaccatcaccagcgccgactacgacagggtgctggagaagctgaagaagacagcaacaggctggatgaccacaattaacggcaaggagctgaaggtggagggccagattacctactacaacagatacaagagacagaacgtagtcaaggacctgtccgtcgagctggatagactgagcgaagaatctgtgaacaacgacatctcctcctggacaaagggcagaagcggagaagctctgagcctcctgaagaaaagattctcccatagacccgtgcaggagaagttcgtgtgcctgaactgcggcttcgagacacacgcagccgagcaagccgccctgaacatcgccagatcctggctgttcctgcggagccaggagtacaagaaataccagacaaacaagacaaccggcaacaccgataagagagccttcgtcgagacctggcagtccttttaccggaagaagcttaaggaggtgtggaaacctgccgtgcggtctggcggatctggcggaggctccaccagccccaagaaaaagagaaaagtctaagctgccttctgcggggcttgccttctggccatgcccttcttctctcccttgcacctgtacctcttggtctttgaataaagcctgagtaggaaggctagcaaaaaaaaaaaaaaaaaaaaaaaaaaaaaaaaaaaaaaaaaaaaaaaaaaaaaaaaaaaaaaaaaaaaaaaaaaaaaaaagcccagccggctccccaacctctaccgaggagggcacctctgagtccgccacccccgagagcggccctggcacctccaccgagcccagcgagggcagcgcacccggcagccctgccggcagccccacctccacagaggagggaaccagcaccgagcccagcgaaggcagcgccccaggcaccagcaccgagcctagtgagcaggagattaaacggatcaacaagatcagaagaagacttgtgaaagacagcaacaccaagaaggccggcaagacaggccccatgaaaaccctgctggttagagtgatgacacccgatctgagagagcggctggaaaacctgagaaagaagcctgaaaatatcccccagcccatcagcaatacatctagagccaacctgaataagctgctgaccgattacaccgaaatgaagaaggcgatcctgcatgtgtactgggaagagttccagaaggaccctgtgggcctgatgagccgggtggcccagcctgccagcaagaagatcgatcagaacaagctgaaacctgagatggacgagaagggcaacctgaccaccgccggctttgcctgctctcagtgtggccagcccctgttcgtgtacaagctggagcaggtgtctgagaagggcaaggcttacaccaactacttcggacggtgcaatgtggccgagcacgaaaagctgatcctgctggcccagctgaagcccgagaaggatagcgacgaagccgtgacatatagcctgggaaagtttgggcagagggccctggatttctacagcattcatgtgaccaaggagtccacccaccccgtgaagcccctggcccagatcgccggaaacagatacgcctccggacctgtgggaaaggccctgagcgacgcatgtatgggcacaatcgcctccttcctgtctaagtaccaggacatcatcatcgaacaccagaaggtggtgaagggcaaccagaagagactggagagcctgcgggagctggccggcaaggaaaacctggaataccctagcgtgaccctgccacctcagcctcacaccaaggagggcgttgatgcctacaacgaagtgatcgcccgggtgcgaatgtgggtgaacctgaacctgtggcagaagctgaagctaagcagagatgatgccaagcctctgctgagactgaagggattcccttcctttcctctggtcgagagacaggccaacgaagtggactggtgggacatggtgtgtaacgtgaagaagctgatcaacgagaaaaaggaggatggcaaggtgttttggcagaatctggctggctacaagagacaggaagccctgagaccatacctgagcagcgaggaagatcggaagaagggaaagaaattcgctcggtaccagctgggcgacctgctgctgcacctggaaaagaagcacggcgaggactggggaaaggtgtacgacgaggcctgggagcggattgacaagaaagtggaaggcctgagcaagcacatcaagctggaagaggaacggagaagcgaggacgcccagagcaaggccgccctgaccgactggctgcgggctaaggccagcttcgtgatcgagggcctgaaggaggccgacaaggacgagttctgcagatgcgagctgaagctgcagaagtggtacggggacctgcggggaaagcccttcgccatcgaagccgagaacagcatcctggacatcagcggcttcagcaagcagtacaactgtgccttcatctggcagaaggacggcgtgaagaagctgaacctgtacctgatcatcaactacttcaagggcggcaagctgcggttcaagaagatcaaacctgaagccttcgaagccaacagattctacaccgtgatcaacaaaaagagcggcgagatcgtgcccatggaggtgaacttcaacttcgacgaccccaacctgatcatcctgcctctggcctttggcaagagacagggcagagaattcatctggaacgacctgctgtccctggaaaccggcagcctgaagctggccaacggaagagtgatcgagaagacactgtacaacagaagaacccggcaggatgagcctgccctgttcgtggccctgaccttcgagcggcgggaggtcctggactcctccaatatcaaaccaatgaacctgatcggcgtggcaagaggcgaaaacatccccgccgtgatcgccctgaccgaccccgagggctgcccactgagccggtttaaggatagcctgggaaacccaacccacatcctgagaatcggcgagagctataaggagaagcagcggaccatccaggccaagaaggaggtggagcagcggagagccggcggctacagccggaagtacgccagcaaagccaagaatctggcagacgatatggtgagaaacaccgctagagatctgctgtactacgccgtgacccaggatgccatgctgatcttcgccaacctgagccggggcttcggccggcagggcaagcggaccttcatggccgagagacagtacacacggatggaggactggctgaccgccaagctggcctacgagggcctgagcaagacctacctgtccaagacactggcccagtacacctccaagacatgcagcaactgtgggtttaccatcaccagcgccgactacgacagggtgctggagaagctgaagaagacagcaacaggctggatgaccacaattaacggcaaggagctgaaggtggagggccagattacctactacaacagatacaagagacagaacgtagtcaaggacctgtccgtcgagctggatagactgagcgaagaatctgtgaacaacgacatctcctcctggacaaagggcagaagcggagaagctctgagcctcctgaagaaaagattctcccatagacccgtgcaggagaagttcgtgtgcctgaactgcggcttcgagacacacgcagccgagcaagccgccctgaacatcgccagatcctggctgttcctgcggagccaggagtacaagaaataccagacaaacaagacaaccggcaacaccgataagagagccttcgtcgagacctggcagtccttttaccggaagaagcttaaggaggtgtggaaacctgccgtgcggtctggcggatctggcggaggctccaccagccccaagaaaaagagaaaagtctaagctgccttctgcggggcttgccttctggccatgcccttcttctctcccttgcacctgtacctcttggtctttgaataaagcctgagtaggaaggctagcaaaaaaaaaaaaaaaaaaaaaaaaaaaaaaaaaaaaaaaaaaaaaaaaaaaaaaaaaaaaaaaaaaaaaaaaaaaaaaaa

SEQ ID NO: 10408 - RNA, 8787 nt, synthetic construct
  source 1..8787: mol_type = other RNA
aggaaataagagagaaaagaagagtaagaagaaatataagagccaccatggcccctaagaagaagcgtaaagtgagccggatgaaccacgaccaggagttcgacccccctaaggtgtaccctcccgtccccgccgagaagagaaagcccatccgggtcctgagcctgttcgatggcatcgccaccggtctgctggtgctgaaggacctgggcatccaggtggataggtacattgcctccgaggtgtgcgaggactccatcaccgtgggaatggtgcgtcatcagggcaagatcatgtacgtgggcgacgtgcggagcgtgacacagaagcatatccaggagtggggccctttcgacctggtgatcggcggcagcccttgcaatgacctgagcatcgtgaacccagcccggaagggcctgtacgagggaaccggcagactgttcttcgagttttacagactgctgcacgacgcccggcctaaggaaggcgacgaccggcccttcttttggctgttcgagaatgtggtggccatgggagtcagcgacaagcgggatattagccggttcctggagagcaaccccgtgatgatcgatgccaaggaagtgagcgccgcccaccgggccagatacttctggggcaatctgcctggcatgaacagacccctggccagcaccgtgaacgacaagctggagctgcaggagtgcctggagcacggccggatcgccaagttcagcaaggtgagaaccatcaccacccgaagcaacagcatcaaacaaggcaaggaccagcactttcctgtgttcatgaacgagaaggaggacatcctgtggtgtaccgagatggagagagtgttcgggttcccagtccactacacagatgtcagcaacatgtctagactggccagacagagactgctgggaagaagctggtccgtccctgtgatcagacacctgttcgcccctctgaaggagtacttcgcctgcgtgagcagcggcaacagcaacgccaacagccggggccccagcttctctagcggcctggtgccactgtccctgagagggagccacatgggccccatggagatctacaaaaccgtgagcgcctggaagcggcagcctgtgcgcgtgctgagcctgtttcggaatatcgataaagtcctgaaaagcctgggattcctggagagcggctctggctccggcggtggcaccctgaagtacgtggaggatgtgacaaacgtggtcagacgggatgtggagaagtggggccccttcgatctggtgtacggcagcacccaacccctgggcagctcttgtgaccggtgccctggctggtacatgtttcagttccaccggatcctgcagtacgccctgccgagacaggagtcccagcggccattcttttggattttcatggacaacttgctgctgaccgaggatgaccaggaaactaccactcggttcctgcagaccgaagccgtgaccctgcaggacgtgagaggccgggactaccagaacgccatgcgggtgtggtccaacatccctggactgaaaagcaagcacgcacctctgacccctaaagaagaggagtacctgcaggcccaggtgcggagcagaagcaagctggacgcccctaaggtggatctgctggtgaagaattgcctcctgcccctgagagagtacttcaagtatttcagccagaatagtctgcccctgggaggcagcggcggcggcacccaggtgagcctgaccttcgacgacgtggccgtgaagctgacctgggaggagtggcagctgctggaccccgcccagaaggacctgtacagggacgtgatgctggagaactacagcaacctggtgagcgtgggctaccaggtgagcaagcccgacgccctgagcaggctggagaggggcgagcccccctggagcatcgaggacaagatccacaccaggaccttcagcggcgagaggccctacggcggcccaagcagcggcgcccctcctcccagcggcggcaggcggcccaagcagcggcgcccctcctcccagcggcggcagcccagccggctccccaacctctaccgaggagggcacctctgagtccgccacccccgagagcggccctggcacctccaccgagcccagcgagggcagcgcacccggcagccctgccggcagccccacctccacagaggagggaaccagcaccgagcccagcgaaggcagcgccccaggcaccagcaccgagcctagtgagcaggagattaaacggatcaacaagatcagaagaagacttgtgaaagacagcaacaccaagaaggccggcaagacaggccccatgaaaaccctgctggttagagtgatgacacccgatctgagagagcggctggaaaacctgagaaagaagcctgaaaatatcccccagcccatcagcaatacatctagagccaacctgaataagctgctgaccgattacaccgaaatgaagaaggcgatcctgcatgtgtactgggaagagttccagaaggaccctgtgggcctgatgagccgggtggcccagcctgccagcaagaagatcgatcagaacaagctgaaacctgagatggacgagaagggcaacctgaccaccgccggctttgcctgctctcagtgtggccagcccctgttcgtgtacaagctggagcaggtgtctgagaagggcaaggcttacaccaactacttcggacggtgcaatgtggccgagcacgaaaagctgatcctgctggcccagctgaagcccgagaaggatagcgacgaagccgtgacatatagcctgggaaagtttgggcagagggccctggatttctacagcattcatgtgaccaaggagtccacccaccccgtgaagcccctggcccagatcgccggaaacagatacgcctccggacctgtgggaaaggccctgagcgacgcatgtatgggcacaatcgcctccttcctgtctaagtaccaggacatcatcatcgaacaccagaaggtggtgaagggcaaccagaagagactggagagcctgcgggagctggccggcaaggaaaacctggaataccctagcgtgaccctgccacctcagcctcacaccaaggagggcgttgatgcctacaacgaagtgatcgcccgggtgcgaatgtgggtgaacctgaacctgtggcagaagctgaagctaagcagagatgatgccaagcctctgctgagactgaagggattcccttcctttcctctggtcgagagacaggccaacgaagtggactggtgggacatggtgtgtaacgtgaagaagctgatcaacgagaaaaaggaggatggcaaggtgttttggcagaatctggctggctacaagagacaggaagccctgagaccatacctgagcagcgaggaagatcggaagaagggaaagaaattcgctcggtaccagctgggcgacctgctgctgcacctggaaaagaagcacggcgaggactggggaaaggtgtacgacgaggcctgggagcggattgacaagaaagtggaaggcctgagcaagcacatcaagctggaagaggaacggagaagcgaggacgcccagagcaaggccgccctgaccgactggctgcgggctaaggccagcttcgtgatcgagggcctgaaggaggccgacaaggacgagttctgcagatgcgagctgaagctgcagaagtggtacggggacctgcggggaaagcccttcgccatcgaagccgagaacagcatcctggacatcagcggcttcagcaagcagtacaactgtgccttcatctggcagaaggacggcgtgaagaagctgaacctgtacctgatcatcaactacttcaagggcggcaagctgcggttcaagaagatcaaacctgaagccttcgaagccaacagattctacaccgtgatcaacaaaaagagcggcgagatcgtgcccatggaggtgaacttcaacttcgacgaccccaacctgatcatcctgcctctggcctttggcaagagacagggcagagaattcatctggaacgacctgctgtccctggaaaccggcagcctgaagctggccaacggaagagtgatcgagaagacactgtacaacagaagaacccggcaggatgagcctgccctgttcgtggccctgaccttcgagcggcgggaggtcctggactcctccaatatcaaaccaatgaacctgatcggcgtggcaagaggcgaaaacatccccgccgtgatcgccctgaccgaccccgagggctgcccactgagccggtttaaggatagcctgggaaacccaacccacatcctgagaatcggcgagagctataaggagaagcagcggaccatccaggccaagaaggaggtggagcagcggagagccggcggctacagccggaagtacgccagcaaagccaagaatctggcagacgatatggtgagaaacaccgctagagatctgctgtactacgccgtgacccaggatgccatgctgatcttcgccaacctgagccggggcttcggccggcagggcaagcggaccttcatggccgagagacagtacacacggatggaggactggctgaccgccaagctggcctacgagggcctgagcaagacctacctgtccaagacactggcccagtacacctccaagacatgcagcaactgtgggtttaccatcaccagcgccgactacgacagggtgctggagaagctgaagaagacagcaacaggctggatgaccacaattaacggcaaggagctgaaggtggagggccagattacctactacaacagatacaagagacagaacgtagtcaaggacctgtccgtcgagctggatagactgagcgaagaatctgtgaacaacgacatctcctcctggacaaagggcagaagcggagaagctctgagcctcctgaagaaaagattctcccatagacccgtgcaggagaagttcgtgtgcctgaactgcggcttcgagacacacgcagccgagcaagccgccctgaacatcgccagatcctggctgttcctgcggagccaggagtacaagaaataccagacaaacaagacaaccggcaacaccgataagagagccttcgtcgagacctggcagtccttttaccggaagaagcttaaggaggtgtggaaacctgccgtgcggtctggcggatctggcggaggctccaccagccccaagaaaaagagaaaagtctaagctgccttctgcggggcttgccttctggccatgcccttcttctctcccttgcacctgtacctcttggtctttgaataaagcctgagtaggaaggctagcaaaaaaaaaaaaaaaaaaaaaaaaaaaaaaaaaaaaaaaaaaaaaaaaaaaaaaaaaaaaaaaaaaaaaaaaaaaaaaaagcccagccggctccccaacctctaccgaggagggcacctctgagtccgccacccccgagagcggccctggcacctccaccgagcccagcgagggcagcgcacccggcagccctgccggcagccccacctccacagaggagggaaccagcaccgagcccagcgaaggcagcgccccaggcaccagcaccgagcctagtgagcaggagattaaacggatcaacaagatcagaagaagacttgtgaaagacagcaacaccaagaaggccggcaagacaggccccatgaaaaccctgctggttagagtgatgacacccgatctgagagagcggctggaaaacctgagaaagaagcctgaaaatatcccccagcccatcagcaatacatctagagccaacctgaataagctgctgaccgattacaccgaaatgaagaaggcgatcctgcatgtgtactgggaagagttccagaaggaccctgtgggcctgatgagccgggtggcccagcctgccagcaagaagatcgatcagaacaagctgaaacctgagatggacgagaagggcaacctgaccaccgccggctttgcctgctctcagtgtggccagcccctgttcgtgtacaagctggagcaggtgtctgagaagggcaaggcttacaccaactacttcggacggtgcaatgtggccgagcacgaaaagctgatcctgctggcccagctgaagcccgagaaggatagcgacgaagccgtgacatatagcctgggaaagtttgggcagagggccctggatttctacagcattcatgtgaccaaggagtccacccaccccgtgaagcccctggcccagatcgccggaaacagatacgcctccggacctgtgggaaaggccctgagcgacgcatgtatgggcacaatcgcctccttcctgtctaagtaccaggacatcatcatcgaacaccagaaggtggtgaagggcaaccagaagagactggagagcctgcgggagctggccggcaaggaaaacctggaataccctagcgtgaccctgccacctcagcctcacaccaaggagggcgttgatgcctacaacgaagtgatcgcccgggtgcgaatgtgggtgaacctgaacctgtggcagaagctgaagctaagcagagatgatgccaagcctctgctgagactgaagggattcccttcctttcctctggtcgagagacaggccaacgaagtggactggtgggacatggtgtgtaacgtgaagaagctgatcaacgagaaaaaggaggatggcaaggtgttttggcagaatctggctggctacaagagacaggaagccctgagaccatacctgagcagcgaggaagatcggaagaagggaaagaaattcgctcggtaccagctgggcgacctgctgctgcacctggaaaagaagcacggcgaggactggggaaaggtgtacgacgaggcctgggagcggattgacaagaaagtggaaggcctgagcaagcacatcaagctggaagaggaacggagaagcgaggacgcccagagcaaggccgccctgaccgactggctgcgggctaaggccagcttcgtgatcgagggcctgaaggaggccgacaaggacgagttctgcagatgcgagctgaagctgcagaagtggtacggggacctgcggggaaagcccttcgccatcgaagccgagaacagcatcctggacatcagcggcttcagcaagcagtacaactgtgccttcatctggcagaaggacggcgtgaagaagctgaacctgtacctgatcatcaactacttcaagggcggcaagctgcggttcaagaagatcaaacctgaagccttcgaagccaacagattctacaccgtgatcaacaaaaagagcggcgagatcgtgcccatggaggtgaacttcaacttcgacgaccccaacctgatcatcctgcctctggcctttggcaagagacagggcagagaattcatctggaacgacctgctgtccctggaaaccggcagcctgaagctggccaacggaagagtgatcgagaagacactgtacaacagaagaacccggcaggatgagcctgccctgttcgtggccctgaccttcgagcggcgggaggtcctggactcctccaatatcaaaccaatgaacctgatcggcgtggcaagaggcgaaaacatccccgccgtgatcgccctgaccgaccccgagggctgcccactgagccggtttaaggatagcctgggaaacccaacccacatcctgagaatcggcgagagctataaggagaagcagcggaccatccaggccaagaaggaggtggagcagcggagagccggcggctacagccggaagtacgccagcaaagccaagaatctggcagacgatatggtgagaaacaccgctagagatctgctgtactacgccgtgacccaggatgccatgctgatcttcgccaacctgagccggggcttcggccggcagggcaagcggaccttcatggccgagagacagtacacacggatggaggactggctgaccgccaagctggcctacgagggcctgagcaagacctacctgtccaagacactggcccagtacacctccaagacatgcagcaactgtgggtttaccatcaccagcgccgactacgacagggtgctggagaagctgaagaagacagcaacaggctggatgaccacaattaacggcaaggagctgaaggtggagggccagattacctactacaacagatacaagagacagaacgtagtcaaggacctgtccgtcgagctggatagactgagcgaagaatctgtgaacaacgacatctcctcctggacaaagggcagaagcggagaagctctgagcctcctgaagaaaagattctcccatagacccgtgcaggagaagttcgtgtgcctgaactgcggcttcgagacacacgcagccgagcaagccgccctgaacatcgccagatcctggctgttcctgcggagccaggagtacaagaaataccagacaaacaagacaaccggcaacaccgataagagagccttcgtcgagacctggcagtccttttaccggaagaagcttaaggaggtgtggaaacctgccgtgcggtctggcggatctggcggaggctccaccagccccaagaaaaagagaaaagtctaagctgccttctgcggggcttgccttctggccatgcccttcttctctcccttgcacctgtacctcttggtctttgaataaagcctgagtaggaaggctagcaaaaaaaaaaaaaaaaaaaaaaaaaaaaaaaaaaaaaaaaaaaaaaaaaaaaaaaaaaaaaaaaaaaaaaaaaaaaaaaa

SEQ ID NO: 10409 - RNA, 8787 nt, synthetic construct
  source 1..8787: mol_type = other RNA
aggaaataagagagaaaagaagagtaagaagaaatataagagccaccatggcccctaagaagaagcgtaaagtgagccggatgaaccacgaccaggagttcgacccccctaaggtgtaccctcccgtccccgccgagaagagaaagcccatccgggtcctgagcctgttcgatggcatcgccaccggtctgctggtgctgaaggacctgggcatccaggtggataggtacattgcctccgaggtgtgcgaggactccatcaccgtgggaatggtgcgtcatcagggcaagatcatgtacgtgggcgacgtgcggagcgtgacacagaagcatatccaggagtggggccctttcgacctggtgatcggcggcagcccttgcaatgacctgagcatcgtgaacccagcccggaagggcctgtacgagggaaccggcagactgttcttcgagttttacagactgctgcacgacgcccggcctaaggaaggcgacgaccggcccttcttttggctgttcgagaatgtggtggccatgggagtcagcgacaagcgggatattagccggttcctggagagcaaccccgtgatgatcgatgccaaggaagtgagcgccgcccaccgggccagatacttctggggcaatctgcctggcatgaacagacccctggccagcaccgtgaacgacaagctggagctgcaggagtgcctggagcacggccggatcgccaagttcagcaaggtgagaaccatcaccacccgaagcaacagcatcaaacaaggcaaggaccagcactttcctgtgttcatgaacgagaaggaggacatcctgtggtgtaccgagatggagagagtgttcgggttcccagtccactacacagatgtcagcaacatgtctagactggccagacagagactgctgggaagaagctggtccgtccctgtgatcagacacctgttcgcccctctgaaggagtacttcgcctgcgtgagcagcggcaacagcaacgccaacagccggggccccagcttctctagcggcctggtgccactgtccctgagagggagccacatgggccccatggagatctacaaaaccgtgagcgcctggaagcggcagcctgtgcgcgtgctgagcctgtttcggaatatcgataaagtcctgaaaagcctgggattcctggagagcggctctggctccggcggtggcaccctgaagtacgtggaggatgtgacaaacgtggtcagacgggatgtggagaagtggggccccttcgatctggtgtacggcagcacccaacccctgggcagctcttgtgaccggtgccctggctggtacatgtttcagttccaccggatcctgcagtacgccctgccgagacaggagtcccagcggccattcttttggattttcatggacaacttgctgctgaccgaggatgaccaggaaactaccactcggttcctgcagaccgaagccgtgaccctgcaggacgtgagaggccgggactaccagaacgccatgcgggtgtggtccaacatccctggactgaaaagcaagcacgcacctctgacccctaaagaagaggagtacctgcaggcccaggtgcggagcagaagcaagctggacgcccctaaggtggatctgctggtgaagaattgcctcctgcccctgagagagtacttcaagtatttcagccagaatagtctgcccctgggaggcagcggcggcggcatggccgccgccgccctggtgaacaccccccagggccacgtgaccttcgaggacatcgccgtgtacttcagccaggaggagtggggcctgctggacgaggcccagaggtgcctgtaccacgacgtgatgctggagaacttcagcctgatggccagcgtgggctgcctgcacggcatcgaggccgaggaggcccccagcgagcagaccgtgagcgcccagggcgccagccaggccaggacccccggcggcccaagcagcggcgcccctcctcccagcggcggcaggcggcccaagcagcggcgcccctcctcccagcggcggcagcccagccggctccccaacctctaccgaggagggcacctctgagtccgccacccccgagagcggccctggcacctccaccgagcccagcgagggcagcgcacccggcagccctgccggcagccccacctccacagaggagggaaccagcaccgagcccagcgaaggcagcgccccaggcaccagcaccgagcctagtgagcaggagattaaacggatcaacaagatcagaagaagacttgtgaaagacagcaacaccaagaaggccggcaagacaggccccatgaaaaccctgctggttagagtgatgacacccgatctgagagagcggctggaaaacctgagaaagaagcctgaaaatatcccccagcccatcagcaatacatctagagccaacctgaataagctgctgaccgattacaccgaaatgaagaaggcgatcctgcatgtgtactgggaagagttccagaaggaccctgtgggcctgatgagccgggtggcccagcctgccagcaagaagatcgatcagaacaagctgaaacctgagatggacgagaagggcaacctgaccaccgccggctttgcctgctctcagtgtggccagcccctgttcgtgtacaagctggagcaggtgtctgagaagggcaaggcttacaccaactacttcggacggtgcaatgtggccgagcacgaaaagctgatcctgctggcccagctgaagcccgagaaggatagcgacgaagccgtgacatatagcctgggaaagtttgggcagagggccctggatttctacagcattcatgtgaccaaggagtccacccaccccgtgaagcccctggcccagatcgccggaaacagatacgcctccggacctgtgggaaaggccctgagcgacgcatgtatgggcacaatcgcctccttcctgtctaagtaccaggacatcatcatcgaacaccagaaggtggtgaagggcaaccagaagagactggagagcctgcgggagctggccggcaaggaaaacctggaataccctagcgtgaccctgccacctcagcctcacaccaaggagggcgttgatgcctacaacgaagtgatcgcccgggtgcgaatgtgggtgaacctgaacctgtggcagaagctgaagctaagcagagatgatgccaagcctctgctgagactgaagggattcccttcctttcctctggtcgagagacaggccaacgaagtggactggtgggacatggtgtgtaacgtgaagaagctgatcaacgagaaaaaggaggatggcaaggtgttttggcagaatctggctggctacaagagacaggaagccctgagaccatacctgagcagcgaggaagatcggaagaagggaaagaaattcgctcggtaccagctgggcgacctgctgctgcacctggaaaagaagcacggcgaggactggggaaaggtgtacgacgaggcctgggagcggattgacaagaaagtggaaggcctgagcaagcacatcaagctggaagaggaacggagaagcgaggacgcccagagcaaggccgccctgaccgactggctgcgggctaaggccagcttcgtgatcgagggcctgaaggaggccgacaaggacgagttctgcagatgcgagctgaagctgcagaagtggtacggggacctgcggggaaagcccttcgccatcgaagccgagaacagcatcctggacatcagcggcttcagcaagcagtacaactgtgccttcatctggcagaaggacggcgtgaagaagctgaacctgtacctgatcatcaactacttcaagggcggcaagctgcggttcaagaagatcaaacctgaagccttcgaagccaacagattctacaccgtgatcaacaaaaagagcggcgagatcgtgcccatggaggtgaacttcaacttcgacgaccccaacctgatcatcctgcctctggcctttggcaagagacagggcagagaattcatctggaacgacctgctgtccctggaaaccggcagcctgaagctggccaacggaagagtgatcgagaagacactgtacaacagaagaacccggcaggatgagcctgccctgttcgtggccctgaccttcgagcggcgggaggtcctggactcctccaatatcaaaccaatgaacctgatcggcgtggcaagaggcgaaaacatccccgccgtgatcgccctgaccgaccccgagggctgcccactgagccggtttaaggatagcctgggaaacccaacccacatcctgagaatcggcgagagctataaggagaagcagcggaccatccaggccaagaaggaggtggagcagcggagagccggcggctacagccggaagtacgccagcaaagccaagaatctggcagacgatatggtgagaaacaccgctagagatctgctgtactacgccgtgacccaggatgccatgctgatcttcgccaacctgagccggggcttcggccggcagggcaagcggaccttcatggccgagagacagtacacacggatggaggactggctgaccgccaagctggcctacgagggcctgagcaagacctacctgtccaagacactggcccagtacacctccaagacatgcagcaactgtgggtttaccatcaccagcgccgactacgacagggtgctggagaagctgaagaagacagcaacaggctggatgaccacaattaacggcaaggagctgaaggtggagggccagattacctactacaacagatacaagagacagaacgtagtcaaggacctgtccgtcgagctggatagactgagcgaagaatctgtgaacaacgacatctcctcctggacaaagggcagaagcggagaagctctgagcctcctgaagaaaagattctcccatagacccgtgcaggagaagttcgtgtgcctgaactgcggcttcgagacacacgcagccgagcaagccgccctgaacatcgccagatcctggctgttcctgcggagccaggagtacaagaaataccagacaaacaagacaaccggcaacaccgataagagagccttcgtcgagacctggcagtccttttaccggaagaagcttaaggaggtgtggaaacctgccgtgcggtctggcggatctggcggaggctccaccagccccaagaaaaagagaaaagtctaagctgccttctgcggggcttgccttctggccatgcccttcttctctcccttgcacctgtacctcttggtctttgaataaagcctgagtaggaaggctagcaaaaaaaaaaaaaaaaaaaaaaaaaaaaaaaaaaaaaaaaaaaaaaaaaaaaaaaaaaaaaaaaaaaaaaaaaaaaaaaagcccagccggctccccaacctctaccgaggagggcacctctgagtccgccacccccgagagcggccctggcacctccaccgagcccagcgagggcagcgcacccggcagccctgccggcagccccacctccacagaggagggaaccagcaccgagcccagcgaaggcagcgccccaggcaccagcaccgagcctagtgagcaggagattaaacggatcaacaagatcagaagaagacttgtgaaagacagcaacaccaagaaggccggcaagacaggccccatgaaaaccctgctggttagagtgatgacacccgatctgagagagcggctggaaaacctgagaaagaagcctgaaaatatcccccagcccatcagcaatacatctagagccaacctgaataagctgctgaccgattacaccgaaatgaagaaggcgatcctgcatgtgtactgggaagagttccagaaggaccctgtgggcctgatgagccgggtggcccagcctgccagcaagaagatcgatcagaacaagctgaaacctgagatggacgagaagggcaacctgaccaccgccggctttgcctgctctcagtgtggccagcccctgttcgtgtacaagctggagcaggtgtctgagaagggcaaggcttacaccaactacttcggacggtgcaatgtggccgagcacgaaaagctgatcctgctggcccagctgaagcccgagaaggatagcgacgaagccgtgacatatagcctgggaaagtttgggcagagggccctggatttctacagcattcatgtgaccaaggagtccacccaccccgtgaagcccctggcccagatcgccggaaacagatacgcctccggacctgtgggaaaggccctgagcgacgcatgtatgggcacaatcgcctccttcctgtctaagtaccaggacatcatcatcgaacaccagaaggtggtgaagggcaaccagaagagactggagagcctgcgggagctggccggcaaggaaaacctggaataccctagcgtgaccctgccacctcagcctcacaccaaggagggcgttgatgcctacaacgaagtgatcgcccgggtgcgaatgtgggtgaacctgaacctgtggcagaagctgaagctaagcagagatgatgccaagcctctgctgagactgaagggattcccttcctttcctctggtcgagagacaggccaacgaagtggactggtgggacatggtgtgtaacgtgaagaagctgatcaacgagaaaaaggaggatggcaaggtgttttggcagaatctggctggctacaagagacaggaagccctgagaccatacctgagcagcgaggaagatcggaagaagggaaagaaattcgctcggtaccagctgggcgacctgctgctgcacctggaaaagaagcacggcgaggactggggaaaggtgtacgacgaggcctgggagcggattgacaagaaagtggaaggcctgagcaagcacatcaagctggaagaggaacggagaagcgaggacgcccagagcaaggccgccctgaccgactggctgcgggctaaggccagcttcgtgatcgagggcctgaaggaggccgacaaggacgagttctgcagatgcgagctgaagctgcagaagtggtacggggacctgcggggaaagcccttcgccatcgaagccgagaacagcatcctggacatcagcggcttcagcaagcagtacaactgtgccttcatctggcagaaggacggcgtgaagaagctgaacctgtacctgatcatcaactacttcaagggcggcaagctgcggttcaagaagatcaaacctgaagccttcgaagccaacagattctacaccgtgatcaacaaaaagagcggcgagatcgtgcccatggaggtgaacttcaacttcgacgaccccaacctgatcatcctgcctctggcctttggcaagagacagggcagagaattcatctggaacgacctgctgtccctggaaaccggcagcctgaagctggccaacggaagagtgatcgagaagacactgtacaacagaagaacccggcaggatgagcctgccctgttcgtggccctgaccttcgagcggcgggaggtcctggactcctccaatatcaaaccaatgaacctgatcggcgtggcaagaggcgaaaacatccccgccgtgatcgccctgaccgaccccgagggctgcccactgagccggtttaaggatagcctgggaaacccaacccacatcctgagaatcggcgagagctataaggagaagcagcggaccatccaggccaagaaggaggtggagcagcggagagccggcggctacagccggaagtacgccagcaaagccaagaatctggcagacgatatggtgagaaacaccgctagagatctgctgtactacgccgtgacccaggatgccatgctgatcttcgccaacctgagccggggcttcggccggcagggcaagcggaccttcatggccgagagacagtacacacggatggaggactggctgaccgccaagctggcctacgagggcctgagcaagacctacctgtccaagacactggcccagtacacctccaagacatgcagcaactgtgggtttaccatcaccagcgccgactacgacagggtgctggagaagctgaagaagacagcaacaggctggatgaccacaattaacggcaaggagctgaaggtggagggccagattacctactacaacagatacaagagacagaacgtagtcaaggacctgtccgtcgagctggatagactgagcgaagaatctgtgaacaacgacatctcctcctggacaaagggcagaagcggagaagctctgagcctcctgaagaaaagattctcccatagacccgtgcaggagaagttcgtgtgcctgaactgcggcttcgagacacacgcagccgagcaagccgccctgaacatcgccagatcctggctgttcctgcggagccaggagtacaagaaataccagacaaacaagacaaccggcaacaccgataagagagccttcgtcgagacctggcagtccttttaccggaagaagcttaaggaggtgtggaaacctgccgtgcggtctggcggatctggcggaggctccaccagccccaagaaaaagagaaaagtctaagctgccttctgcggggcttgccttctggccatgcccttcttctctcccttgcacctgtacctcttggtctttgaataaagcctgagtaggaaggctagcaaaaaaaaaaaaaaaaaaaaaaaaaaaaaaaaaaaaaaaaaaaaaaaaaaaaaaaaaaaaaaaaaaaaaaaaaaaaaaaa

SEQ ID NO: 10410 - RNA, 8787 nt, synthetic construct
  source 1..8787: mol_type = other RNA
aggaaataagagagaaaagaagagtaagaagaaatataagagccaccatggcccctaagaagaagcgtaaagtgagccggatgaaccacgaccaggagttcgacccccctaaggtgtaccctcccgtccccgccgagaagagaaagcccatccgggtcctgagcctgttcgatggcatcgccaccggtctgctggtgctgaaggacctgggcatccaggtggataggtacattgcctccgaggtgtgcgaggactccatcaccgtgggaatggtgcgtcatcagggcaagatcatgtacgtgggcgacgtgcggagcgtgacacagaagcatatccaggagtggggccctttcgacctggtgatcggcggcagcccttgcaatgacctgagcatcgtgaacccagcccggaagggcctgtacgagggaaccggcagactgttcttcgagttttacagactgctgcacgacgcccggcctaaggaaggcgacgaccggcccttcttttggctgttcgagaatgtggtggccatgggagtcagcgacaagcgggatattagccggttcctggagagcaaccccgtgatgatcgatgccaaggaagtgagcgccgcccaccgggccagatacttctggggcaatctgcctggcatgaacagacccctggccagcaccgtgaacgacaagctggagctgcaggagtgcctggagcacggccggatcgccaagttcagcaaggtgagaaccatcaccacccgaagcaacagcatcaaacaaggcaaggaccagcactttcctgtgttcatgaacgagaaggaggacatcctgtggtgtaccgagatggagagagtgttcgggttcccagtccactacacagatgtcagcaacatgtctagactggccagacagagactgctgggaagaagctggtccgtccctgtgatcagacacctgttcgcccctctgaaggagtacttcgcctgcgtgagcagcggcaacagcaacgccaacagccggggccccagcttctctagcggcctggtgccactgtccctgagagggagccacatgggccccatggagatctacaaaaccgtgagcgcctggaagcggcagcctgtgcgcgtgctgagcctgtttcggaatatcgataaagtcctgaaaagcctgggattcctggagagcggctctggctccggcggtggcaccctgaagtacgtggaggatgtgacaaacgtggtcagacgggatgtggagaagtggggccccttcgatctggtgtacggcagcacccaacccctgggcagctcttgtgaccggtgccctggctggtacatgtttcagttccaccggatcctgcagtacgccctgccgagacaggagtcccagcggccattcttttggattttcatggacaacttgctgctgaccgaggatgaccaggaaactaccactcggttcctgcagaccgaagccgtgaccctgcaggacgtgagaggccgggactaccagaacgccatgcgggtgtggtccaacatccctggactgaaaagcaagcacgcacctctgacccctaaagaagaggagtacctgcaggcccaggtgcggagcagaagcaagctggacgcccctaaggtggatctgctggtgaagaattgcctcctgcccctgagagagtacttcaagtatttcagccagaatagtctgcccctgggaggcagcggcggcggcatggagctgctgaccttcaaggacgtggccatcgagttcagccccgaggagtggaagtgcctggacaccagccagcagaacctgtacagggacgtgatgctggagaactacaggaacctggtgagcctgggcgtgaccatcagcaaccccgacctggtgacctgcctggagcagaggaaggagccctacaacctgaagatccacgagaccgccgccaggccccccggccactacaggaagaggggcggcccaagcagcggcgcccctcctcccagcggcggcaggcggcccaagcagcggcgcccctcctcccagcggcggcagcccagccggctccccaacctctaccgaggagggcacctctgagtccgccacccccgagagcggccctggcacctccaccgagcccagcgagggcagcgcacccggcagccctgccggcagccccacctccacagaggagggaaccagcaccgagcccagcgaaggcagcgccccaggcaccagcaccgagcctagtgagcaggagattaaacggatcaacaagatcagaagaagacttgtgaaagacagcaacaccaagaaggccggcaagacaggccccatgaaaaccctgctggttagagtgatgacacccgatctgagagagcggctggaaaacctgagaaagaagcctgaaaatatcccccagcccatcagcaatacatctagagccaacctgaataagctgctgaccgattacaccgaaatgaagaaggcgatcctgcatgtgtactgggaagagttccagaaggaccctgtgggcctgatgagccgggtggcccagcctgccagcaagaagatcgatcagaacaagctgaaacctgagatggacgagaagggcaacctgaccaccgccggctttgcctgctctcagtgtggccagcccctgttcgtgtacaagctggagcaggtgtctgagaagggcaaggcttacaccaactacttcggacggtgcaatgtggccgagcacgaaaagctgatcctgctggcccagctgaagcccgagaaggatagcgacgaagccgtgacatatagcctgggaaagtttgggcagagggccctggatttctacagcattcatgtgaccaaggagtccacccaccccgtgaagcccctggcccagatcgccggaaacagatacgcctccggacctgtgggaaaggccctgagcgacgcatgtatgggcacaatcgcctccttcctgtctaagtaccaggacatcatcatcgaacaccagaaggtggtgaagggcaaccagaagagactggagagcctgcgggagctggccggcaaggaaaacctggaataccctagcgtgaccctgccacctcagcctcacaccaaggagggcgttgatgcctacaacgaagtgatcgcccgggtgcgaatgtgggtgaacctgaacctgtggcagaagctgaagctaagcagagatgatgccaagcctctgctgagactgaagggattcccttcctttcctctggtcgagagacaggccaacgaagtggactggtgggacatggtgtgtaacgtgaagaagctgatcaacgagaaaaaggaggatggcaaggtgttttggcagaatctggctggctacaagagacaggaagccctgagaccatacctgagcagcgaggaagatcggaagaagggaaagaaattcgctcggtaccagctgggcgacctgctgctgcacctggaaaagaagcacggcgaggactggggaaaggtgtacgacgaggcctgggagcggattgacaagaaagtggaaggcctgagcaagcacatcaagctggaagaggaacggagaagcgaggacgcccagagcaaggccgccctgaccgactggctgcgggctaaggccagcttcgtgatcgagggcctgaaggaggccgacaaggacgagttctgcagatgcgagctgaagctgcagaagtggtacggggacctgcggggaaagcccttcgccatcgaagccgagaacagcatcctggacatcagcggcttcagcaagcagtacaactgtgccttcatctggcagaaggacggcgtgaagaagctgaacctgtacctgatcatcaactacttcaagggcggcaagctgcggttcaagaagatcaaacctgaagccttcgaagccaacagattctacaccgtgatcaacaaaaagagcggcgagatcgtgcccatggaggtgaacttcaacttcgacgaccccaacctgatcatcctgcctctggcctttggcaagagacagggcagagaattcatctggaacgacctgctgtccctggaaaccggcagcctgaagctggccaacggaagagtgatcgagaagacactgtacaacagaagaacccggcaggatgagcctgccctgttcgtggccctgaccttcgagcggcgggaggtcctggactcctccaatatcaaaccaatgaacctgatcggcgtggcaagaggcgaaaacatccccgccgtgatcgccctgaccgaccccgagggctgcccactgagccggtttaaggatagcctgggaaacccaacccacatcctgagaatcggcgagagctataaggagaagcagcggaccatccaggccaagaaggaggtggagcagcggagagccggcggctacagccggaagtacgccagcaaagccaagaatctggcagacgatatggtgagaaacaccgctagagatctgctgtactacgccgtgacccaggatgccatgctgatcttcgccaacctgagccggggcttcggccggcagggcaagcggaccttcatggccgagagacagtacacacggatggaggactggctgaccgccaagctggcctacgagggcctgagcaagacctacctgtccaagacactggcccagtacacctccaagacatgcagcaactgtgggtttaccatcaccagcgccgactacgacagggtgctggagaagctgaagaagacagcaacaggctggatgaccacaattaacggcaaggagctgaaggtggagggccagattacctactacaacagatacaagagacagaacgtagtcaaggacctgtccgtcgagctggatagactgagcgaagaatctgtgaacaacgacatctcctcctggacaaagggcagaagcggagaagctctgagcctcctgaagaaaagattctcccatagacccgtgcaggagaagttcgtgtgcctgaactgcggcttcgagacacacgcagccgagcaagccgccctgaacatcgccagatcctggctgttcctgcggagccaggagtacaagaaataccagacaaacaagacaaccggcaacaccgataagagagccttcgtcgagacctggcagtccttttaccggaagaagcttaaggaggtgtggaaacctgccgtgcggtctggcggatctggcggaggctccaccagccccaagaaaaagagaaaagtctaagctgccttctgcggggcttgccttctggccatgcccttcttctctcccttgcacctgtacctcttggtctttgaataaagcctgagtaggaaggctagcaaaaaaaaaaaaaaaaaaaaaaaaaaaaaaaaaaaaaaaaaaaaaaaaaaaaaaaaaaaaaaaaaaaaaaaaaaaaaaaagcccagccggctccccaacctctaccgaggagggcacctctgagtccgccacccccgagagcggccctggcacctccaccgagcccagcgagggcagcgcacccggcagccctgccggcagccccacctccacagaggagggaaccagcaccgagcccagcgaaggcagcgccccaggcaccagcaccgagcctagtgagcaggagattaaacggatcaacaagatcagaagaagacttgtgaaagacagcaacaccaagaaggccggcaagacaggccccatgaaaaccctgctggttagagtgatgacacccgatctgagagagcggctggaaaacctgagaaagaagcctgaaaatatcccccagcccatcagcaatacatctagagccaacctgaataagctgctgaccgattacaccgaaatgaagaaggcgatcctgcatgtgtactgggaagagttccagaaggaccctgtgggcctgatgagccgggtggcccagcctgccagcaagaagatcgatcagaacaagctgaaacctgagatggacgagaagggcaacctgaccaccgccggctttgcctgctctcagtgtggccagcccctgttcgtgtacaagctggagcaggtgtctgagaagggcaaggcttacaccaactacttcggacggtgcaatgtggccgagcacgaaaagctgatcctgctggcccagctgaagcccgagaaggatagcgacgaagccgtgacatatagcctgggaaagtttgggcagagggccctggatttctacagcattcatgtgaccaaggagtccacccaccccgtgaagcccctggcccagatcgccggaaacagatacgcctccggacctgtgggaaaggccctgagcgacgcatgtatgggcacaatcgcctccttcctgtctaagtaccaggacatcatcatcgaacaccagaaggtggtgaagggcaaccagaagagactggagagcctgcgggagctggccggcaaggaaaacctggaataccctagcgtgaccctgccacctcagcctcacaccaaggagggcgttgatgcctacaacgaagtgatcgcccgggtgcgaatgtgggtgaacctgaacctgtggcagaagctgaagctaagcagagatgatgccaagcctctgctgagactgaagggattcccttcctttcctctggtcgagagacaggccaacgaagtggactggtgggacatggtgtgtaacgtgaagaagctgatcaacgagaaaaaggaggatggcaaggtgttttggcagaatctggctggctacaagagacaggaagccctgagaccatacctgagcagcgaggaagatcggaagaagggaaagaaattcgctcggtaccagctgggcgacctgctgctgcacctggaaaagaagcacggcgaggactggggaaaggtgtacgacgaggcctgggagcggattgacaagaaagtggaaggcctgagcaagcacatcaagctggaagaggaacggagaagcgaggacgcccagagcaaggccgccctgaccgactggctgcgggctaaggccagcttcgtgatcgagggcctgaaggaggccgacaaggacgagttctgcagatgcgagctgaagctgcagaagtggtacggggacctgcggggaaagcccttcgccatcgaagccgagaacagcatcctggacatcagcggcttcagcaagcagtacaactgtgccttcatctggcagaaggacggcgtgaagaagctgaacctgtacctgatcatcaactacttcaagggcggcaagctgcggttcaagaagatcaaacctgaagccttcgaagccaacagattctacaccgtgatcaacaaaaagagcggcgagatcgtgcccatggaggtgaacttcaacttcgacgaccccaacctgatcatcctgcctctggcctttggcaagagacagggcagagaattcatctggaacgacctgctgtccctggaaaccggcagcctgaagctggccaacggaagagtgatcgagaagacactgtacaacagaagaacccggcaggatgagcctgccctgttcgtggccctgaccttcgagcggcgggaggtcctggactcctccaatatcaaaccaatgaacctgatcggcgtggcaagaggcgaaaacatccccgccgtgatcgccctgaccgaccccgagggctgcccactgagccggtttaaggatagcctgggaaacccaacccacatcctgagaatcggcgagagctataaggagaagcagcggaccatccaggccaagaaggaggtggagcagcggagagccggcggctacagccggaagtacgccagcaaagccaagaatctggcagacgatatggtgagaaacaccgctagagatctgctgtactacgccgtgacccaggatgccatgctgatcttcgccaacctgagccggggcttcggccggcagggcaagcggaccttcatggccgagagacagtacacacggatggaggactggctgaccgccaagctggcctacgagggcctgagcaagacctacctgtccaagacactggcccagtacacctccaagacatgcagcaactgtgggtttaccatcaccagcgccgactacgacagggtgctggagaagctgaagaagacagcaacaggctggatgaccacaattaacggcaaggagctgaaggtggagggccagattacctactacaacagatacaagagacagaacgtagtcaaggacctgtccgtcgagctggatagactgagcgaagaatctgtgaacaacgacatctcctcctggacaaagggcagaagcggagaagctctgagcctcctgaagaaaagattctcccatagacccgtgcaggagaagttcgtgtgcctgaactgcggcttcgagacacacgcagccgagcaagccgccctgaacatcgccagatcctggctgttcctgcggagccaggagtacaagaaataccagacaaacaagacaaccggcaacaccgataagagagccttcgtcgagacctggcagtccttttaccggaagaagcttaaggaggtgtggaaacctgccgtgcggtctggcggatctggcggaggctccaccagccccaagaaaaagagaaaagtctaagctgccttctgcggggcttgccttctggccatgcccttcttctctcccttgcacctgtacctcttggtctttgaataaagcctgagtaggaaggctagcaaaaaaaaaaaaaaaaaaaaaaaaaaaaaaaaaaaaaaaaaaaaaaaaaaaaaaaaaaaaaaaaaaaaaaaaaaaaaaaa

SEQ ID NO: 10411 - RNA, 8787 nt, synthetic construct
  source 1..8787: mol_type = other RNA
aggaaataagagagaaaagaagagtaagaagaaatataagagccaccatggcccctaagaagaagcgtaaagtgagccggatgaaccacgaccaggagttcgacccccctaaggtgtaccctcccgtccccgccgagaagagaaagcccatccgggtcctgagcctgttcgatggcatcgccaccggtctgctggtgctgaaggacctgggcatccaggtggataggtacattgcctccgaggtgtgcgaggactccatcaccgtgggaatggtgcgtcatcagggcaagatcatgtacgtgggcgacgtgcggagcgtgacacagaagcatatccaggagtggggccctttcgacctggtgatcggcggcagcccttgcaatgacctgagcatcgtgaacccagcccggaagggcctgtacgagggaaccggcagactgttcttcgagttttacagactgctgcacgacgcccggcctaaggaaggcgacgaccggcccttcttttggctgttcgagaatgtggtggccatgggagtcagcgacaagcgggatattagccggttcctggagagcaaccccgtgatgatcgatgccaaggaagtgagcgccgcccaccgggccagatacttctggggcaatctgcctggcatgaacagacccctggccagcaccgtgaacgacaagctggagctgcaggagtgcctggagcacggccggatcgccaagttcagcaaggtgagaaccatcaccacccgaagcaacagcatcaaacaaggcaaggaccagcactttcctgtgttcatgaacgagaaggaggacatcctgtggtgtaccgagatggagagagtgttcgggttcccagtccactacacagatgtcagcaacatgtctagactggccagacagagactgctgggaagaagctggtccgtccctgtgatcagacacctgttcgcccctctgaaggagtacttcgcctgcgtgagcagcggcaacagcaacgccaacagccggggccccagcttctctagcggcctggtgccactgtccctgagagggagccacatgggccccatggagatctacaaaaccgtgagcgcctggaagcggcagcctgtgcgcgtgctgagcctgtttcggaatatcgataaagtcctgaaaagcctgggattcctggagagcggctctggctccggcggtggcaccctgaagtacgtggaggatgtgacaaacgtggtcagacgggatgtggagaagtggggccccttcgatctggtgtacggcagcacccaacccctgggcagctcttgtgaccggtgccctggctggtacatgtttcagttccaccggatcctgcagtacgccctgccgagacaggagtcccagcggccattcttttggattttcatggacaacttgctgctgaccgaggatgaccaggaaactaccactcggttcctgcagaccgaagccgtgaccctgcaggacgtgagaggccgggactaccagaacgccatgcgggtgtggtccaacatccctggactgaaaagcaagcacgcacctctgacccctaaagaagaggagtacctgcaggcccaggtgcggagcagaagcaagctggacgcccctaaggtggatctgctggtgaagaattgcctcctgcccctgagagagtacttcaagtatttcagccagaatagtctgcccctgggaggcagcggcggcggcagccagggcagcgtgaccttcagggacgtggccatcgacttcagccaggaggagtggaagtggctgcagcccgcccagagggacctgtacaggtgcgtgatgctggagaactacggccacctggtgagcctgggcctgagcatcagcaagcccgacgtggtgagcctgctggagcagggcaaggagccctggctgggcaagaggaacgtgaacagggacctgttcagcgtgagcgagagcagcggcggcccaagcagcggcgcccctcctcccagcggcggcaggcggcccaagcagcggcgcccctcctcccagcggcggcagcccagccggctccccaacctctaccgaggagggcacctctgagtccgccacccccgagagcggccctggcacctccaccgagcccagcgagggcagcgcacccggcagccctgccggcagccccacctccacagaggagggaaccagcaccgagcccagcgaaggcagcgccccaggcaccagcaccgagcctagtgagcaggagattaaacggatcaacaagatcagaagaagacttgtgaaagacagcaacaccaagaaggccggcaagacaggccccatgaaaaccctgctggttagagtgatgacacccgatctgagagagcggctggaaaacctgagaaagaagcctgaaaatatcccccagcccatcagcaatacatctagagccaacctgaataagctgctgaccgattacaccgaaatgaagaaggcgatcctgcatgtgtactgggaagagttccagaaggaccctgtgggcctgatgagccgggtggcccagcctgccagcaagaagatcgatcagaacaagctgaaacctgagatggacgagaagggcaacctgaccaccgccggctttgcctgctctcagtgtggccagcccctgttcgtgtacaagctggagcaggtgtctgagaagggcaaggcttacaccaactacttcggacggtgcaatgtggccgagcacgaaaagctgatcctgctggcccagctgaagcccgagaaggatagcgacgaagccgtgacatatagcctgggaaagtttgggcagagggccctggatttctacagcattcatgtgaccaaggagtccacccaccccgtgaagcccctggcccagatcgccggaaacagatacgcctccggacctgtgggaaaggccctgagcgacgcatgtatgggcacaatcgcctccttcctgtctaagtaccaggacatcatcatcgaacaccagaaggtggtgaagggcaaccagaagagactggagagcctgcgggagctggccggcaaggaaaacctggaataccctagcgtgaccctgccacctcagcctcacaccaaggagggcgttgatgcctacaacgaagtgatcgcccgggtgcgaatgtgggtgaacctgaacctgtggcagaagctgaagctaagcagagatgatgccaagcctctgctgagactgaagggattcccttcctttcctctggtcgagagacaggccaacgaagtggactggtgggacatggtgtgtaacgtgaagaagctgatcaacgagaaaaaggaggatggcaaggtgttttggcagaatctggctggctacaagagacaggaagccctgagaccatacctgagcagcgaggaagatcggaagaagggaaagaaattcgctcggtaccagctgggcgacctgctgctgcacctggaaaagaagcacggcgaggactggggaaaggtgtacgacgaggcctgggagcggattgacaagaaagtggaaggcctgagcaagcacatcaagctggaagaggaacggagaagcgaggacgcccagagcaaggccgccctgaccgactggctgcgggctaaggccagcttcgtgatcgagggcctgaaggaggccgacaaggacgagttctgcagatgcgagctgaagctgcagaagtggtacggggacctgcggggaaagcccttcgccatcgaagccgagaacagcatcctggacatcagcggcttcagcaagcagtacaactgtgccttcatctggcagaaggacggcgtgaagaagctgaacctgtacctgatcatcaactacttcaagggcggcaagctgcggttcaagaagatcaaacctgaagccttcgaagccaacagattctacaccgtgatcaacaaaaagagcggcgagatcgtgcccatggaggtgaacttcaacttcgacgaccccaacctgatcatcctgcctctggcctttggcaagagacagggcagagaattcatctggaacgacctgctgtccctggaaaccggcagcctgaagctggccaacggaagagtgatcgagaagacactgtacaacagaagaacccggcaggatgagcctgccctgttcgtggccctgaccttcgagcggcgggaggtcctggactcctccaatatcaaaccaatgaacctgatcggcgtggcaagaggcgaaaacatccccgccgtgatcgccctgaccgaccccgagggctgcccactgagccggtttaaggatagcctgggaaacccaacccacatcctgagaatcggcgagagctataaggagaagcagcggaccatccaggccaagaaggaggtggagcagcggagagccggcggctacagccggaagtacgccagcaaagccaagaatctggcagacgatatggtgagaaacaccgctagagatctgctgtactacgccgtgacccaggatgccatgctgatcttcgccaacctgagccggggcttcggccggcagggcaagcggaccttcatggccgagagacagtacacacggatggaggactggctgaccgccaagctggcctacgagggcctgagcaagacctacctgtccaagacactggcccagtacacctccaagacatgcagcaactgtgggtttaccatcaccagcgccgactacgacagggtgctggagaagctgaagaagacagcaacaggctggatgaccacaattaacggcaaggagctgaaggtggagggccagattacctactacaacagatacaagagacagaacgtagtcaaggacctgtccgtcgagctggatagactgagcgaagaatctgtgaacaacgacatctcctcctggacaaagggcagaagcggagaagctctgagcctcctgaagaaaagattctcccatagacccgtgcaggagaagttcgtgtgcctgaactgcggcttcgagacacacgcagccgagcaagccgccctgaacatcgccagatcctggctgttcctgcggagccaggagtacaagaaataccagacaaacaagacaaccggcaacaccgataagagagccttcgtcgagacctggcagtccttttaccggaagaagcttaaggaggtgtggaaacctgccgtgcggtctggcggatctggcggaggctccaccagccccaagaaaaagagaaaagtctaagctgccttctgcggggcttgccttctggccatgcccttcttctctcccttgcacctgtacctcttggtctttgaataaagcctgagtaggaaggctagcaaaaaaaaaaaaaaaaaaaaaaaaaaaaaaaaaaaaaaaaaaaaaaaaaaaaaaaaaaaaaaaaaaaaaaaaaaaaaaaagcccagccggctccccaacctctaccgaggagggcacctctgagtccgccacccccgagagcggccctggcacctccaccgagcccagcgagggcagcgcacccggcagccctgccggcagccccacctccacagaggagggaaccagcaccgagcccagcgaaggcagcgccccaggcaccagcaccgagcctagtgagcaggagattaaacggatcaacaagatcagaagaagacttgtgaaagacagcaacaccaagaaggccggcaagacaggccccatgaaaaccctgctggttagagtgatgacacccgatctgagagagcggctggaaaacctgagaaagaagcctgaaaatatcccccagcccatcagcaatacatctagagccaacctgaataagctgctgaccgattacaccgaaatgaagaaggcgatcctgcatgtgtactgggaagagttccagaaggaccctgtgggcctgatgagccgggtggcccagcctgccagcaagaagatcgatcagaacaagctgaaacctgagatggacgagaagggcaacctgaccaccgccggctttgcctgctctcagtgtggccagcccctgttcgtgtacaagctggagcaggtgtctgagaagggcaaggcttacaccaactacttcggacggtgcaatgtggccgagcacgaaaagctgatcctgctggcccagctgaagcccgagaaggatagcgacgaagccgtgacatatagcctgggaaagtttgggcagagggccctggatttctacagcattcatgtgaccaaggagtccacccaccccgtgaagcccctggcccagatcgccggaaacagatacgcctccggacctgtgggaaaggccctgagcgacgcatgtatgggcacaatcgcctccttcctgtctaagtaccaggacatcatcatcgaacaccagaaggtggtgaagggcaaccagaagagactggagagcctgcgggagctggccggcaaggaaaacctggaataccctagcgtgaccctgccacctcagcctcacaccaaggagggcgttgatgcctacaacgaagtgatcgcccgggtgcgaatgtgggtgaacctgaacctgtggcagaagctgaagctaagcagagatgatgccaagcctctgctgagactgaagggattcccttcctttcctctggtcgagagacaggccaacgaagtggactggtgggacatggtgtgtaacgtgaagaagctgatcaacgagaaaaaggaggatggcaaggtgttttggcagaatctggctggctacaagagacaggaagccctgagaccatacctgagcagcgaggaagatcggaagaagggaaagaaattcgctcggtaccagctgggcgacctgctgctgcacctggaaaagaagcacggcgaggactggggaaaggtgtacgacgaggcctgggagcggattgacaagaaagtggaaggcctgagcaagcacatcaagctggaagaggaacggagaagcgaggacgcccagagcaaggccgccctgaccgactggctgcgggctaaggccagcttcgtgatcgagggcctgaaggaggccgacaaggacgagttctgcagatgcgagctgaagctgcagaagtggtacggggacctgcggggaaagcccttcgccatcgaagccgagaacagcatcctggacatcagcggcttcagcaagcagtacaactgtgccttcatctggcagaaggacggcgtgaagaagctgaacctgtacctgatcatcaactacttcaagggcggcaagctgcggttcaagaagatcaaacctgaagccttcgaagccaacagattctacaccgtgatcaacaaaaagagcggcgagatcgtgcccatggaggtgaacttcaacttcgacgaccccaacctgatcatcctgcctctggcctttggcaagagacagggcagagaattcatctggaacgacctgctgtccctggaaaccggcagcctgaagctggccaacggaagagtgatcgagaagacactgtacaacagaagaacccggcaggatgagcctgccctgttcgtggccctgaccttcgagcggcgggaggtcctggactcctccaatatcaaaccaatgaacctgatcggcgtggcaagaggcgaaaacatccccgccgtgatcgccctgaccgaccccgagggctgcccactgagccggtttaaggatagcctgggaaacccaacccacatcctgagaatcggcgagagctataaggagaagcagcggaccatccaggccaagaaggaggtggagcagcggagagccggcggctacagccggaagtacgccagcaaagccaagaatctggcagacgatatggtgagaaacaccgctagagatctgctgtactacgccgtgacccaggatgccatgctgatcttcgccaacctgagccggggcttcggccggcagggcaagcggaccttcatggccgagagacagtacacacggatggaggactggctgaccgccaagctggcctacgagggcctgagcaagacctacctgtccaagacactggcccagtacacctccaagacatgcagcaactgtgggtttaccatcaccagcgccgactacgacagggtgctggagaagctgaagaagacagcaacaggctggatgaccacaattaacggcaaggagctgaaggtggagggccagattacctactacaacagatacaagagacagaacgtagtcaaggacctgtccgtcgagctggatagactgagcgaagaatctgtgaacaacgacatctcctcctggacaaagggcagaagcggagaagctctgagcctcctgaagaaaagattctcccatagacccgtgcaggagaagttcgtgtgcctgaactgcggcttcgagacacacgcagccgagcaagccgccctgaacatcgccagatcctggctgttcctgcggagccaggagtacaagaaataccagacaaacaagacaaccggcaacaccgataagagagccttcgtcgagacctggcagtccttttaccggaagaagcttaaggaggtgtggaaacctgccgtgcggtctggcggatctggcggaggctccaccagccccaagaaaaagagaaaagtctaagctgccttctgcggggcttgccttctggccatgcccttcttctctcccttgcacctgtacctcttggtctttgaataaagcctgagtaggaaggctagcaaaaaaaaaaaaaaaaaaaaaaaaaaaaaaaaaaaaaaaaaaaaaaaaaaaaaaaaaaaaaaaaaaaaaaaaaaaaaaaa

SEQ ID NO: 10412 - RNA, 8787 nt, synthetic construct
  source 1..8787: mol_type = other RNA
aggaaataagagagaaaagaagagtaagaagaaatataagagccaccatggcccctaagaagaagcgtaaagtgagccggatgaaccacgaccaggagttcgacccccctaaggtgtaccctcccgtccccgccgagaagagaaagcccatccgggtcctgagcctgttcgatggcatcgccaccggtctgctggtgctgaaggacctgggcatccaggtggataggtacattgcctccgaggtgtgcgaggactccatcaccgtgggaatggtgcgtcatcagggcaagatcatgtacgtgggcgacgtgcggagcgtgacacagaagcatatccaggagtggggccctttcgacctggtgatcggcggcagcccttgcaatgacctgagcatcgtgaacccagcccggaagggcctgtacgagggaaccggcagactgttcttcgagttttacagactgctgcacgacgcccggcctaaggaaggcgacgaccggcccttcttttggctgttcgagaatgtggtggccatgggagtcagcgacaagcgggatattagccggttcctggagagcaaccccgtgatgatcgatgccaaggaagtgagcgccgcccaccgggccagatacttctggggcaatctgcctggcatgaacagacccctggccagcaccgtgaacgacaagctggagctgcaggagtgcctggagcacggccggatcgccaagttcagcaaggtgagaaccatcaccacccgaagcaacagcatcaaacaaggcaaggaccagcactttcctgtgttcatgaacgagaaggaggacatcctgtggtgtaccgagatggagagagtgttcgggttcccagtccactacacagatgtcagcaacatgtctagactggccagacagagactgctgggaagaagctggtccgtccctgtgatcagacacctgttcgcccctctgaaggagtacttcgcctgcgtgagcagcggcaacagcaacgccaacagccggggccccagcttctctagcggcctggtgccactgtccctgagagggagccacatgggccccatggagatctacaaaaccgtgagcgcctggaagcggcagcctgtgcgcgtgctgagcctgtttcggaatatcgataaagtcctgaaaagcctgggattcctggagagcggctctggctccggcggtggcaccctgaagtacgtggaggatgtgacaaacgtggtcagacgggatgtggagaagtggggccccttcgatctggtgtacggcagcacccaacccctgggcagctcttgtgaccggtgccctggctggtacatgtttcagttccaccggatcctgcagtacgccctgccgagacaggagtcccagcggccattcttttggattttcatggacaacttgctgctgaccgaggatgaccaggaaactaccactcggttcctgcagaccgaagccgtgaccctgcaggacgtgagaggccgggactaccagaacgccatgcgggtgtggtccaacatccctggactgaaaagcaagcacgcacctctgacccctaaagaagaggagtacctgcaggcccaggtgcggagcagaagcaagctggacgcccctaaggtggatctgctggtgaagaattgcctcctgcccctgagagagtacttcaagtatttcagccagaatagtctgcccctgggaggcagcggcggcggcatgaacatggagggcctggtgatgttccaggacctgttcatccacttcagccaggaggagtgggagtgcctggacgccgcccagaaggacctgtacagggacgtgatgatggagaactacagcagcctggtgagcctgggcctgtgcatccccaagcccgacgtgatcagcctgctggagcagggcaaggagccctggatggtgagcagggacgtgctgggcggctggtgccccgacagcgagggcggcccaagcagcggcgcccctcctcccagcggcggcaggcggcccaagcagcggcgcccctcctcccagcggcggcagcccagccggctccccaacctctaccgaggagggcacctctgagtccgccacccccgagagcggccctggcacctccaccgagcccagcgagggcagcgcacccggcagccctgccggcagccccacctccacagaggagggaaccagcaccgagcccagcgaaggcagcgccccaggcaccagcaccgagcctagtgagcaggagattaaacggatcaacaagatcagaagaagacttgtgaaagacagcaacaccaagaaggccggcaagacaggccccatgaaaaccctgctggttagagtgatgacacccgatctgagagagcggctggaaaacctgagaaagaagcctgaaaatatcccccagcccatcagcaatacatctagagccaacctgaataagctgctgaccgattacaccgaaatgaagaaggcgatcctgcatgtgtactgggaagagttccagaaggaccctgtgggcctgatgagccgggtggcccagcctgccagcaagaagatcgatcagaacaagctgaaacctgagatggacgagaagggcaacctgaccaccgccggctttgcctgctctcagtgtggccagcccctgttcgtgtacaagctggagcaggtgtctgagaagggcaaggcttacaccaactacttcggacggtgcaatgtggccgagcacgaaaagctgatcctgctggcccagctgaagcccgagaaggatagcgacgaagccgtgacatatagcctgggaaagtttgggcagagggccctggatttctacagcattcatgtgaccaaggagtccacccaccccgtgaagcccctggcccagatcgccggaaacagatacgcctccggacctgtgggaaaggccctgagcgacgcatgtatgggcacaatcgcctccttcctgtctaagtaccaggacatcatcatcgaacaccagaaggtggtgaagggcaaccagaagagactggagagcctgcgggagctggccggcaaggaaaacctggaataccctagcgtgaccctgccacctcagcctcacaccaaggagggcgttgatgcctacaacgaagtgatcgcccgggtgcgaatgtgggtgaacctgaacctgtggcagaagctgaagctaagcagagatgatgccaagcctctgctgagactgaagggattcccttcctttcctctggtcgagagacaggccaacgaagtggactggtgggacatggtgtgtaacgtgaagaagctgatcaacgagaaaaaggaggatggcaaggtgttttggcagaatctggctggctacaagagacaggaagccctgagaccatacctgagcagcgaggaagatcggaagaagggaaagaaattcgctcggtaccagctgggcgacctgctgctgcacctggaaaagaagcacggcgaggactggggaaaggtgtacgacgaggcctgggagcggattgacaagaaagtggaaggcctgagcaagcacatcaagctggaagaggaacggagaagcgaggacgcccagagcaaggccgccctgaccgactggctgcgggctaaggccagcttcgtgatcgagggcctgaaggaggccgacaaggacgagttctgcagatgcgagctgaagctgcagaagtggtacggggacctgcggggaaagcccttcgccatcgaagccgagaacagcatcctggacatcagcggcttcagcaagcagtacaactgtgccttcatctggcagaaggacggcgtgaagaagctgaacctgtacctgatcatcaactacttcaagggcggcaagctgcggttcaagaagatcaaacctgaagccttcgaagccaacagattctacaccgtgatcaacaaaaagagcggcgagatcgtgcccatggaggtgaacttcaacttcgacgaccccaacctgatcatcctgcctctggcctttggcaagagacagggcagagaattcatctggaacgacctgctgtccctggaaaccggcagcctgaagctggccaacggaagagtgatcgagaagacactgtacaacagaagaacccggcaggatgagcctgccctgttcgtggccctgaccttcgagcggcgggaggtcctggactcctccaatatcaaaccaatgaacctgatcggcgtggcaagaggcgaaaacatccccgccgtgatcgccctgaccgaccccgagggctgcccactgagccggtttaaggatagcctgggaaacccaacccacatcctgagaatcggcgagagctataaggagaagcagcggaccatccaggccaagaaggaggtggagcagcggagagccggcggctacagccggaagtacgccagcaaagccaagaatctggcagacgatatggtgagaaacaccgctagagatctgctgtactacgccgtgacccaggatgccatgctgatcttcgccaacctgagccggggcttcggccggcagggcaagcggaccttcatggccgagagacagtacacacggatggaggactggctgaccgccaagctggcctacgagggcctgagcaagacctacctgtccaagacactggcccagtacacctccaagacatgcagcaactgtgggtttaccatcaccagcgccgactacgacagggtgctggagaagctgaagaagacagcaacaggctggatgaccacaattaacggcaaggagctgaaggtggagggccagattacctactacaacagatacaagagacagaacgtagtcaaggacctgtccgtcgagctggatagactgagcgaagaatctgtgaacaacgacatctcctcctggacaaagggcagaagcggagaagctctgagcctcctgaagaaaagattctcccatagacccgtgcaggagaagttcgtgtgcctgaactgcggcttcgagacacacgcagccgagcaagccgccctgaacatcgccagatcctggctgttcctgcggagccaggagtacaagaaataccagacaaacaagacaaccggcaacaccgataagagagccttcgtcgagacctggcagtccttttaccggaagaagcttaaggaggtgtggaaacctgccgtgcggtctggcggatctggcggaggctccaccagccccaagaaaaagagaaaagtctaagctgccttctgcggggcttgccttctggccatgcccttcttctctcccttgcacctgtacctcttggtctttgaataaagcctgagtaggaaggctagcaaaaaaaaaaaaaaaaaaaaaaaaaaaaaaaaaaaaaaaaaaaaaaaaaaaaaaaaaaaaaaaaaaaaaaaaaaaaaaaagcccagccggctccccaacctctaccgaggagggcacctctgagtccgccacccccgagagcggccctggcacctccaccgagcccagcgagggcagcgcacccggcagccctgccggcagccccacctccacagaggagggaaccagcaccgagcccagcgaaggcagcgccccaggcaccagcaccgagcctagtgagcaggagattaaacggatcaacaagatcagaagaagacttgtgaaagacagcaacaccaagaaggccggcaagacaggccccatgaaaaccctgctggttagagtgatgacacccgatctgagagagcggctggaaaacctgagaaagaagcctgaaaatatcccccagcccatcagcaatacatctagagccaacctgaataagctgctgaccgattacaccgaaatgaagaaggcgatcctgcatgtgtactgggaagagttccagaaggaccctgtgggcctgatgagccgggtggcccagcctgccagcaagaagatcgatcagaacaagctgaaacctgagatggacgagaagggcaacctgaccaccgccggctttgcctgctctcagtgtggccagcccctgttcgtgtacaagctggagcaggtgtctgagaagggcaaggcttacaccaactacttcggacggtgcaatgtggccgagcacgaaaagctgatcctgctggcccagctgaagcccgagaaggatagcgacgaagccgtgacatatagcctgggaaagtttgggcagagggccctggatttctacagcattcatgtgaccaaggagtccacccaccccgtgaagcccctggcccagatcgccggaaacagatacgcctccggacctgtgggaaaggccctgagcgacgcatgtatgggcacaatcgcctccttcctgtctaagtaccaggacatcatcatcgaacaccagaaggtggtgaagggcaaccagaagagactggagagcctgcgggagctggccggcaaggaaaacctggaataccctagcgtgaccctgccacctcagcctcacaccaaggagggcgttgatgcctacaacgaagtgatcgcccgggtgcgaatgtgggtgaacctgaacctgtggcagaagctgaagctaagcagagatgatgccaagcctctgctgagactgaagggattcccttcctttcctctggtcgagagacaggccaacgaagtggactggtgggacatggtgtgtaacgtgaagaagctgatcaacgagaaaaaggaggatggcaaggtgttttggcagaatctggctggctacaagagacaggaagccctgagaccatacctgagcagcgaggaagatcggaagaagggaaagaaattcgctcggtaccagctgggcgacctgctgctgcacctggaaaagaagcacggcgaggactggggaaaggtgtacgacgaggcctgggagcggattgacaagaaagtggaaggcctgagcaagcacatcaagctggaagaggaacggagaagcgaggacgcccagagcaaggccgccctgaccgactggctgcgggctaaggccagcttcgtgatcgagggcctgaaggaggccgacaaggacgagttctgcagatgcgagctgaagctgcagaagtggtacggggacctgcggggaaagcccttcgccatcgaagccgagaacagcatcctggacatcagcggcttcagcaagcagtacaactgtgccttcatctggcagaaggacggcgtgaagaagctgaacctgtacctgatcatcaactacttcaagggcggcaagctgcggttcaagaagatcaaacctgaagccttcgaagccaacagattctacaccgtgatcaacaaaaagagcggcgagatcgtgcccatggaggtgaacttcaacttcgacgaccccaacctgatcatcctgcctctggcctttggcaagagacagggcagagaattcatctggaacgacctgctgtccctggaaaccggcagcctgaagctggccaacggaagagtgatcgagaagacactgtacaacagaagaacccggcaggatgagcctgccctgttcgtggccctgaccttcgagcggcgggaggtcctggactcctccaatatcaaaccaatgaacctgatcggcgtggcaagaggcgaaaacatccccgccgtgatcgccctgaccgaccccgagggctgcccactgagccggtttaaggatagcctgggaaacccaacccacatcctgagaatcggcgagagctataaggagaagcagcggaccatccaggccaagaaggaggtggagcagcggagagccggcggctacagccggaagtacgccagcaaagccaagaatctggcagacgatatggtgagaaacaccgctagagatctgctgtactacgccgtgacccaggatgccatgctgatcttcgccaacctgagccggggcttcggccggcagggcaagcggaccttcatggccgagagacagtacacacggatggaggactggctgaccgccaagctggcctacgagggcctgagcaagacctacctgtccaagacactggcccagtacacctccaagacatgcagcaactgtgggtttaccatcaccagcgccgactacgacagggtgctggagaagctgaagaagacagcaacaggctggatgaccacaattaacggcaaggagctgaaggtggagggccagattacctactacaacagatacaagagacagaacgtagtcaaggacctgtccgtcgagctggatagactgagcgaagaatctgtgaacaacgacatctcctcctggacaaagggcagaagcggagaagctctgagcctcctgaagaaaagattctcccatagacccgtgcaggagaagttcgtgtgcctgaactgcggcttcgagacacacgcagccgagcaagccgccctgaacatcgccagatcctggctgttcctgcggagccaggagtacaagaaataccagacaaacaagacaaccggcaacaccgataagagagccttcgtcgagacctggcagtccttttaccggaagaagcttaaggaggtgtggaaacctgccgtgcggtctggcggatctggcggaggctccaccagccccaagaaaaagagaaaagtctaagctgccttctgcggggcttgccttctggccatgcccttcttctctcccttgcacctgtacctcttggtctttgaataaagcctgagtaggaaggctagcaaaaaaaaaaaaaaaaaaaaaaaaaaaaaaaaaaaaaaaaaaaaaaaaaaaaaaaaaaaaaaaaaaaaaaaaaaaaaaaa

SEQ ID NO: 10413 - RNA, 8787 nt, synthetic construct
  source 1..8787: mol_type = other RNA
aggaaataagagagaaaagaagagtaagaagaaatataagagccaccatggcccctaagaagaagcgtaaagtgagccggatgaaccacgaccaggagttcgacccccctaaggtgtaccctcccgtccccgccgagaagagaaagcccatccgggtcctgagcctgttcgatggcatcgccaccggtctgctggtgctgaaggacctgggcatccaggtggataggtacattgcctccgaggtgtgcgaggactccatcaccgtgggaatggtgcgtcatcagggcaagatcatgtacgtgggcgacgtgcggagcgtgacacagaagcatatccaggagtggggccctttcgacctggtgatcggcggcagcccttgcaatgacctgagcatcgtgaacccagcccggaagggcctgtacgagggaaccggcagactgttcttcgagttttacagactgctgcacgacgcccggcctaaggaaggcgacgaccggcccttcttttggctgttcgagaatgtggtggccatgggagtcagcgacaagcgggatattagccggttcctggagagcaaccccgtgatgatcgatgccaaggaagtgagcgccgcccaccgggccagatacttctggggcaatctgcctggcatgaacagacccctggccagcaccgtgaacgacaagctggagctgcaggagtgcctggagcacggccggatcgccaagttcagcaaggtgagaaccatcaccacccgaagcaacagcatcaaacaaggcaaggaccagcactttcctgtgttcatgaacgagaaggaggacatcctgtggtgtaccgagatggagagagtgttcgggttcccagtccactacacagatgtcagcaacatgtctagactggccagacagagactgctgggaagaagctggtccgtccctgtgatcagacacctgttcgcccctctgaaggagtacttcgcctgcgtgagcagcggcaacagcaacgccaacagccggggccccagcttctctagcggcctggtgccactgtccctgagagggagccacatgggccccatggagatctacaaaaccgtgagcgcctggaagcggcagcctgtgcgcgtgctgagcctgtttcggaatatcgataaagtcctgaaaagcctgggattcctggagagcggctctggctccggcggtggcaccctgaagtacgtggaggatgtgacaaacgtggtcagacgggatgtggagaagtggggccccttcgatctggtgtacggcagcacccaacccctgggcagctcttgtgaccggtgccctggctggtacatgtttcagttccaccggatcctgcagtacgccctgccgagacaggagtcccagcggccattcttttggattttcatggacaacttgctgctgaccgaggatgaccaggaaactaccactcggttcctgcagaccgaagccgtgaccctgcaggacgtgagaggccgggactaccagaacgccatgcgggtgtggtccaacatccctggactgaaaagcaagcacgcacctctgacccctaaagaagaggagtacctgcaggcccaggtgcggagcagaagcaagctggacgcccctaaggtggatctgctggtgaagaattgcctcctgcccctgagagagtacttcaagtatttcagccagaatagtctgcccctgggaggcagcggcggcggccagcagatgcaggtgaccttcgaggacgtggccgtgagcttcagccaggaggagtgggagtacctggacgagggccagaaggagctgtacagggaggtgatgaaggagaactacgagaccgtggtgagcctgggcagccccgccagcacccccaagatcatcagctgcatcgagtgcggcgaggaggcctacatcaggggcgagcccggcagcgagggcagggagaccggcaagagcagctgcggcggcccaagcagcggcgcccctcctcccagcggcggcaggcggcccaagcagcggcgcccctcctcccagcggcggcagcccagccggctccccaacctctaccgaggagggcacctctgagtccgccacccccgagagcggccctggcacctccaccgagcccagcgagggcagcgcacccggcagccctgccggcagccccacctccacagaggagggaaccagcaccgagcccagcgaaggcagcgccccaggcaccagcaccgagcctagtgagcaggagattaaacggatcaacaagatcagaagaagacttgtgaaagacagcaacaccaagaaggccggcaagacaggccccatgaaaaccctgctggttagagtgatgacacccgatctgagagagcggctggaaaacctgagaaagaagcctgaaaatatcccccagcccatcagcaatacatctagagccaacctgaataagctgctgaccgattacaccgaaatgaagaaggcgatcctgcatgtgtactgggaagagttccagaaggaccctgtgggcctgatgagccgggtggcccagcctgccagcaagaagatcgatcagaacaagctgaaacctgagatggacgagaagggcaacctgaccaccgccggctttgcctgctctcagtgtggccagcccctgttcgtgtacaagctggagcaggtgtctgagaagggcaaggcttacaccaactacttcggacggtgcaatgtggccgagcacgaaaagctgatcctgctggcccagctgaagcccgagaaggatagcgacgaagccgtgacatatagcctgggaaagtttgggcagagggccctggatttctacagcattcatgtgaccaaggagtccacccaccccgtgaagcccctggcccagatcgccggaaacagatacgcctccggacctgtgggaaaggccctgagcgacgcatgtatgggcacaatcgcctccttcctgtctaagtaccaggacatcatcatcgaacaccagaaggtggtgaagggcaaccagaagagactggagagcctgcgggagctggccggcaaggaaaacctggaataccctagcgtgaccctgccacctcagcctcacaccaaggagggcgttgatgcctacaacgaagtgatcgcccgggtgcgaatgtgggtgaacctgaacctgtggcagaagctgaagctaagcagagatgatgccaagcctctgctgagactgaagggattcccttcctttcctctggtcgagagacaggccaacgaagtggactggtgggacatggtgtgtaacgtgaagaagctgatcaacgagaaaaaggaggatggcaaggtgttttggcagaatctggctggctacaagagacaggaagccctgagaccatacctgagcagcgaggaagatcggaagaagggaaagaaattcgctcggtaccagctgggcgacctgctgctgcacctggaaaagaagcacggcgaggactggggaaaggtgtacgacgaggcctgggagcggattgacaagaaagtggaaggcctgagcaagcacatcaagctggaagaggaacggagaagcgaggacgcccagagcaaggccgccctgaccgactggctgcgggctaaggccagcttcgtgatcgagggcctgaaggaggccgacaaggacgagttctgcagatgcgagctgaagctgcagaagtggtacggggacctgcggggaaagcccttcgccatcgaagccgagaacagcatcctggacatcagcggcttcagcaagcagtacaactgtgccttcatctggcagaaggacggcgtgaagaagctgaacctgtacctgatcatcaactacttcaagggcggcaagctgcggttcaagaagatcaaacctgaagccttcgaagccaacagattctacaccgtgatcaacaaaaagagcggcgagatcgtgcccatggaggtgaacttcaacttcgacgaccccaacctgatcatcctgcctctggcctttggcaagagacagggcagagaattcatctggaacgacctgctgtccctggaaaccggcagcctgaagctggccaacggaagagtgatcgagaagacactgtacaacagaagaacccggcaggatgagcctgccctgttcgtggccctgaccttcgagcggcgggaggtcctggactcctccaatatcaaaccaatgaacctgatcggcgtggcaagaggcgaaaacatccccgccgtgatcgccctgaccgaccccgagggctgcccactgagccggtttaaggatagcctgggaaacccaacccacatcctgagaatcggcgagagctataaggagaagcagcggaccatccaggccaagaaggaggtggagcagcggagagccggcggctacagccggaagtacgccagcaaagccaagaatctggcagacgatatggtgagaaacaccgctagagatctgctgtactacgccgtgacccaggatgccatgctgatcttcgccaacctgagccggggcttcggccggcagggcaagcggaccttcatggccgagagacagtacacacggatggaggactggctgaccgccaagctggcctacgagggcctgagcaagacctacctgtccaagacactggcccagtacacctccaagacatgcagcaactgtgggtttaccatcaccagcgccgactacgacagggtgctggagaagctgaagaagacagcaacaggctggatgaccacaattaacggcaaggagctgaaggtggagggccagattacctactacaacagatacaagagacagaacgtagtcaaggacctgtccgtcgagctggatagactgagcgaagaatctgtgaacaacgacatctcctcctggacaaagggcagaagcggagaagctctgagcctcctgaagaaaagattctcccatagacccgtgcaggagaagttcgtgtgcctgaactgcggcttcgagacacacgcagccgagcaagccgccctgaacatcgccagatcctggctgttcctgcggagccaggagtacaagaaataccagacaaacaagacaaccggcaacaccgataagagagccttcgtcgagacctggcagtccttttaccggaagaagcttaaggaggtgtggaaacctgccgtgcggtctggcggatctggcggaggctccaccagccccaagaaaaagagaaaagtctaagctgccttctgcggggcttgccttctggccatgcccttcttctctcccttgcacctgtacctcttggtctttgaataaagcctgagtaggaaggctagcaaaaaaaaaaaaaaaaaaaaaaaaaaaaaaaaaaaaaaaaaaaaaaaaaaaaaaaaaaaaaaaaaaaaaaaaaaaaaaaagcccagccggctccccaacctctaccgaggagggcacctctgagtccgccacccccgagagcggccctggcacctccaccgagcccagcgagggcagcgcacccggcagccctgccggcagccccacctccacagaggagggaaccagcaccgagcccagcgaaggcagcgccccaggcaccagcaccgagcctagtgagcaggagattaaacggatcaacaagatcagaagaagacttgtgaaagacagcaacaccaagaaggccggcaagacaggccccatgaaaaccctgctggttagagtgatgacacccgatctgagagagcggctggaaaacctgagaaagaagcctgaaaatatcccccagcccatcagcaatacatctagagccaacctgaataagctgctgaccgattacaccgaaatgaagaaggcgatcctgcatgtgtactgggaagagttccagaaggaccctgtgggcctgatgagccgggtggcccagcctgccagcaagaagatcgatcagaacaagctgaaacctgagatggacgagaagggcaacctgaccaccgccggctttgcctgctctcagtgtggccagcccctgttcgtgtacaagctggagcaggtgtctgagaagggcaaggcttacaccaactacttcggacggtgcaatgtggccgagcacgaaaagctgatcctgctggcccagctgaagcccgagaaggatagcgacgaagccgtgacatatagcctgggaaagtttgggcagagggccctggatttctacagcattcatgtgaccaaggagtccacccaccccgtgaagcccctggcccagatcgccggaaacagatacgcctccggacctgtgggaaaggccctgagcgacgcatgtatgggcacaatcgcctccttcctgtctaagtaccaggacatcatcatcgaacaccagaaggtggtgaagggcaaccagaagagactggagagcctgcgggagctggccggcaaggaaaacctggaataccctagcgtgaccctgccacctcagcctcacaccaaggagggcgttgatgcctacaacgaagtgatcgcccgggtgcgaatgtgggtgaacctgaacctgtggcagaagctgaagctaagcagagatgatgccaagcctctgctgagactgaagggattcccttcctttcctctggtcgagagacaggccaacgaagtggactggtgggacatggtgtgtaacgtgaagaagctgatcaacgagaaaaaggaggatggcaaggtgttttggcagaatctggctggctacaagagacaggaagccctgagaccatacctgagcagcgaggaagatcggaagaagggaaagaaattcgctcggtaccagctgggcgacctgctgctgcacctggaaaagaagcacggcgaggactggggaaaggtgtacgacgaggcctgggagcggattgacaagaaagtggaaggcctgagcaagcacatcaagctggaagaggaacggagaagcgaggacgcccagagcaaggccgccctgaccgactggctgcgggctaaggccagcttcgtgatcgagggcctgaaggaggccgacaaggacgagttctgcagatgcgagctgaagctgcagaagtggtacggggacctgcggggaaagcccttcgccatcgaagccgagaacagcatcctggacatcagcggcttcagcaagcagtacaactgtgccttcatctggcagaaggacggcgtgaagaagctgaacctgtacctgatcatcaactacttcaagggcggcaagctgcggttcaagaagatcaaacctgaagccttcgaagccaacagattctacaccgtgatcaacaaaaagagcggcgagatcgtgcccatggaggtgaacttcaacttcgacgaccccaacctgatcatcctgcctctggcctttggcaagagacagggcagagaattcatctggaacgacctgctgtccctggaaaccggcagcctgaagctggccaacggaagagtgatcgagaagacactgtacaacagaagaacccggcaggatgagcctgccctgttcgtggccctgaccttcgagcggcgggaggtcctggactcctccaatatcaaaccaatgaacctgatcggcgtggcaagaggcgaaaacatccccgccgtgatcgccctgaccgaccccgagggctgcccactgagccggtttaaggatagcctgggaaacccaacccacatcctgagaatcggcgagagctataaggagaagcagcggaccatccaggccaagaaggaggtggagcagcggagagccggcggctacagccggaagtacgccagcaaagccaagaatctggcagacgatatggtgagaaacaccgctagagatctgctgtactacgccgtgacccaggatgccatgctgatcttcgccaacctgagccggggcttcggccggcagggcaagcggaccttcatggccgagagacagtacacacggatggaggactggctgaccgccaagctggcctacgagggcctgagcaagacctacctgtccaagacactggcccagtacacctccaagacatgcagcaactgtgggtttaccatcaccagcgccgactacgacagggtgctggagaagctgaagaagacagcaacaggctggatgaccacaattaacggcaaggagctgaaggtggagggccagattacctactacaacagatacaagagacagaacgtagtcaaggacctgtccgtcgagctggatagactgagcgaagaatctgtgaacaacgacatctcctcctggacaaagggcagaagcggagaagctctgagcctcctgaagaaaagattctcccatagacccgtgcaggagaagttcgtgtgcctgaactgcggcttcgagacacacgcagccgagcaagccgccctgaacatcgccagatcctggctgttcctgcggagccaggagtacaagaaataccagacaaacaagacaaccggcaacaccgataagagagccttcgtcgagacctggcagtccttttaccggaagaagcttaaggaggtgtggaaacctgccgtgcggtctggcggatctggcggaggctccaccagccccaagaaaaagagaaaagtctaagctgccttctgcggggcttgccttctggccatgcccttcttctctcccttgcacctgtacctcttggtctttgaataaagcctgagtaggaaggctagcaaaaaaaaaaaaaaaaaaaaaaaaaaaaaaaaaaaaaaaaaaaaaaaaaaaaaaaaaaaaaaaaaaaaaaaaaaaaaaaa

SEQ ID NO: 10414 - RNA, 8787 nt, synthetic construct
  source 1..8787: mol_type = other RNA
aggaaataagagagaaaagaagagtaagaagaaatataagagccaccatggcccctaagaagaagcgtaaagtgagccggatgaaccacgaccaggagttcgacccccctaaggtgtaccctcccgtccccgccgagaagagaaagcccatccgggtcctgagcctgttcgatggcatcgccaccggtctgctggtgctgaaggacctgggcatccaggtggataggtacattgcctccgaggtgtgcgaggactccatcaccgtgggaatggtgcgtcatcagggcaagatcatgtacgtgggcgacgtgcggagcgtgacacagaagcatatccaggagtggggccctttcgacctggtgatcggcggcagcccttgcaatgacctgagcatcgtgaacccagcccggaagggcctgtacgagggaaccggcagactgttcttcgagttttacagactgctgcacgacgcccggcctaaggaaggcgacgaccggcccttcttttggctgttcgagaatgtggtggccatgggagtcagcgacaagcgggatattagccggttcctggagagcaaccccgtgatgatcgatgccaaggaagtgagcgccgcccaccgggccagatacttctggggcaatctgcctggcatgaacagacccctggccagcaccgtgaacgacaagctggagctgcaggagtgcctggagcacggccggatcgccaagttcagcaaggtgagaaccatcaccacccgaagcaacagcatcaaacaaggcaaggaccagcactttcctgtgttcatgaacgagaaggaggacatcctgtggtgtaccgagatggagagagtgttcgggttcccagtccactacacagatgtcagcaacatgtctagactggccagacagagactgctgggaagaagctggtccgtccctgtgatcagacacctgttcgcccctctgaaggagtacttcgcctgcgtgagcagcggcaacagcaacgccaacagccggggccccagcttctctagcggcctggtgccactgtccctgagagggagccacatgggccccatggagatctacaaaaccgtgagcgcctggaagcggcagcctgtgcgcgtgctgagcctgtttcggaatatcgataaagtcctgaaaagcctgggattcctggagagcggctctggctccggcggtggcaccctgaagtacgtggaggatgtgacaaacgtggtcagacgggatgtggagaagtggggccccttcgatctggtgtacggcagcacccaacccctgggcagctcttgtgaccggtgccctggctggtacatgtttcagttccaccggatcctgcagtacgccctgccgagacaggagtcccagcggccattcttttggattttcatggacaacttgctgctgaccgaggatgaccaggaaactaccactcggttcctgcagaccgaagccgtgaccctgcaggacgtgagaggccgggactaccagaacgccatgcgggtgtggtccaacatccctggactgaaaagcaagcacgcacctctgacccctaaagaagaggagtacctgcaggcccaggtgcggagcagaagcaagctggacgcccctaaggtggatctgctggtgaagaattgcctcctgcccctgagagagtacttcaagtatttcagccagaatagtctgcccctgggaggcagcggcggcggcagccagggccccgtgctgttcgaggacgtgagcgtggacttcacccagaaggagtggcagctgctggaccccgcccagaggaggctgtacagggacgtgatgctggagaactacaggcacctggagagcctgggccactgcgtgaccaagcccgagctgatcaggaggctggagcagggcgaggagccctggatcctgaagagggaggtgcccagccacagccacgccgaggtgcagagggccggcggcccaagcagcggcgcccctcctcccagcggcggcaggcggcccaagcagcggcgcccctcctcccagcggcggcagcccagccggctccccaacctctaccgaggagggcacctctgagtccgccacccccgagagcggccctggcacctccaccgagcccagcgagggcagcgcacccggcagccctgccggcagccccacctccacagaggagggaaccagcaccgagcccagcgaaggcagcgccccaggcaccagcaccgagcctagtgagcaggagattaaacggatcaacaagatcagaagaagacttgtgaaagacagcaacaccaagaaggccggcaagacaggccccatgaaaaccctgctggttagagtgatgacacccgatctgagagagcggctggaaaacctgagaaagaagcctgaaaatatcccccagcccatcagcaatacatctagagccaacctgaataagctgctgaccgattacaccgaaatgaagaaggcgatcctgcatgtgtactgggaagagttccagaaggaccctgtgggcctgatgagccgggtggcccagcctgccagcaagaagatcgatcagaacaagctgaaacctgagatggacgagaagggcaacctgaccaccgccggctttgcctgctctcagtgtggccagcccctgttcgtgtacaagctggagcaggtgtctgagaagggcaaggcttacaccaactacttcggacggtgcaatgtggccgagcacgaaaagctgatcctgctggcccagctgaagcccgagaaggatagcgacgaagccgtgacatatagcctgggaaagtttgggcagagggccctggatttctacagcattcatgtgaccaaggagtccacccaccccgtgaagcccctggcccagatcgccggaaacagatacgcctccggacctgtgggaaaggccctgagcgacgcatgtatgggcacaatcgcctccttcctgtctaagtaccaggacatcatcatcgaacaccagaaggtggtgaagggcaaccagaagagactggagagcctgcgggagctggccggcaaggaaaacctggaataccctagcgtgaccctgccacctcagcctcacaccaaggagggcgttgatgcctacaacgaagtgatcgcccgggtgcgaatgtgggtgaacctgaacctgtggcagaagctgaagctaagcagagatgatgccaagcctctgctgagactgaagggattcccttcctttcctctggtcgagagacaggccaacgaagtggactggtgggacatggtgtgtaacgtgaagaagctgatcaacgagaaaaaggaggatggcaaggtgttttggcagaatctggctggctacaagagacaggaagccctgagaccatacctgagcagcgaggaagatcggaagaagggaaagaaattcgctcggtaccagctgggcgacctgctgctgcacctggaaaagaagcacggcgaggactggggaaaggtgtacgacgaggcctgggagcggattgacaagaaagtggaaggcctgagcaagcacatcaagctggaagaggaacggagaagcgaggacgcccagagcaaggccgccctgaccgactggctgcgggctaaggccagcttcgtgatcgagggcctgaaggaggccgacaaggacgagttctgcagatgcgagctgaagctgcagaagtggtacggggacctgcggggaaagcccttcgccatcgaagccgagaacagcatcctggacatcagcggcttcagcaagcagtacaactgtgccttcatctggcagaaggacggcgtgaagaagctgaacctgtacctgatcatcaactacttcaagggcggcaagctgcggttcaagaagatcaaacctgaagccttcgaagccaacagattctacaccgtgatcaacaaaaagagcggcgagatcgtgcccatggaggtgaacttcaacttcgacgaccccaacctgatcatcctgcctctggcctttggcaagagacagggcagagaattcatctggaacgacctgctgtccctggaaaccggcagcctgaagctggccaacggaagagtgatcgagaagacactgtacaacagaagaacccggcaggatgagcctgccctgttcgtggccctgaccttcgagcggcgggaggtcctggactcctccaatatcaaaccaatgaacctgatcggcgtggcaagaggcgaaaacatccccgccgtgatcgccctgaccgaccccgagggctgcccactgagccggtttaaggatagcctgggaaacccaacccacatcctgagaatcggcgagagctataaggagaagcagcggaccatccaggccaagaaggaggtggagcagcggagagccggcggctacagccggaagtacgccagcaaagccaagaatctggcagacgatatggtgagaaacaccgctagagatctgctgtactacgccgtgacccaggatgccatgctgatcttcgccaacctgagccggggcttcggccggcagggcaagcggaccttcatggccgagagacagtacacacggatggaggactggctgaccgccaagctggcctacgagggcctgagcaagacctacctgtccaagacactggcccagtacacctccaagacatgcagcaactgtgggtttaccatcaccagcgccgactacgacagggtgctggagaagctgaagaagacagcaacaggctggatgaccacaattaacggcaaggagctgaaggtggagggccagattacctactacaacagatacaagagacagaacgtagtcaaggacctgtccgtcgagctggatagactgagcgaagaatctgtgaacaacgacatctcctcctggacaaagggcagaagcggagaagctctgagcctcctgaagaaaagattctcccatagacccgtgcaggagaagttcgtgtgcctgaactgcggcttcgagacacacgcagccgagcaagccgccctgaacatcgccagatcctggctgttcctgcggagccaggagtacaagaaataccagacaaacaagacaaccggcaacaccgataagagagccttcgtcgagacctggcagtccttttaccggaagaagcttaaggaggtgtggaaacctgccgtgcggtctggcggatctggcggaggctccaccagccccaagaaaaagagaaaagtctaagctgccttctgcggggcttgccttctggccatgcccttcttctctcccttgcacctgtacctcttggtctttgaataaagcctgagtaggaaggctagcaaaaaaaaaaaaaaaaaaaaaaaaaaaaaaaaaaaaaaaaaaaaaaaaaaaaaaaaaaaaaaaaaaaaaaaaaaaaaaaagcccagccggctccccaacctctaccgaggagggcacctctgagtccgccacccccgagagcggccctggcacctccaccgagcccagcgagggcagcgcacccggcagccctgccggcagccccacctccacagaggagggaaccagcaccgagcccagcgaaggcagcgccccaggcaccagcaccgagcctagtgagcaggagattaaacggatcaacaagatcagaagaagacttgtgaaagacagcaacaccaagaaggccggcaagacaggccccatgaaaaccctgctggttagagtgatgacacccgatctgagagagcggctggaaaacctgagaaagaagcctgaaaatatcccccagcccatcagcaatacatctagagccaacctgaataagctgctgaccgattacaccgaaatgaagaaggcgatcctgcatgtgtactgggaagagttccagaaggaccctgtgggcctgatgagccgggtggcccagcctgccagcaagaagatcgatcagaacaagctgaaacctgagatggacgagaagggcaacctgaccaccgccggctttgcctgctctcagtgtggccagcccctgttcgtgtacaagctggagcaggtgtctgagaagggcaaggcttacaccaactacttcggacggtgcaatgtggccgagcacgaaaagctgatcctgctggcccagctgaagcccgagaaggatagcgacgaagccgtgacatatagcctgggaaagtttgggcagagggccctggatttctacagcattcatgtgaccaaggagtccacccaccccgtgaagcccctggcccagatcgccggaaacagatacgcctccggacctgtgggaaaggccctgagcgacgcatgtatgggcacaatcgcctccttcctgtctaagtaccaggacatcatcatcgaacaccagaaggtggtgaagggcaaccagaagagactggagagcctgcgggagctggccggcaaggaaaacctggaataccctagcgtgaccctgccacctcagcctcacaccaaggagggcgttgatgcctacaacgaagtgatcgcccgggtgcgaatgtgggtgaacctgaacctgtggcagaagctgaagctaagcagagatgatgccaagcctctgctgagactgaagggattcccttcctttcctctggtcgagagacaggccaacgaagtggactggtgggacatggtgtgtaacgtgaagaagctgatcaacgagaaaaaggaggatggcaaggtgttttggcagaatctggctggctacaagagacaggaagccctgagaccatacctgagcagcgaggaagatcggaagaagggaaagaaattcgctcggtaccagctgggcgacctgctgctgcacctggaaaagaagcacggcgaggactggggaaaggtgtacgacgaggcctgggagcggattgacaagaaagtggaaggcctgagcaagcacatcaagctggaagaggaacggagaagcgaggacgcccagagcaaggccgccctgaccgactggctgcgggctaaggccagcttcgtgatcgagggcctgaaggaggccgacaaggacgagttctgcagatgcgagctgaagctgcagaagtggtacggggacctgcggggaaagcccttcgccatcgaagccgagaacagcatcctggacatcagcggcttcagcaagcagtacaactgtgccttcatctggcagaaggacggcgtgaagaagctgaacctgtacctgatcatcaactacttcaagggcggcaagctgcggttcaagaagatcaaacctgaagccttcgaagccaacagattctacaccgtgatcaacaaaaagagcggcgagatcgtgcccatggaggtgaacttcaacttcgacgaccccaacctgatcatcctgcctctggcctttggcaagagacagggcagagaattcatctggaacgacctgctgtccctggaaaccggcagcctgaagctggccaacggaagagtgatcgagaagacactgtacaacagaagaacccggcaggatgagcctgccctgttcgtggccctgaccttcgagcggcgggaggtcctggactcctccaatatcaaaccaatgaacctgatcggcgtggcaagaggcgaaaacatccccgccgtgatcgccctgaccgaccccgagggctgcccactgagccggtttaaggatagcctgggaaacccaacccacatcctgagaatcggcgagagctataaggagaagcagcggaccatccaggccaagaaggaggtggagcagcggagagccggcggctacagccggaagtacgccagcaaagccaagaatctggcagacgatatggtgagaaacaccgctagagatctgctgtactacgccgtgacccaggatgccatgctgatcttcgccaacctgagccggggcttcggccggcagggcaagcggaccttcatggccgagagacagtacacacggatggaggactggctgaccgccaagctggcctacgagggcctgagcaagacctacctgtccaagacactggcccagtacacctccaagacatgcagcaactgtgggtttaccatcaccagcgccgactacgacagggtgctggagaagctgaagaagacagcaacaggctggatgaccacaattaacggcaaggagctgaaggtggagggccagattacctactacaacagatacaagagacagaacgtagtcaaggacctgtccgtcgagctggatagactgagcgaagaatctgtgaacaacgacatctcctcctggacaaagggcagaagcggagaagctctgagcctcctgaagaaaagattctcccatagacccgtgcaggagaagttcgtgtgcctgaactgcggcttcgagacacacgcagccgagcaagccgccctgaacatcgccagatcctggctgttcctgcggagccaggagtacaagaaataccagacaaacaagacaaccggcaacaccgataagagagccttcgtcgagacctggcagtccttttaccggaagaagcttaaggaggtgtggaaacctgccgtgcggtctggcggatctggcggaggctccaccagccccaagaaaaagagaaaagtctaagctgccttctgcggggcttgccttctggccatgcccttcttctctcccttgcacctgtacctcttggtctttgaataaagcctgagtaggaaggctagcaaaaaaaaaaaaaaaaaaaaaaaaaaaaaaaaaaaaaaaaaaaaaaaaaaaaaaaaaaaaaaaaaaaaaaaaaaaaaaaa

SEQ ID NO: 10415 - RNA, 8787 nt, synthetic construct
  source 1..8787: mol_type = other RNA
aggaaataagagagaaaagaagagtaagaagaaatataagagccaccatggcccctaagaagaagcgtaaagtgagccggatgaaccacgaccaggagttcgacccccctaaggtgtaccctcccgtccccgccgagaagagaaagcccatccgggtcctgagcctgttcgatggcatcgccaccggtctgctggtgctgaaggacctgggcatccaggtggataggtacattgcctccgaggtgtgcgaggactccatcaccgtgggaatggtgcgtcatcagggcaagatcatgtacgtgggcgacgtgcggagcgtgacacagaagcatatccaggagtggggccctttcgacctggtgatcggcggcagcccttgcaatgacctgagcatcgtgaacccagcccggaagggcctgtacgagggaaccggcagactgttcttcgagttttacagactgctgcacgacgcccggcctaaggaaggcgacgaccggcccttcttttggctgttcgagaatgtggtggccatgggagtcagcgacaagcgggatattagccggttcctggagagcaaccccgtgatgatcgatgccaaggaagtgagcgccgcccaccgggccagatacttctggggcaatctgcctggcatgaacagacccctggccagcaccgtgaacgacaagctggagctgcaggagtgcctggagcacggccggatcgccaagttcagcaaggtgagaaccatcaccacccgaagcaacagcatcaaacaaggcaaggaccagcactttcctgtgttcatgaacgagaaggaggacatcctgtggtgtaccgagatggagagagtgttcgggttcccagtccactacacagatgtcagcaacatgtctagactggccagacagagactgctgggaagaagctggtccgtccctgtgatcagacacctgttcgcccctctgaaggagtacttcgcctgcgtgagcagcggcaacagcaacgccaacagccggggccccagcttctctagcggcctggtgccactgtccctgagagggagccacatgggccccatggagatctacaaaaccgtgagcgcctggaagcggcagcctgtgcgcgtgctgagcctgtttcggaatatcgataaagtcctgaaaagcctgggattcctggagagcggctctggctccggcggtggcaccctgaagtacgtggaggatgtgacaaacgtggtcagacgggatgtggagaagtggggccccttcgatctggtgtacggcagcacccaacccctgggcagctcttgtgaccggtgccctggctggtacatgtttcagttccaccggatcctgcagtacgccctgccgagacaggagtcccagcggccattcttttggattttcatggacaacttgctgctgaccgaggatgaccaggaaactaccactcggttcctgcagaccgaagccgtgaccctgcaggacgtgagaggccgggactaccagaacgccatgcgggtgtggtccaacatccctggactgaaaagcaagcacgcacctctgacccctaaagaagaggagtacctgcaggcccaggtgcggagcagaagcaagctggacgcccctaaggtggatctgctggtgaagaattgcctcctgcccctgagagagtacttcaagtatttcagccagaatagtctgcccctgggaggcagcggcggcggcgtgaccgagctgctgaccttcaaggacatcagcgtggacttcacccaggaggagtggggccagctggcccccgcccacaggaacctgtacagggaggtgatgctggagaactacggcaacctggtgagcgtggccggctgccagctgagcaagcccagcgtgatcagccagctggagaagggcgaggagccctggatgaccgagaaggagggcgccggcgaccccagcagcgacctgaagagcggcggcccaagcagcggcgcccctcctcccagcggcggcaggcggcccaagcagcggcgcccctcctcccagcggcggcagcccagccggctccccaacctctaccgaggagggcacctctgagtccgccacccccgagagcggccctggcacctccaccgagcccagcgagggcagcgcacccggcagccctgccggcagccccacctccacagaggagggaaccagcaccgagcccagcgaaggcagcgccccaggcaccagcaccgagcctagtgagcaggagattaaacggatcaacaagatcagaagaagacttgtgaaagacagcaacaccaagaaggccggcaagacaggccccatgaaaaccctgctggttagagtgatgacacccgatctgagagagcggctggaaaacctgagaaagaagcctgaaaatatcccccagcccatcagcaatacatctagagccaacctgaataagctgctgaccgattacaccgaaatgaagaaggcgatcctgcatgtgtactgggaagagttccagaaggaccctgtgggcctgatgagccgggtggcccagcctgccagcaagaagatcgatcagaacaagctgaaacctgagatggacgagaagggcaacctgaccaccgccggctttgcctgctctcagtgtggccagcccctgttcgtgtacaagctggagcaggtgtctgagaagggcaaggcttacaccaactacttcggacggtgcaatgtggccgagcacgaaaagctgatcctgctggcccagctgaagcccgagaaggatagcgacgaagccgtgacatatagcctgggaaagtttgggcagagggccctggatttctacagcattcatgtgaccaaggagtccacccaccccgtgaagcccctggcccagatcgccggaaacagatacgcctccggacctgtgggaaaggccctgagcgacgcatgtatgggcacaatcgcctccttcctgtctaagtaccaggacatcatcatcgaacaccagaaggtggtgaagggcaaccagaagagactggagagcctgcgggagctggccggcaaggaaaacctggaataccctagcgtgaccctgccacctcagcctcacaccaaggagggcgttgatgcctacaacgaagtgatcgcccgggtgcgaatgtgggtgaacctgaacctgtggcagaagctgaagctaagcagagatgatgccaagcctctgctgagactgaagggattcccttcctttcctctggtcgagagacaggccaacgaagtggactggtgggacatggtgtgtaacgtgaagaagctgatcaacgagaaaaaggaggatggcaaggtgttttggcagaatctggctggctacaagagacaggaagccctgagaccatacctgagcagcgaggaagatcggaagaagggaaagaaattcgctcggtaccagctgggcgacctgctgctgcacctggaaaagaagcacggcgaggactggggaaaggtgtacgacgaggcctgggagcggattgacaagaaagtggaaggcctgagcaagcacatcaagctggaagaggaacggagaagcgaggacgcccagagcaaggccgccctgaccgactggctgcgggctaaggccagcttcgtgatcgagggcctgaaggaggccgacaaggacgagttctgcagatgcgagctgaagctgcagaagtggtacggggacctgcggggaaagcccttcgccatcgaagccgagaacagcatcctggacatcagcggcttcagcaagcagtacaactgtgccttcatctggcagaaggacggcgtgaagaagctgaacctgtacctgatcatcaactacttcaagggcggcaagctgcggttcaagaagatcaaacctgaagccttcgaagccaacagattctacaccgtgatcaacaaaaagagcggcgagatcgtgcccatggaggtgaacttcaacttcgacgaccccaacctgatcatcctgcctctggcctttggcaagagacagggcagagaattcatctggaacgacctgctgtccctggaaaccggcagcctgaagctggccaacggaagagtgatcgagaagacactgtacaacagaagaacccggcaggatgagcctgccctgttcgtggccctgaccttcgagcggcgggaggtcctggactcctccaatatcaaaccaatgaacctgatcggcgtggcaagaggcgaaaacatccccgccgtgatcgccctgaccgaccccgagggctgcccactgagccggtttaaggatagcctgggaaacccaacccacatcctgagaatcggcgagagctataaggagaagcagcggaccatccaggccaagaaggaggtggagcagcggagagccggcggctacagccggaagtacgccagcaaagccaagaatctggcagacgatatggtgagaaacaccgctagagatctgctgtactacgccgtgacccaggatgccatgctgatcttcgccaacctgagccggggcttcggccggcagggcaagcggaccttcatggccgagagacagtacacacggatggaggactggctgaccgccaagctggcctacgagggcctgagcaagacctacctgtccaagacactggcccagtacacctccaagacatgcagcaactgtgggtttaccatcaccagcgccgactacgacagggtgctggagaagctgaagaagacagcaacaggctggatgaccacaattaacggcaaggagctgaaggtggagggccagattacctactacaacagatacaagagacagaacgtagtcaaggacctgtccgtcgagctggatagactgagcgaagaatctgtgaacaacgacatctcctcctggacaaagggcagaagcggagaagctctgagcctcctgaagaaaagattctcccatagacccgtgcaggagaagttcgtgtgcctgaactgcggcttcgagacacacgcagccgagcaagccgccctgaacatcgccagatcctggctgttcctgcggagccaggagtacaagaaataccagacaaacaagacaaccggcaacaccgataagagagccttcgtcgagacctggcagtccttttaccggaagaagcttaaggaggtgtggaaacctgccgtgcggtctggcggatctggcggaggctccaccagccccaagaaaaagagaaaagtctaagctgccttctgcggggcttgccttctggccatgcccttcttctctcccttgcacctgtacctcttggtctttgaataaagcctgagtaggaaggctagcaaaaaaaaaaaaaaaaaaaaaaaaaaaaaaaaaaaaaaaaaaaaaaaaaaaaaaaaaaaaaaaaaaaaaaaaaaaaaaaagcccagccggctccccaacctctaccgaggagggcacctctgagtccgccacccccgagagcggccctggcacctccaccgagcccagcgagggcagcgcacccggcagccctgccggcagccccacctccacagaggagggaaccagcaccgagcccagcgaaggcagcgccccaggcaccagcaccgagcctagtgagcaggagattaaacggatcaacaagatcagaagaagacttgtgaaagacagcaacaccaagaaggccggcaagacaggccccatgaaaaccctgctggttagagtgatgacacccgatctgagagagcggctggaaaacctgagaaagaagcctgaaaatatcccccagcccatcagcaatacatctagagccaacctgaataagctgctgaccgattacaccgaaatgaagaaggcgatcctgcatgtgtactgggaagagttccagaaggaccctgtgggcctgatgagccgggtggcccagcctgccagcaagaagatcgatcagaacaagctgaaacctgagatggacgagaagggcaacctgaccaccgccggctttgcctgctctcagtgtggccagcccctgttcgtgtacaagctggagcaggtgtctgagaagggcaaggcttacaccaactacttcggacggtgcaatgtggccgagcacgaaaagctgatcctgctggcccagctgaagcccgagaaggatagcgacgaagccgtgacatatagcctgggaaagtttgggcagagggccctggatttctacagcattcatgtgaccaaggagtccacccaccccgtgaagcccctggcccagatcgccggaaacagatacgcctccggacctgtgggaaaggccctgagcgacgcatgtatgggcacaatcgcctccttcctgtctaagtaccaggacatcatcatcgaacaccagaaggtggtgaagggcaaccagaagagactggagagcctgcgggagctggccggcaaggaaaacctggaataccctagcgtgaccctgccacctcagcctcacaccaaggagggcgttgatgcctacaacgaagtgatcgcccgggtgcgaatgtgggtgaacctgaacctgtggcagaagctgaagctaagcagagatgatgccaagcctctgctgagactgaagggattcccttcctttcctctggtcgagagacaggccaacgaagtggactggtgggacatggtgtgtaacgtgaagaagctgatcaacgagaaaaaggaggatggcaaggtgttttggcagaatctggctggctacaagagacaggaagccctgagaccatacctgagcagcgaggaagatcggaagaagggaaagaaattcgctcggtaccagctgggcgacctgctgctgcacctggaaaagaagcacggcgaggactggggaaaggtgtacgacgaggcctgggagcggattgacaagaaagtggaaggcctgagcaagcacatcaagctggaagaggaacggagaagcgaggacgcccagagcaaggccgccctgaccgactggctgcgggctaaggccagcttcgtgatcgagggcctgaaggaggccgacaaggacgagttctgcagatgcgagctgaagctgcagaagtggtacggggacctgcggggaaagcccttcgccatcgaagccgagaacagcatcctggacatcagcggcttcagcaagcagtacaactgtgccttcatctggcagaaggacggcgtgaagaagctgaacctgtacctgatcatcaactacttcaagggcggcaagctgcggttcaagaagatcaaacctgaagccttcgaagccaacagattctacaccgtgatcaacaaaaagagcggcgagatcgtgcccatggaggtgaacttcaacttcgacgaccccaacctgatcatcctgcctctggcctttggcaagagacagggcagagaattcatctggaacgacctgctgtccctggaaaccggcagcctgaagctggccaacggaagagtgatcgagaagacactgtacaacagaagaacccggcaggatgagcctgccctgttcgtggccctgaccttcgagcggcgggaggtcctggactcctccaatatcaaaccaatgaacctgatcggcgtggcaagaggcgaaaacatccccgccgtgatcgccctgaccgaccccgagggctgcccactgagccggtttaaggatagcctgggaaacccaacccacatcctgagaatcggcgagagctataaggagaagcagcggaccatccaggccaagaaggaggtggagcagcggagagccggcggctacagccggaagtacgccagcaaagccaagaatctggcagacgatatggtgagaaacaccgctagagatctgctgtactacgccgtgacccaggatgccatgctgatcttcgccaacctgagccggggcttcggccggcagggcaagcggaccttcatggccgagagacagtacacacggatggaggactggctgaccgccaagctggcctacgagggcctgagcaagacctacctgtccaagacactggcccagtacacctccaagacatgcagcaactgtgggtttaccatcaccagcgccgactacgacagggtgctggagaagctgaagaagacagcaacaggctggatgaccacaattaacggcaaggagctgaaggtggagggccagattacctactacaacagatacaagagacagaacgtagtcaaggacctgtccgtcgagctggatagactgagcgaagaatctgtgaacaacgacatctcctcctggacaaagggcagaagcggagaagctctgagcctcctgaagaaaagattctcccatagacccgtgcaggagaagttcgtgtgcctgaactgcggcttcgagacacacgcagccgagcaagccgccctgaacatcgccagatcctggctgttcctgcggagccaggagtacaagaaataccagacaaacaagacaaccggcaacaccgataagagagccttcgtcgagacctggcagtccttttaccggaagaagcttaaggaggtgtggaaacctgccgtgcggtctggcggatctggcggaggctccaccagccccaagaaaaagagaaaagtctaagctgccttctgcggggcttgccttctggccatgcccttcttctctcccttgcacctgtacctcttggtctttgaataaagcctgagtaggaaggctagcaaaaaaaaaaaaaaaaaaaaaaaaaaaaaaaaaaaaaaaaaaaaaaaaaaaaaaaaaaaaaaaaaaaaaaaaaaaaaaaa

SEQ ID NO: 10416 - RNA, 8787 nt, synthetic construct
  source 1..8787: mol_type = other RNA
aggaaataagagagaaaagaagagtaagaagaaatataagagccaccatggcccctaagaagaagcgtaaagtgagccggatgaaccacgaccaggagttcgacccccctaaggtgtaccctcccgtccccgccgagaagagaaagcccatccgggtcctgagcctgttcgatggcatcgccaccggtctgctggtgctgaaggacctgggcatccaggtggataggtacattgcctccgaggtgtgcgaggactccatcaccgtgggaatggtgcgtcatcagggcaagatcatgtacgtgggcgacgtgcggagcgtgacacagaagcatatccaggagtggggccctttcgacctggtgatcggcggcagcccttgcaatgacctgagcatcgtgaacccagcccggaagggcctgtacgagggaaccggcagactgttcttcgagttttacagactgctgcacgacgcccggcctaaggaaggcgacgaccggcccttcttttggctgttcgagaatgtggtggccatgggagtcagcgacaagcgggatattagccggttcctggagagcaaccccgtgatgatcgatgccaaggaagtgagcgccgcccaccgggccagatacttctggggcaatctgcctggcatgaacagacccctggccagcaccgtgaacgacaagctggagctgcaggagtgcctggagcacggccggatcgccaagttcagcaaggtgagaaccatcaccacccgaagcaacagcatcaaacaaggcaaggaccagcactttcctgtgttcatgaacgagaaggaggacatcctgtggtgtaccgagatggagagagtgttcgggttcccagtccactacacagatgtcagcaacatgtctagactggccagacagagactgctgggaagaagctggtccgtccctgtgatcagacacctgttcgcccctctgaaggagtacttcgcctgcgtgagcagcggcaacagcaacgccaacagccggggccccagcttctctagcggcctggtgccactgtccctgagagggagccacatgggccccatggagatctacaaaaccgtgagcgcctggaagcggcagcctgtgcgcgtgctgagcctgtttcggaatatcgataaagtcctgaaaagcctgggattcctggagagcggctctggctccggcggtggcaccctgaagtacgtggaggatgtgacaaacgtggtcagacgggatgtggagaagtggggccccttcgatctggtgtacggcagcacccaacccctgggcagctcttgtgaccggtgccctggctggtacatgtttcagttccaccggatcctgcagtacgccctgccgagacaggagtcccagcggccattcttttggattttcatggacaacttgctgctgaccgaggatgaccaggaaactaccactcggttcctgcagaccgaagccgtgaccctgcaggacgtgagaggccgggactaccagaacgccatgcgggtgtggtccaacatccctggactgaaaagcaagcacgcacctctgacccctaaagaagaggagtacctgcaggcccaggtgcggagcagaagcaagctggacgcccctaaggtggatctgctggtgaagaattgcctcctgcccctgagagagtacttcaagtatttcagccagaatagtctgcccctgggaggcagcggcggcggcgacctggaccaggtgaccttcgaggacgtggtggtggacttcaccagggaggagtggggctgcctggagcccgcccagaggaccctgtacagggacgtgatgctggagaccttcaggctgctggtgagcgtgggccactggctgcccaagcccgacgtgatcagcctgctggagcaggaggccgagctgtgggccgccgacgagggcggccccaggggcatgtgccccgacctggagaccaggggcggcccaagcagcggcgcccctcctcccagcggcggcaggcggcccaagcagcggcgcccctcctcccagcggcggcagcccagccggctccccaacctctaccgaggagggcacctctgagtccgccacccccgagagcggccctggcacctccaccgagcccagcgagggcagcgcacccggcagccctgccggcagccccacctccacagaggagggaaccagcaccgagcccagcgaaggcagcgccccaggcaccagcaccgagcctagtgagcaggagattaaacggatcaacaagatcagaagaagacttgtgaaagacagcaacaccaagaaggccggcaagacaggccccatgaaaaccctgctggttagagtgatgacacccgatctgagagagcggctggaaaacctgagaaagaagcctgaaaatatcccccagcccatcagcaatacatctagagccaacctgaataagctgctgaccgattacaccgaaatgaagaaggcgatcctgcatgtgtactgggaagagttccagaaggaccctgtgggcctgatgagccgggtggcccagcctgccagcaagaagatcgatcagaacaagctgaaacctgagatggacgagaagggcaacctgaccaccgccggctttgcctgctctcagtgtggccagcccctgttcgtgtacaagctggagcaggtgtctgagaagggcaaggcttacaccaactacttcggacggtgcaatgtggccgagcacgaaaagctgatcctgctggcccagctgaagcccgagaaggatagcgacgaagccgtgacatatagcctgggaaagtttgggcagagggccctggatttctacagcattcatgtgaccaaggagtccacccaccccgtgaagcccctggcccagatcgccggaaacagatacgcctccggacctgtgggaaaggccctgagcgacgcatgtatgggcacaatcgcctccttcctgtctaagtaccaggacatcatcatcgaacaccagaaggtggtgaagggcaaccagaagagactggagagcctgcgggagctggccggcaaggaaaacctggaataccctagcgtgaccctgccacctcagcctcacaccaaggagggcgttgatgcctacaacgaagtgatcgcccgggtgcgaatgtgggtgaacctgaacctgtggcagaagctgaagctaagcagagatgatgccaagcctctgctgagactgaagggattcccttcctttcctctggtcgagagacaggccaacgaagtggactggtgggacatggtgtgtaacgtgaagaagctgatcaacgagaaaaaggaggatggcaaggtgttttggcagaatctggctggctacaagagacaggaagccctgagaccatacctgagcagcgaggaagatcggaagaagggaaagaaattcgctcggtaccagctgggcgacctgctgctgcacctggaaaagaagcacggcgaggactggggaaaggtgtacgacgaggcctgggagcggattgacaagaaagtggaaggcctgagcaagcacatcaagctggaagaggaacggagaagcgaggacgcccagagcaaggccgccctgaccgactggctgcgggctaaggccagcttcgtgatcgagggcctgaaggaggccgacaaggacgagttctgcagatgcgagctgaagctgcagaagtggtacggggacctgcggggaaagcccttcgccatcgaagccgagaacagcatcctggacatcagcggcttcagcaagcagtacaactgtgccttcatctggcagaaggacggcgtgaagaagctgaacctgtacctgatcatcaactacttcaagggcggcaagctgcggttcaagaagatcaaacctgaagccttcgaagccaacagattctacaccgtgatcaacaaaaagagcggcgagatcgtgcccatggaggtgaacttcaacttcgacgaccccaacctgatcatcctgcctctggcctttggcaagagacagggcagagaattcatctggaacgacctgctgtccctggaaaccggcagcctgaagctggccaacggaagagtgatcgagaagacactgtacaacagaagaacccggcaggatgagcctgccctgttcgtggccctgaccttcgagcggcgggaggtcctggactcctccaatatcaaaccaatgaacctgatcggcgtggcaagaggcgaaaacatccccgccgtgatcgccctgaccgaccccgagggctgcccactgagccggtttaaggatagcctgggaaacccaacccacatcctgagaatcggcgagagctataaggagaagcagcggaccatccaggccaagaaggaggtggagcagcggagagccggcggctacagccggaagtacgccagcaaagccaagaatctggcagacgatatggtgagaaacaccgctagagatctgctgtactacgccgtgacccaggatgccatgctgatcttcgccaacctgagccggggcttcggccggcagggcaagcggaccttcatggccgagagacagtacacacggatggaggactggctgaccgccaagctggcctacgagggcctgagcaagacctacctgtccaagacactggcccagtacacctccaagacatgcagcaactgtgggtttaccatcaccagcgccgactacgacagggtgctggagaagctgaagaagacagcaacaggctggatgaccacaattaacggcaaggagctgaaggtggagggccagattacctactacaacagatacaagagacagaacgtagtcaaggacctgtccgtcgagctggatagactgagcgaagaatctgtgaacaacgacatctcctcctggacaaagggcagaagcggagaagctctgagcctcctgaagaaaagattctcccatagacccgtgcaggagaagttcgtgtgcctgaactgcggcttcgagacacacgcagccgagcaagccgccctgaacatcgccagatcctggctgttcctgcggagccaggagtacaagaaataccagacaaacaagacaaccggcaacaccgataagagagccttcgtcgagacctggcagtccttttaccggaagaagcttaaggaggtgtggaaacctgccgtgcggtctggcggatctggcggaggctccaccagccccaagaaaaagagaaaagtctaagctgccttctgcggggcttgccttctggccatgcccttcttctctcccttgcacctgtacctcttggtctttgaataaagcctgagtaggaaggctagcaaaaaaaaaaaaaaaaaaaaaaaaaaaaaaaaaaaaaaaaaaaaaaaaaaaaaaaaaaaaaaaaaaaaaaaaaaaaaaaagcccagccggctccccaacctctaccgaggagggcacctctgagtccgccacccccgagagcggccctggcacctccaccgagcccagcgagggcagcgcacccggcagccctgccggcagccccacctccacagaggagggaaccagcaccgagcccagcgaaggcagcgccccaggcaccagcaccgagcctagtgagcaggagattaaacggatcaacaagatcagaagaagacttgtgaaagacagcaacaccaagaaggccggcaagacaggccccatgaaaaccctgctggttagagtgatgacacccgatctgagagagcggctggaaaacctgagaaagaagcctgaaaatatcccccagcccatcagcaatacatctagagccaacctgaataagctgctgaccgattacaccgaaatgaagaaggcgatcctgcatgtgtactgggaagagttccagaaggaccctgtgggcctgatgagccgggtggcccagcctgccagcaagaagatcgatcagaacaagctgaaacctgagatggacgagaagggcaacctgaccaccgccggctttgcctgctctcagtgtggccagcccctgttcgtgtacaagctggagcaggtgtctgagaagggcaaggcttacaccaactacttcggacggtgcaatgtggccgagcacgaaaagctgatcctgctggcccagctgaagcccgagaaggatagcgacgaagccgtgacatatagcctgggaaagtttgggcagagggccctggatttctacagcattcatgtgaccaaggagtccacccaccccgtgaagcccctggcccagatcgccggaaacagatacgcctccggacctgtgggaaaggccctgagcgacgcatgtatgggcacaatcgcctccttcctgtctaagtaccaggacatcatcatcgaacaccagaaggtggtgaagggcaaccagaagagactggagagcctgcgggagctggccggcaaggaaaacctggaataccctagcgtgaccctgccacctcagcctcacaccaaggagggcgttgatgcctacaacgaagtgatcgcccgggtgcgaatgtgggtgaacctgaacctgtggcagaagctgaagctaagcagagatgatgccaagcctctgctgagactgaagggattcccttcctttcctctggtcgagagacaggccaacgaagtggactggtgggacatggtgtgtaacgtgaagaagctgatcaacgagaaaaaggaggatggcaaggtgttttggcagaatctggctggctacaagagacaggaagccctgagaccatacctgagcagcgaggaagatcggaagaagggaaagaaattcgctcggtaccagctgggcgacctgctgctgcacctggaaaagaagcacggcgaggactggggaaaggtgtacgacgaggcctgggagcggattgacaagaaagtggaaggcctgagcaagcacatcaagctggaagaggaacggagaagcgaggacgcccagagcaaggccgccctgaccgactggctgcgggctaaggccagcttcgtgatcgagggcctgaaggaggccgacaaggacgagttctgcagatgcgagctgaagctgcagaagtggtacggggacctgcggggaaagcccttcgccatcgaagccgagaacagcatcctggacatcagcggcttcagcaagcagtacaactgtgccttcatctggcagaaggacggcgtgaagaagctgaacctgtacctgatcatcaactacttcaagggcggcaagctgcggttcaagaagatcaaacctgaagccttcgaagccaacagattctacaccgtgatcaacaaaaagagcggcgagatcgtgcccatggaggtgaacttcaacttcgacgaccccaacctgatcatcctgcctctggcctttggcaagagacagggcagagaattcatctggaacgacctgctgtccctggaaaccggcagcctgaagctggccaacggaagagtgatcgagaagacactgtacaacagaagaacccggcaggatgagcctgccctgttcgtggccctgaccttcgagcggcgggaggtcctggactcctccaatatcaaaccaatgaacctgatcggcgtggcaagaggcgaaaacatccccgccgtgatcgccctgaccgaccccgagggctgcccactgagccggtttaaggatagcctgggaaacccaacccacatcctgagaatcggcgagagctataaggagaagcagcggaccatccaggccaagaaggaggtggagcagcggagagccggcggctacagccggaagtacgccagcaaagccaagaatctggcagacgatatggtgagaaacaccgctagagatctgctgtactacgccgtgacccaggatgccatgctgatcttcgccaacctgagccggggcttcggccggcagggcaagcggaccttcatggccgagagacagtacacacggatggaggactggctgaccgccaagctggcctacgagggcctgagcaagacctacctgtccaagacactggcccagtacacctccaagacatgcagcaactgtgggtttaccatcaccagcgccgactacgacagggtgctggagaagctgaagaagacagcaacaggctggatgaccacaattaacggcaaggagctgaaggtggagggccagattacctactacaacagatacaagagacagaacgtagtcaaggacctgtccgtcgagctggatagactgagcgaagaatctgtgaacaacgacatctcctcctggacaaagggcagaagcggagaagctctgagcctcctgaagaaaagattctcccatagacccgtgcaggagaagttcgtgtgcctgaactgcggcttcgagacacacgcagccgagcaagccgccctgaacatcgccagatcctggctgttcctgcggagccaggagtacaagaaataccagacaaacaagacaaccggcaacaccgataagagagccttcgtcgagacctggcagtccttttaccggaagaagcttaaggaggtgtggaaacctgccgtgcggtctggcggatctggcggaggctccaccagccccaagaaaaagagaaaagtctaagctgccttctgcggggcttgccttctggccatgcccttcttctctcccttgcacctgtacctcttggtctttgaataaagcctgagtaggaaggctagcaaaaaaaaaaaaaaaaaaaaaaaaaaaaaaaaaaaaaaaaaaaaaaaaaaaaaaaaaaaaaaaaaaaaaaaaaaaaaaaa

SEQ ID NO: 10417 - RNA, 8787 nt, synthetic construct
  source 1..8787: mol_type = other RNA
aggaaataagagagaaaagaagagtaagaagaaatataagagccaccatggcccctaagaagaagcgtaaagtgagccggatgaaccacgaccaggagttcgacccccctaaggtgtaccctcccgtccccgccgagaagagaaagcccatccgggtcctgagcctgttcgatggcatcgccaccggtctgctggtgctgaaggacctgggcatccaggtggataggtacattgcctccgaggtgtgcgaggactccatcaccgtgggaatggtgcgtcatcagggcaagatcatgtacgtgggcgacgtgcggagcgtgacacagaagcatatccaggagtggggccctttcgacctggtgatcggcggcagcccttgcaatgacctgagcatcgtgaacccagcccggaagggcctgtacgagggaaccggcagactgttcttcgagttttacagactgctgcacgacgcccggcctaaggaaggcgacgaccggcccttcttttggctgttcgagaatgtggtggccatgggagtcagcgacaagcgggatattagccggttcctggagagcaaccccgtgatgatcgatgccaaggaagtgagcgccgcccaccgggccagatacttctggggcaatctgcctggcatgaacagacccctggccagcaccgtgaacgacaagctggagctgcaggagtgcctggagcacggccggatcgccaagttcagcaaggtgagaaccatcaccacccgaagcaacagcatcaaacaaggcaaggaccagcactttcctgtgttcatgaacgagaaggaggacatcctgtggtgtaccgagatggagagagtgttcgggttcccagtccactacacagatgtcagcaacatgtctagactggccagacagagactgctgggaagaagctggtccgtccctgtgatcagacacctgttcgcccctctgaaggagtacttcgcctgcgtgagcagcggcaacagcaacgccaacagccggggccccagcttctctagcggcctggtgccactgtccctgagagggagccacatgggccccatggagatctacaaaaccgtgagcgcctggaagcggcagcctgtgcgcgtgctgagcctgtttcggaatatcgataaagtcctgaaaagcctgggattcctggagagcggctctggctccggcggtggcaccctgaagtacgtggaggatgtgacaaacgtggtcagacgggatgtggagaagtggggccccttcgatctggtgtacggcagcacccaacccctgggcagctcttgtgaccggtgccctggctggtacatgtttcagttccaccggatcctgcagtacgccctgccgagacaggagtcccagcggccattcttttggattttcatggacaacttgctgctgaccgaggatgaccaggaaactaccactcggttcctgcagaccgaagccgtgaccctgcaggacgtgagaggccgggactaccagaacgccatgcgggtgtggtccaacatccctggactgaaaagcaagcacgcacctctgacccctaaagaagaggagtacctgcaggcccaggtgcggagcagaagcaagctggacgcccctaaggtggatctgctggtgaagaattgcctcctgcccctgagagagtacttcaagtatttcagccagaatagtctgcccctgggaggcagcggcggcggcgcccacggcagcgtgaccttcagggacgtggccatggacttcagccagcaggagtgggagtgcctgaaccccttccagaagaccctgtacagggacgtgatgatggagaactacggcaacctggtgagcctgggccacagcatcagcaagcccgacgtgatcaccctgctggagcagggcaaggagccctggatgatcgtgaagaaggagaccaggaagtggaggaaggacctggagagcaggggcggcccaagcagcggcgcccctcctcccagcggcggcaggcggcccaagcagcggcgcccctcctcccagcggcggcagcccagccggctccccaacctctaccgaggagggcacctctgagtccgccacccccgagagcggccctggcacctccaccgagcccagcgagggcagcgcacccggcagccctgccggcagccccacctccacagaggagggaaccagcaccgagcccagcgaaggcagcgccccaggcaccagcaccgagcctagtgagcaggagattaaacggatcaacaagatcagaagaagacttgtgaaagacagcaacaccaagaaggccggcaagacaggccccatgaaaaccctgctggttagagtgatgacacccgatctgagagagcggctggaaaacctgagaaagaagcctgaaaatatcccccagcccatcagcaatacatctagagccaacctgaataagctgctgaccgattacaccgaaatgaagaaggcgatcctgcatgtgtactgggaagagttccagaaggaccctgtgggcctgatgagccgggtggcccagcctgccagcaagaagatcgatcagaacaagctgaaacctgagatggacgagaagggcaacctgaccaccgccggctttgcctgctctcagtgtggccagcccctgttcgtgtacaagctggagcaggtgtctgagaagggcaaggcttacaccaactacttcggacggtgcaatgtggccgagcacgaaaagctgatcctgctggcccagctgaagcccgagaaggatagcgacgaagccgtgacatatagcctgggaaagtttgggcagagggccctggatttctacagcattcatgtgaccaaggagtccacccaccccgtgaagcccctggcccagatcgccggaaacagatacgcctccggacctgtgggaaaggccctgagcgacgcatgtatgggcacaatcgcctccttcctgtctaagtaccaggacatcatcatcgaacaccagaaggtggtgaagggcaaccagaagagactggagagcctgcgggagctggccggcaaggaaaacctggaataccctagcgtgaccctgccacctcagcctcacaccaaggagggcgttgatgcctacaacgaagtgatcgcccgggtgcgaatgtgggtgaacctgaacctgtggcagaagctgaagctaagcagagatgatgccaagcctctgctgagactgaagggattcccttcctttcctctggtcgagagacaggccaacgaagtggactggtgggacatggtgtgtaacgtgaagaagctgatcaacgagaaaaaggaggatggcaaggtgttttggcagaatctggctggctacaagagacaggaagccctgagaccatacctgagcagcgaggaagatcggaagaagggaaagaaattcgctcggtaccagctgggcgacctgctgctgcacctggaaaagaagcacggcgaggactggggaaaggtgtacgacgaggcctgggagcggattgacaagaaagtggaaggcctgagcaagcacatcaagctggaagaggaacggagaagcgaggacgcccagagcaaggccgccctgaccgactggctgcgggctaaggccagcttcgtgatcgagggcctgaaggaggccgacaaggacgagttctgcagatgcgagctgaagctgcagaagtggtacggggacctgcggggaaagcccttcgccatcgaagccgagaacagcatcctggacatcagcggcttcagcaagcagtacaactgtgccttcatctggcagaaggacggcgtgaagaagctgaacctgtacctgatcatcaactacttcaagggcggcaagctgcggttcaagaagatcaaacctgaagccttcgaagccaacagattctacaccgtgatcaacaaaaagagcggcgagatcgtgcccatggaggtgaacttcaacttcgacgaccccaacctgatcatcctgcctctggcctttggcaagagacagggcagagaattcatctggaacgacctgctgtccctggaaaccggcagcctgaagctggccaacggaagagtgatcgagaagacactgtacaacagaagaacccggcaggatgagcctgccctgttcgtggccctgaccttcgagcggcgggaggtcctggactcctccaatatcaaaccaatgaacctgatcggcgtggcaagaggcgaaaacatccccgccgtgatcgccctgaccgaccccgagggctgcccactgagccggtttaaggatagcctgggaaacccaacccacatcctgagaatcggcgagagctataaggagaagcagcggaccatccaggccaagaaggaggtggagcagcggagagccggcggctacagccggaagtacgccagcaaagccaagaatctggcagacgatatggtgagaaacaccgctagagatctgctgtactacgccgtgacccaggatgccatgctgatcttcgccaacctgagccggggcttcggccggcagggcaagcggaccttcatggccgagagacagtacacacggatggaggactggctgaccgccaagctggcctacgagggcctgagcaagacctacctgtccaagacactggcccagtacacctccaagacatgcagcaactgtgggtttaccatcaccagcgccgactacgacagggtgctggagaagctgaagaagacagcaacaggctggatgaccacaattaacggcaaggagctgaaggtggagggccagattacctactacaacagatacaagagacagaacgtagtcaaggacctgtccgtcgagctggatagactgagcgaagaatctgtgaacaacgacatctcctcctggacaaagggcagaagcggagaagctctgagcctcctgaagaaaagattctcccatagacccgtgcaggagaagttcgtgtgcctgaactgcggcttcgagacacacgcagccgagcaagccgccctgaacatcgccagatcctggctgttcctgcggagccaggagtacaagaaataccagacaaacaagacaaccggcaacaccgataagagagccttcgtcgagacctggcagtccttttaccggaagaagcttaaggaggtgtggaaacctgccgtgcggtctggcggatctggcggaggctccaccagccccaagaaaaagagaaaagtctaagctgccttctgcggggcttgccttctggccatgcccttcttctctcccttgcacctgtacctcttggtctttgaataaagcctgagtaggaaggctagcaaaaaaaaaaaaaaaaaaaaaaaaaaaaaaaaaaaaaaaaaaaaaaaaaaaaaaaaaaaaaaaaaaaaaaaaaaaaaaaagcccagccggctccccaacctctaccgaggagggcacctctgagtccgccacccccgagagcggccctggcacctccaccgagcccagcgagggcagcgcacccggcagccctgccggcagccccacctccacagaggagggaaccagcaccgagcccagcgaaggcagcgccccaggcaccagcaccgagcctagtgagcaggagattaaacggatcaacaagatcagaagaagacttgtgaaagacagcaacaccaagaaggccggcaagacaggccccatgaaaaccctgctggttagagtgatgacacccgatctgagagagcggctggaaaacctgagaaagaagcctgaaaatatcccccagcccatcagcaatacatctagagccaacctgaataagctgctgaccgattacaccgaaatgaagaaggcgatcctgcatgtgtactgggaagagttccagaaggaccctgtgggcctgatgagccgggtggcccagcctgccagcaagaagatcgatcagaacaagctgaaacctgagatggacgagaagggcaacctgaccaccgccggctttgcctgctctcagtgtggccagcccctgttcgtgtacaagctggagcaggtgtctgagaagggcaaggcttacaccaactacttcggacggtgcaatgtggccgagcacgaaaagctgatcctgctggcccagctgaagcccgagaaggatagcgacgaagccgtgacatatagcctgggaaagtttgggcagagggccctggatttctacagcattcatgtgaccaaggagtccacccaccccgtgaagcccctggcccagatcgccggaaacagatacgcctccggacctgtgggaaaggccctgagcgacgcatgtatgggcacaatcgcctccttcctgtctaagtaccaggacatcatcatcgaacaccagaaggtggtgaagggcaaccagaagagactggagagcctgcgggagctggccggcaaggaaaacctggaataccctagcgtgaccctgccacctcagcctcacaccaaggagggcgttgatgcctacaacgaagtgatcgcccgggtgcgaatgtgggtgaacctgaacctgtggcagaagctgaagctaagcagagatgatgccaagcctctgctgagactgaagggattcccttcctttcctctggtcgagagacaggccaacgaagtggactggtgggacatggtgtgtaacgtgaagaagctgatcaacgagaaaaaggaggatggcaaggtgttttggcagaatctggctggctacaagagacaggaagccctgagaccatacctgagcagcgaggaagatcggaagaagggaaagaaattcgctcggtaccagctgggcgacctgctgctgcacctggaaaagaagcacggcgaggactggggaaaggtgtacgacgaggcctgggagcggattgacaagaaagtggaaggcctgagcaagcacatcaagctggaagaggaacggagaagcgaggacgcccagagcaaggccgccctgaccgactggctgcgggctaaggccagcttcgtgatcgagggcctgaaggaggccgacaaggacgagttctgcagatgcgagctgaagctgcagaagtggtacggggacctgcggggaaagcccttcgccatcgaagccgagaacagcatcctggacatcagcggcttcagcaagcagtacaactgtgccttcatctggcagaaggacggcgtgaagaagctgaacctgtacctgatcatcaactacttcaagggcggcaagctgcggttcaagaagatcaaacctgaagccttcgaagccaacagattctacaccgtgatcaacaaaaagagcggcgagatcgtgcccatggaggtgaacttcaacttcgacgaccccaacctgatcatcctgcctctggcctttggcaagagacagggcagagaattcatctggaacgacctgctgtccctggaaaccggcagcctgaagctggccaacggaagagtgatcgagaagacactgtacaacagaagaacccggcaggatgagcctgccctgttcgtggccctgaccttcgagcggcgggaggtcctggactcctccaatatcaaaccaatgaacctgatcggcgtggcaagaggcgaaaacatccccgccgtgatcgccctgaccgaccccgagggctgcccactgagccggtttaaggatagcctgggaaacccaacccacatcctgagaatcggcgagagctataaggagaagcagcggaccatccaggccaagaaggaggtggagcagcggagagccggcggctacagccggaagtacgccagcaaagccaagaatctggcagacgatatggtgagaaacaccgctagagatctgctgtactacgccgtgacccaggatgccatgctgatcttcgccaacctgagccggggcttcggccggcagggcaagcggaccttcatggccgagagacagtacacacggatggaggactggctgaccgccaagctggcctacgagggcctgagcaagacctacctgtccaagacactggcccagtacacctccaagacatgcagcaactgtgggtttaccatcaccagcgccgactacgacagggtgctggagaagctgaagaagacagcaacaggctggatgaccacaattaacggcaaggagctgaaggtggagggccagattacctactacaacagatacaagagacagaacgtagtcaaggacctgtccgtcgagctggatagactgagcgaagaatctgtgaacaacgacatctcctcctggacaaagggcagaagcggagaagctctgagcctcctgaagaaaagattctcccatagacccgtgcaggagaagttcgtgtgcctgaactgcggcttcgagacacacgcagccgagcaagccgccctgaacatcgccagatcctggctgttcctgcggagccaggagtacaagaaataccagacaaacaagacaaccggcaacaccgataagagagccttcgtcgagacctggcagtccttttaccggaagaagcttaaggaggtgtggaaacctgccgtgcggtctggcggatctggcggaggctccaccagccccaagaaaaagagaaaagtctaagctgccttctgcggggcttgccttctggccatgcccttcttctctcccttgcacctgtacctcttggtctttgaataaagcctgagtaggaaggctagcaaaaaaaaaaaaaaaaaaaaaaaaaaaaaaaaaaaaaaaaaaaaaaaaaaaaaaaaaaaaaaaaaaaaaaaaaaaaaaaa

SEQ ID NO: 10418 - RNA, 8787 nt, synthetic construct
  source 1..8787: mol_type = other RNA
aggaaataagagagaaaagaagagtaagaagaaatataagagccaccatggcccctaagaagaagcgtaaagtgagccggatgaaccacgaccaggagttcgacccccctaaggtgtaccctcccgtccccgccgagaagagaaagcccatccgggtcctgagcctgttcgatggcatcgccaccggtctgctggtgctgaaggacctgggcatccaggtggataggtacattgcctccgaggtgtgcgaggactccatcaccgtgggaatggtgcgtcatcagggcaagatcatgtacgtgggcgacgtgcggagcgtgacacagaagcatatccaggagtggggccctttcgacctggtgatcggcggcagcccttgcaatgacctgagcatcgtgaacccagcccggaagggcctgtacgagggaaccggcagactgttcttcgagttttacagactgctgcacgacgcccggcctaaggaaggcgacgaccggcccttcttttggctgttcgagaatgtggtggccatgggagtcagcgacaagcgggatattagccggttcctggagagcaaccccgtgatgatcgatgccaaggaagtgagcgccgcccaccgggccagatacttctggggcaatctgcctggcatgaacagacccctggccagcaccgtgaacgacaagctggagctgcaggagtgcctggagcacggccggatcgccaagttcagcaaggtgagaaccatcaccacccgaagcaacagcatcaaacaaggcaaggaccagcactttcctgtgttcatgaacgagaaggaggacatcctgtggtgtaccgagatggagagagtgttcgggttcccagtccactacacagatgtcagcaacatgtctagactggccagacagagactgctgggaagaagctggtccgtccctgtgatcagacacctgttcgcccctctgaaggagtacttcgcctgcgtgagcagcggcaacagcaacgccaacagccggggccccagcttctctagcggcctggtgccactgtccctgagagggagccacatgggccccatggagatctacaaaaccgtgagcgcctggaagcggcagcctgtgcgcgtgctgagcctgtttcggaatatcgataaagtcctgaaaagcctgggattcctggagagcggctctggctccggcggtggcaccctgaagtacgtggaggatgtgacaaacgtggtcagacgggatgtggagaagtggggccccttcgatctggtgtacggcagcacccaacccctgggcagctcttgtgaccggtgccctggctggtacatgtttcagttccaccggatcctgcagtacgccctgccgagacaggagtcccagcggccattcttttggattttcatggacaacttgctgctgaccgaggatgaccaggaaactaccactcggttcctgcagaccgaagccgtgaccctgcaggacgtgagaggccgggactaccagaacgccatgcgggtgtggtccaacatccctggactgaaaagcaagcacgcacctctgacccctaaagaagaggagtacctgcaggcccaggtgcggagcagaagcaagctggacgcccctaaggtggatctgctggtgaagaattgcctcctgcccctgagagagtacttcaagtatttcagccagaatagtctgcccctgggaggcagcggcggcggcgcccaggagagcgtgaccttcgaggacgtggccgtgaacttcaccaacagggagtggcagagcctgacctacgcccagaggcacctgtacaagcacgtgatgctggagaactacaggaacatggtgagcctgggcttccccttccccaagccccccctgatcagccacctggagaggggcgtggagccctgcgtgcaggacccccaggacaaggagagcctgagctgcagctaccccgtgagcggcggcccaagcagcggcgcccctcctcccagcggcggcaggcggcccaagcagcggcgcccctcctcccagcggcggcagcccagccggctccccaacctctaccgaggagggcacctctgagtccgccacccccgagagcggccctggcacctccaccgagcccagcgagggcagcgcacccggcagccctgccggcagccccacctccacagaggagggaaccagcaccgagcccagcgaaggcagcgccccaggcaccagcaccgagcctagtgagcaggagattaaacggatcaacaagatcagaagaagacttgtgaaagacagcaacaccaagaaggccggcaagacaggccccatgaaaaccctgctggttagagtgatgacacccgatctgagagagcggctggaaaacctgagaaagaagcctgaaaatatcccccagcccatcagcaatacatctagagccaacctgaataagctgctgaccgattacaccgaaatgaagaaggcgatcctgcatgtgtactgggaagagttccagaaggaccctgtgggcctgatgagccgggtggcccagcctgccagcaagaagatcgatcagaacaagctgaaacctgagatggacgagaagggcaacctgaccaccgccggctttgcctgctctcagtgtggccagcccctgttcgtgtacaagctggagcaggtgtctgagaagggcaaggcttacaccaactacttcggacggtgcaatgtggccgagcacgaaaagctgatcctgctggcccagctgaagcccgagaaggatagcgacgaagccgtgacatatagcctgggaaagtttgggcagagggccctggatttctacagcattcatgtgaccaaggagtccacccaccccgtgaagcccctggcccagatcgccggaaacagatacgcctccggacctgtgggaaaggccctgagcgacgcatgtatgggcacaatcgcctccttcctgtctaagtaccaggacatcatcatcgaacaccagaaggtggtgaagggcaaccagaagagactggagagcctgcgggagctggccggcaaggaaaacctggaataccctagcgtgaccctgccacctcagcctcacaccaaggagggcgttgatgcctacaacgaagtgatcgcccgggtgcgaatgtgggtgaacctgaacctgtggcagaagctgaagctaagcagagatgatgccaagcctctgctgagactgaagggattcccttcctttcctctggtcgagagacaggccaacgaagtggactggtgggacatggtgtgtaacgtgaagaagctgatcaacgagaaaaaggaggatggcaaggtgttttggcagaatctggctggctacaagagacaggaagccctgagaccatacctgagcagcgaggaagatcggaagaagggaaagaaattcgctcggtaccagctgggcgacctgctgctgcacctggaaaagaagcacggcgaggactggggaaaggtgtacgacgaggcctgggagcggattgacaagaaagtggaaggcctgagcaagcacatcaagctggaagaggaacggagaagcgaggacgcccagagcaaggccgccctgaccgactggctgcgggctaaggccagcttcgtgatcgagggcctgaaggaggccgacaaggacgagttctgcagatgcgagctgaagctgcagaagtggtacggggacctgcggggaaagcccttcgccatcgaagccgagaacagcatcctggacatcagcggcttcagcaagcagtacaactgtgccttcatctggcagaaggacggcgtgaagaagctgaacctgtacctgatcatcaactacttcaagggcggcaagctgcggttcaagaagatcaaacctgaagccttcgaagccaacagattctacaccgtgatcaacaaaaagagcggcgagatcgtgcccatggaggtgaacttcaacttcgacgaccccaacctgatcatcctgcctctggcctttggcaagagacagggcagagaattcatctggaacgacctgctgtccctggaaaccggcagcctgaagctggccaacggaagagtgatcgagaagacactgtacaacagaagaacccggcaggatgagcctgccctgttcgtggccctgaccttcgagcggcgggaggtcctggactcctccaatatcaaaccaatgaacctgatcggcgtggcaagaggcgaaaacatccccgccgtgatcgccctgaccgaccccgagggctgcccactgagccggtttaaggatagcctgggaaacccaacccacatcctgagaatcggcgagagctataaggagaagcagcggaccatccaggccaagaaggaggtggagcagcggagagccggcggctacagccggaagtacgccagcaaagccaagaatctggcagacgatatggtgagaaacaccgctagagatctgctgtactacgccgtgacccaggatgccatgctgatcttcgccaacctgagccggggcttcggccggcagggcaagcggaccttcatggccgagagacagtacacacggatggaggactggctgaccgccaagctggcctacgagggcctgagcaagacctacctgtccaagacactggcccagtacacctccaagacatgcagcaactgtgggtttaccatcaccagcgccgactacgacagggtgctggagaagctgaagaagacagcaacaggctggatgaccacaattaacggcaaggagctgaaggtggagggccagattacctactacaacagatacaagagacagaacgtagtcaaggacctgtccgtcgagctggatagactgagcgaagaatctgtgaacaacgacatctcctcctggacaaagggcagaagcggagaagctctgagcctcctgaagaaaagattctcccatagacccgtgcaggagaagttcgtgtgcctgaactgcggcttcgagacacacgcagccgagcaagccgccctgaacatcgccagatcctggctgttcctgcggagccaggagtacaagaaataccagacaaacaagacaaccggcaacaccgataagagagccttcgtcgagacctggcagtccttttaccggaagaagcttaaggaggtgtggaaacctgccgtgcggtctggcggatctggcggaggctccaccagccccaagaaaaagagaaaagtctaagctgccttctgcggggcttgccttctggccatgcccttcttctctcccttgcacctgtacctcttggtctttgaataaagcctgagtaggaaggctagcaaaaaaaaaaaaaaaaaaaaaaaaaaaaaaaaaaaaaaaaaaaaaaaaaaaaaaaaaaaaaaaaaaaaaaaaaaaaaaaagcccagccggctccccaacctctaccgaggagggcacctctgagtccgccacccccgagagcggccctggcacctccaccgagcccagcgagggcagcgcacccggcagccctgccggcagccccacctccacagaggagggaaccagcaccgagcccagcgaaggcagcgccccaggcaccagcaccgagcctagtgagcaggagattaaacggatcaacaagatcagaagaagacttgtgaaagacagcaacaccaagaaggccggcaagacaggccccatgaaaaccctgctggttagagtgatgacacccgatctgagagagcggctggaaaacctgagaaagaagcctgaaaatatcccccagcccatcagcaatacatctagagccaacctgaataagctgctgaccgattacaccgaaatgaagaaggcgatcctgcatgtgtactgggaagagttccagaaggaccctgtgggcctgatgagccgggtggcccagcctgccagcaagaagatcgatcagaacaagctgaaacctgagatggacgagaagggcaacctgaccaccgccggctttgcctgctctcagtgtggccagcccctgttcgtgtacaagctggagcaggtgtctgagaagggcaaggcttacaccaactacttcggacggtgcaatgtggccgagcacgaaaagctgatcctgctggcccagctgaagcccgagaaggatagcgacgaagccgtgacatatagcctgggaaagtttgggcagagggccctggatttctacagcattcatgtgaccaaggagtccacccaccccgtgaagcccctggcccagatcgccggaaacagatacgcctccggacctgtgggaaaggccctgagcgacgcatgtatgggcacaatcgcctccttcctgtctaagtaccaggacatcatcatcgaacaccagaaggtggtgaagggcaaccagaagagactggagagcctgcgggagctggccggcaaggaaaacctggaataccctagcgtgaccctgccacctcagcctcacaccaaggagggcgttgatgcctacaacgaagtgatcgcccgggtgcgaatgtgggtgaacctgaacctgtggcagaagctgaagctaagcagagatgatgccaagcctctgctgagactgaagggattcccttcctttcctctggtcgagagacaggccaacgaagtggactggtgggacatggtgtgtaacgtgaagaagctgatcaacgagaaaaaggaggatggcaaggtgttttggcagaatctggctggctacaagagacaggaagccctgagaccatacctgagcagcgaggaagatcggaagaagggaaagaaattcgctcggtaccagctgggcgacctgctgctgcacctggaaaagaagcacggcgaggactggggaaaggtgtacgacgaggcctgggagcggattgacaagaaagtggaaggcctgagcaagcacatcaagctggaagaggaacggagaagcgaggacgcccagagcaaggccgccctgaccgactggctgcgggctaaggccagcttcgtgatcgagggcctgaaggaggccgacaaggacgagttctgcagatgcgagctgaagctgcagaagtggtacggggacctgcggggaaagcccttcgccatcgaagccgagaacagcatcctggacatcagcggcttcagcaagcagtacaactgtgccttcatctggcagaaggacggcgtgaagaagctgaacctgtacctgatcatcaactacttcaagggcggcaagctgcggttcaagaagatcaaacctgaagccttcgaagccaacagattctacaccgtgatcaacaaaaagagcggcgagatcgtgcccatggaggtgaacttcaacttcgacgaccccaacctgatcatcctgcctctggcctttggcaagagacagggcagagaattcatctggaacgacctgctgtccctggaaaccggcagcctgaagctggccaacggaagagtgatcgagaagacactgtacaacagaagaacccggcaggatgagcctgccctgttcgtggccctgaccttcgagcggcgggaggtcctggactcctccaatatcaaaccaatgaacctgatcggcgtggcaagaggcgaaaacatccccgccgtgatcgccctgaccgaccccgagggctgcccactgagccggtttaaggatagcctgggaaacccaacccacatcctgagaatcggcgagagctataaggagaagcagcggaccatccaggccaagaaggaggtggagcagcggagagccggcggctacagccggaagtacgccagcaaagccaagaatctggcagacgatatggtgagaaacaccgctagagatctgctgtactacgccgtgacccaggatgccatgctgatcttcgccaacctgagccggggcttcggccggcagggcaagcggaccttcatggccgagagacagtacacacggatggaggactggctgaccgccaagctggcctacgagggcctgagcaagacctacctgtccaagacactggcccagtacacctccaagacatgcagcaactgtgggtttaccatcaccagcgccgactacgacagggtgctggagaagctgaagaagacagcaacaggctggatgaccacaattaacggcaaggagctgaaggtggagggccagattacctactacaacagatacaagagacagaacgtagtcaaggacctgtccgtcgagctggatagactgagcgaagaatctgtgaacaacgacatctcctcctggacaaagggcagaagcggagaagctctgagcctcctgaagaaaagattctcccatagacccgtgcaggagaagttcgtgtgcctgaactgcggcttcgagacacacgcagccgagcaagccgccctgaacatcgccagatcctggctgttcctgcggagccaggagtacaagaaataccagacaaacaagacaaccggcaacaccgataagagagccttcgtcgagacctggcagtccttttaccggaagaagcttaaggaggtgtggaaacctgccgtgcggtctggcggatctggcggaggctccaccagccccaagaaaaagagaaaagtctaagctgccttctgcggggcttgccttctggccatgcccttcttctctcccttgcacctgtacctcttggtctttgaataaagcctgagtaggaaggctagcaaaaaaaaaaaaaaaaaaaaaaaaaaaaaaaaaaaaaaaaaaaaaaaaaaaaaaaaaaaaaaaaaaaaaaaaaaaaaaaa

SEQ ID NO: 10419 - RNA, 8787 nt, synthetic construct
  source 1..8787: mol_type = other RNA
aggaaataagagagaaaagaagagtaagaagaaatataagagccaccatggcccctaagaagaagcgtaaagtgagccggatgaaccacgaccaggagttcgacccccctaaggtgtaccctcccgtccccgccgagaagagaaagcccatccgggtcctgagcctgttcgatggcatcgccaccggtctgctggtgctgaaggacctgggcatccaggtggataggtacattgcctccgaggtgtgcgaggactccatcaccgtgggaatggtgcgtcatcagggcaagatcatgtacgtgggcgacgtgcggagcgtgacacagaagcatatccaggagtggggccctttcgacctggtgatcggcggcagcccttgcaatgacctgagcatcgtgaacccagcccggaagggcctgtacgagggaaccggcagactgttcttcgagttttacagactgctgcacgacgcccggcctaaggaaggcgacgaccggcccttcttttggctgttcgagaatgtggtggccatgggagtcagcgacaagcgggatattagccggttcctggagagcaaccccgtgatgatcgatgccaaggaagtgagcgccgcccaccgggccagatacttctggggcaatctgcctggcatgaacagacccctggccagcaccgtgaacgacaagctggagctgcaggagtgcctggagcacggccggatcgccaagttcagcaaggtgagaaccatcaccacccgaagcaacagcatcaaacaaggcaaggaccagcactttcctgtgttcatgaacgagaaggaggacatcctgtggtgtaccgagatggagagagtgttcgggttcccagtccactacacagatgtcagcaacatgtctagactggccagacagagactgctgggaagaagctggtccgtccctgtgatcagacacctgttcgcccctctgaaggagtacttcgcctgcgtgagcagcggcaacagcaacgccaacagccggggccccagcttctctagcggcctggtgccactgtccctgagagggagccacatgggccccatggagatctacaaaaccgtgagcgcctggaagcggcagcctgtgcgcgtgctgagcctgtttcggaatatcgataaagtcctgaaaagcctgggattcctggagagcggctctggctccggcggtggcaccctgaagtacgtggaggatgtgacaaacgtggtcagacgggatgtggagaagtggggccccttcgatctggtgtacggcagcacccaacccctgggcagctcttgtgaccggtgccctggctggtacatgtttcagttccaccggatcctgcagtacgccctgccgagacaggagtcccagcggccattcttttggattttcatggacaacttgctgctgaccgaggatgaccaggaaactaccactcggttcctgcagaccgaagccgtgaccctgcaggacgtgagaggccgggactaccagaacgccatgcgggtgtggtccaacatccctggactgaaaagcaagcacgcacctctgacccctaaagaagaggagtacctgcaggcccaggtgcggagcagaagcaagctggacgcccctaaggtggatctgctggtgaagaattgcctcctgcccctgagagagtacttcaagtatttcagccagaatagtctgcccctgggaggcagcggcggcggcatgcaggagagcgtgaccttcaaggacgtggccgtggacttcacccaggaggagtggaagcagctggaccccgcccagagggacctgtacagggacgtgatgctggagaactacaggaacctggtgagcctgggcctgcccgtgttcaagcccgacgtgatcagccagctggagaagggcgaggccccctggacccccgaggtgcccaggagcacctgcagcggcagcttcagccaggaggccggcggcccaagcagcggcgcccctcctcccagcggcggcaggcggcccaagcagcggcgcccctcctcccagcggcggcagcccagccggctccccaacctctaccgaggagggcacctctgagtccgccacccccgagagcggccctggcacctccaccgagcccagcgagggcagcgcacccggcagccctgccggcagccccacctccacagaggagggaaccagcaccgagcccagcgaaggcagcgccccaggcaccagcaccgagcctagtgagcaggagattaaacggatcaacaagatcagaagaagacttgtgaaagacagcaacaccaagaaggccggcaagacaggccccatgaaaaccctgctggttagagtgatgacacccgatctgagagagcggctggaaaacctgagaaagaagcctgaaaatatcccccagcccatcagcaatacatctagagccaacctgaataagctgctgaccgattacaccgaaatgaagaaggcgatcctgcatgtgtactgggaagagttccagaaggaccctgtgggcctgatgagccgggtggcccagcctgccagcaagaagatcgatcagaacaagctgaaacctgagatggacgagaagggcaacctgaccaccgccggctttgcctgctctcagtgtggccagcccctgttcgtgtacaagctggagcaggtgtctgagaagggcaaggcttacaccaactacttcggacggtgcaatgtggccgagcacgaaaagctgatcctgctggcccagctgaagcccgagaaggatagcgacgaagccgtgacatatagcctgggaaagtttgggcagagggccctggatttctacagcattcatgtgaccaaggagtccacccaccccgtgaagcccctggcccagatcgccggaaacagatacgcctccggacctgtgggaaaggccctgagcgacgcatgtatgggcacaatcgcctccttcctgtctaagtaccaggacatcatcatcgaacaccagaaggtggtgaagggcaaccagaagagactggagagcctgcgggagctggccggcaaggaaaacctggaataccctagcgtgaccctgccacctcagcctcacaccaaggagggcgttgatgcctacaacgaagtgatcgcccgggtgcgaatgtgggtgaacctgaacctgtggcagaagctgaagctaagcagagatgatgccaagcctctgctgagactgaagggattcccttcctttcctctggtcgagagacaggccaacgaagtggactggtgggacatggtgtgtaacgtgaagaagctgatcaacgagaaaaaggaggatggcaaggtgttttggcagaatctggctggctacaagagacaggaagccctgagaccatacctgagcagcgaggaagatcggaagaagggaaagaaattcgctcggtaccagctgggcgacctgctgctgcacctggaaaagaagcacggcgaggactggggaaaggtgtacgacgaggcctgggagcggattgacaagaaagtggaaggcctgagcaagcacatcaagctggaagaggaacggagaagcgaggacgcccagagcaaggccgccctgaccgactggctgcgggctaaggccagcttcgtgatcgagggcctgaaggaggccgacaaggacgagttctgcagatgcgagctgaagctgcagaagtggtacggggacctgcggggaaagcccttcgccatcgaagccgagaacagcatcctggacatcagcggcttcagcaagcagtacaactgtgccttcatctggcagaaggacggcgtgaagaagctgaacctgtacctgatcatcaactacttcaagggcggcaagctgcggttcaagaagatcaaacctgaagccttcgaagccaacagattctacaccgtgatcaacaaaaagagcggcgagatcgtgcccatggaggtgaacttcaacttcgacgaccccaacctgatcatcctgcctctggcctttggcaagagacagggcagagaattcatctggaacgacctgctgtccctggaaaccggcagcctgaagctggccaacggaagagtgatcgagaagacactgtacaacagaagaacccggcaggatgagcctgccctgttcgtggccctgaccttcgagcggcgggaggtcctggactcctccaatatcaaaccaatgaacctgatcggcgtggcaagaggcgaaaacatccccgccgtgatcgccctgaccgaccccgagggctgcccactgagccggtttaaggatagcctgggaaacccaacccacatcctgagaatcggcgagagctataaggagaagcagcggaccatccaggccaagaaggaggtggagcagcggagagccggcggctacagccggaagtacgccagcaaagccaagaatctggcagacgatatggtgagaaacaccgctagagatctgctgtactacgccgtgacccaggatgccatgctgatcttcgccaacctgagccggggcttcggccggcagggcaagcggaccttcatggccgagagacagtacacacggatggaggactggctgaccgccaagctggcctacgagggcctgagcaagacctacctgtccaagacactggcccagtacacctccaagacatgcagcaactgtgggtttaccatcaccagcgccgactacgacagggtgctggagaagctgaagaagacagcaacaggctggatgaccacaattaacggcaaggagctgaaggtggagggccagattacctactacaacagatacaagagacagaacgtagtcaaggacctgtccgtcgagctggatagactgagcgaagaatctgtgaacaacgacatctcctcctggacaaagggcagaagcggagaagctctgagcctcctgaagaaaagattctcccatagacccgtgcaggagaagttcgtgtgcctgaactgcggcttcgagacacacgcagccgagcaagccgccctgaacatcgccagatcctggctgttcctgcggagccaggagtacaagaaataccagacaaacaagacaaccggcaacaccgataagagagccttcgtcgagacctggcagtccttttaccggaagaagcttaaggaggtgtggaaacctgccgtgcggtctggcggatctggcggaggctccaccagccccaagaaaaagagaaaagtctaagctgccttctgcggggcttgccttctggccatgcccttcttctctcccttgcacctgtacctcttggtctttgaataaagcctgagtaggaaggctagcaaaaaaaaaaaaaaaaaaaaaaaaaaaaaaaaaaaaaaaaaaaaaaaaaaaaaaaaaaaaaaaaaaaaaaaaaaaaaaaagcccagccggctccccaacctctaccgaggagggcacctctgagtccgccacccccgagagcggccctggcacctccaccgagcccagcgagggcagcgcacccggcagccctgccggcagccccacctccacagaggagggaaccagcaccgagcccagcgaaggcagcgccccaggcaccagcaccgagcctagtgagcaggagattaaacggatcaacaagatcagaagaagacttgtgaaagacagcaacaccaagaaggccggcaagacaggccccatgaaaaccctgctggttagagtgatgacacccgatctgagagagcggctggaaaacctgagaaagaagcctgaaaatatcccccagcccatcagcaatacatctagagccaacctgaataagctgctgaccgattacaccgaaatgaagaaggcgatcctgcatgtgtactgggaagagttccagaaggaccctgtgggcctgatgagccgggtggcccagcctgccagcaagaagatcgatcagaacaagctgaaacctgagatggacgagaagggcaacctgaccaccgccggctttgcctgctctcagtgtggccagcccctgttcgtgtacaagctggagcaggtgtctgagaagggcaaggcttacaccaactacttcggacggtgcaatgtggccgagcacgaaaagctgatcctgctggcccagctgaagcccgagaaggatagcgacgaagccgtgacatatagcctgggaaagtttgggcagagggccctggatttctacagcattcatgtgaccaaggagtccacccaccccgtgaagcccctggcccagatcgccggaaacagatacgcctccggacctgtgggaaaggccctgagcgacgcatgtatgggcacaatcgcctccttcctgtctaagtaccaggacatcatcatcgaacaccagaaggtggtgaagggcaaccagaagagactggagagcctgcgggagctggccggcaaggaaaacctggaataccctagcgtgaccctgccacctcagcctcacaccaaggagggcgttgatgcctacaacgaagtgatcgcccgggtgcgaatgtgggtgaacctgaacctgtggcagaagctgaagctaagcagagatgatgccaagcctctgctgagactgaagggattcccttcctttcctctggtcgagagacaggccaacgaagtggactggtgggacatggtgtgtaacgtgaagaagctgatcaacgagaaaaaggaggatggcaaggtgttttggcagaatctggctggctacaagagacaggaagccctgagaccatacctgagcagcgaggaagatcggaagaagggaaagaaattcgctcggtaccagctgggcgacctgctgctgcacctggaaaagaagcacggcgaggactggggaaaggtgtacgacgaggcctgggagcggattgacaagaaagtggaaggcctgagcaagcacatcaagctggaagaggaacggagaagcgaggacgcccagagcaaggccgccctgaccgactggctgcgggctaaggccagcttcgtgatcgagggcctgaaggaggccgacaaggacgagttctgcagatgcgagctgaagctgcagaagtggtacggggacctgcggggaaagcccttcgccatcgaagccgagaacagcatcctggacatcagcggcttcagcaagcagtacaactgtgccttcatctggcagaaggacggcgtgaagaagctgaacctgtacctgatcatcaactacttcaagggcggcaagctgcggttcaagaagatcaaacctgaagccttcgaagccaacagattctacaccgtgatcaacaaaaagagcggcgagatcgtgcccatggaggtgaacttcaacttcgacgaccccaacctgatcatcctgcctctggcctttggcaagagacagggcagagaattcatctggaacgacctgctgtccctggaaaccggcagcctgaagctggccaacggaagagtgatcgagaagacactgtacaacagaagaacccggcaggatgagcctgccctgttcgtggccctgaccttcgagcggcgggaggtcctggactcctccaatatcaaaccaatgaacctgatcggcgtggcaagaggcgaaaacatccccgccgtgatcgccctgaccgaccccgagggctgcccactgagccggtttaaggatagcctgggaaacccaacccacatcctgagaatcggcgagagctataaggagaagcagcggaccatccaggccaagaaggaggtggagcagcggagagccggcggctacagccggaagtacgccagcaaagccaagaatctggcagacgatatggtgagaaacaccgctagagatctgctgtactacgccgtgacccaggatgccatgctgatcttcgccaacctgagccggggcttcggccggcagggcaagcggaccttcatggccgagagacagtacacacggatggaggactggctgaccgccaagctggcctacgagggcctgagcaagacctacctgtccaagacactggcccagtacacctccaagacatgcagcaactgtgggtttaccatcaccagcgccgactacgacagggtgctggagaagctgaagaagacagcaacaggctggatgaccacaattaacggcaaggagctgaaggtggagggccagattacctactacaacagatacaagagacagaacgtagtcaaggacctgtccgtcgagctggatagactgagcgaagaatctgtgaacaacgacatctcctcctggacaaagggcagaagcggagaagctctgagcctcctgaagaaaagattctcccatagacccgtgcaggagaagttcgtgtgcctgaactgcggcttcgagacacacgcagccgagcaagccgccctgaacatcgccagatcctggctgttcctgcggagccaggagtacaagaaataccagacaaacaagacaaccggcaacaccgataagagagccttcgtcgagacctggcagtccttttaccggaagaagcttaaggaggtgtggaaacctgccgtgcggtctggcggatctggcggaggctccaccagccccaagaaaaagagaaaagtctaagctgccttctgcggggcttgccttctggccatgcccttcttctctcccttgcacctgtacctcttggtctttgaataaagcctgagtaggaaggctagcaaaaaaaaaaaaaaaaaaaaaaaaaaaaaaaaaaaaaaaaaaaaaaaaaaaaaaaaaaaaaaaaaaaaaaaaaaaaaaaa

SEQ ID NO: 10420 - RNA, 8787 nt, synthetic construct
  source 1..8787: mol_type = other RNA
aggaaataagagagaaaagaagagtaagaagaaatataagagccaccatggcccctaagaagaagcgtaaagtgagccggatgaaccacgaccaggagttcgacccccctaaggtgtaccctcccgtccccgccgagaagagaaagcccatccgggtcctgagcctgttcgatggcatcgccaccggtctgctggtgctgaaggacctgggcatccaggtggataggtacattgcctccgaggtgtgcgaggactccatcaccgtgggaatggtgcgtcatcagggcaagatcatgtacgtgggcgacgtgcggagcgtgacacagaagcatatccaggagtggggccctttcgacctggtgatcggcggcagcccttgcaatgacctgagcatcgtgaacccagcccggaagggcctgtacgagggaaccggcagactgttcttcgagttttacagactgctgcacgacgcccggcctaaggaaggcgacgaccggcccttcttttggctgttcgagaatgtggtggccatgggagtcagcgacaagcgggatattagccggttcctggagagcaaccccgtgatgatcgatgccaaggaagtgagcgccgcccaccgggccagatacttctggggcaatctgcctggcatgaacagacccctggccagcaccgtgaacgacaagctggagctgcaggagtgcctggagcacggccggatcgccaagttcagcaaggtgagaaccatcaccacccgaagcaacagcatcaaacaaggcaaggaccagcactttcctgtgttcatgaacgagaaggaggacatcctgtggtgtaccgagatggagagagtgttcgggttcccagtccactacacagatgtcagcaacatgtctagactggccagacagagactgctgggaagaagctggtccgtccctgtgatcagacacctgttcgcccctctgaaggagtacttcgcctgcgtgagcagcggcaacagcaacgccaacagccggggccccagcttctctagcggcctggtgccactgtccctgagagggagccacatgggccccatggagatctacaaaaccgtgagcgcctggaagcggcagcctgtgcgcgtgctgagcctgtttcggaatatcgataaagtcctgaaaagcctgggattcctggagagcggctctggctccggcggtggcaccctgaagtacgtggaggatgtgacaaacgtggtcagacgggatgtggagaagtggggccccttcgatctggtgtacggcagcacccaacccctgggcagctcttgtgaccggtgccctggctggtacatgtttcagttccaccggatcctgcagtacgccctgccgagacaggagtcccagcggccattcttttggattttcatggacaacttgctgctgaccgaggatgaccaggaaactaccactcggttcctgcagaccgaagccgtgaccctgcaggacgtgagaggccgggactaccagaacgccatgcgggtgtggtccaacatccctggactgaaaagcaagcacgcacctctgacccctaaagaagaggagtacctgcaggcccaggtgcggagcagaagcaagctggacgcccctaaggtggatctgctggtgaagaattgcctcctgcccctgagagagtacttcaagtatttcagccagaatagtctgcccctgggaggcagcggcggcggcgaccagctgcaggaggccttcgaggacgtggccctgtacttcacccagaacgagtgggagctgctgggcgacggcgacaaggtgctgtacagggaccagatgctgaggaactaccaggccctggtgagcctgggctaccagggccccgcccccgacctgatcagcaggatccagaggcaggaggtggagctgtgggtgtgcgaggaggagaaccccggcgagagcgtgtggaccgagggcctgggcggcccaagcagcggcgcccctcctcccagcggcggcaggcggcccaagcagcggcgcccctcctcccagcggcggcagcccagccggctccccaacctctaccgaggagggcacctctgagtccgccacccccgagagcggccctggcacctccaccgagcccagcgagggcagcgcacccggcagccctgccggcagccccacctccacagaggagggaaccagcaccgagcccagcgaaggcagcgccccaggcaccagcaccgagcctagtgagcaggagattaaacggatcaacaagatcagaagaagacttgtgaaagacagcaacaccaagaaggccggcaagacaggccccatgaaaaccctgctggttagagtgatgacacccgatctgagagagcggctggaaaacctgagaaagaagcctgaaaatatcccccagcccatcagcaatacatctagagccaacctgaataagctgctgaccgattacaccgaaatgaagaaggcgatcctgcatgtgtactgggaagagttccagaaggaccctgtgggcctgatgagccgggtggcccagcctgccagcaagaagatcgatcagaacaagctgaaacctgagatggacgagaagggcaacctgaccaccgccggctttgcctgctctcagtgtggccagcccctgttcgtgtacaagctggagcaggtgtctgagaagggcaaggcttacaccaactacttcggacggtgcaatgtggccgagcacgaaaagctgatcctgctggcccagctgaagcccgagaaggatagcgacgaagccgtgacatatagcctgggaaagtttgggcagagggccctggatttctacagcattcatgtgaccaaggagtccacccaccccgtgaagcccctggcccagatcgccggaaacagatacgcctccggacctgtgggaaaggccctgagcgacgcatgtatgggcacaatcgcctccttcctgtctaagtaccaggacatcatcatcgaacaccagaaggtggtgaagggcaaccagaagagactggagagcctgcgggagctggccggcaaggaaaacctggaataccctagcgtgaccctgccacctcagcctcacaccaaggagggcgttgatgcctacaacgaagtgatcgcccgggtgcgaatgtgggtgaacctgaacctgtggcagaagctgaagctaagcagagatgatgccaagcctctgctgagactgaagggattcccttcctttcctctggtcgagagacaggccaacgaagtggactggtgggacatggtgtgtaacgtgaagaagctgatcaacgagaaaaaggaggatggcaaggtgttttggcagaatctggctggctacaagagacaggaagccctgagaccatacctgagcagcgaggaagatcggaagaagggaaagaaattcgctcggtaccagctgggcgacctgctgctgcacctggaaaagaagcacggcgaggactggggaaaggtgtacgacgaggcctgggagcggattgacaagaaagtggaaggcctgagcaagcacatcaagctggaagaggaacggagaagcgaggacgcccagagcaaggccgccctgaccgactggctgcgggctaaggccagcttcgtgatcgagggcctgaaggaggccgacaaggacgagttctgcagatgcgagctgaagctgcagaagtggtacggggacctgcggggaaagcccttcgccatcgaagccgagaacagcatcctggacatcagcggcttcagcaagcagtacaactgtgccttcatctggcagaaggacggcgtgaagaagctgaacctgtacctgatcatcaactacttcaagggcggcaagctgcggttcaagaagatcaaacctgaagccttcgaagccaacagattctacaccgtgatcaacaaaaagagcggcgagatcgtgcccatggaggtgaacttcaacttcgacgaccccaacctgatcatcctgcctctggcctttggcaagagacagggcagagaattcatctggaacgacctgctgtccctggaaaccggcagcctgaagctggccaacggaagagtgatcgagaagacactgtacaacagaagaacccggcaggatgagcctgccctgttcgtggccctgaccttcgagcggcgggaggtcctggactcctccaatatcaaaccaatgaacctgatcggcgtggcaagaggcgaaaacatccccgccgtgatcgccctgaccgaccccgagggctgcccactgagccggtttaaggatagcctgggaaacccaacccacatcctgagaatcggcgagagctataaggagaagcagcggaccatccaggccaagaaggaggtggagcagcggagagccggcggctacagccggaagtacgccagcaaagccaagaatctggcagacgatatggtgagaaacaccgctagagatctgctgtactacgccgtgacccaggatgccatgctgatcttcgccaacctgagccggggcttcggccggcagggcaagcggaccttcatggccgagagacagtacacacggatggaggactggctgaccgccaagctggcctacgagggcctgagcaagacctacctgtccaagacactggcccagtacacctccaagacatgcagcaactgtgggtttaccatcaccagcgccgactacgacagggtgctggagaagctgaagaagacagcaacaggctggatgaccacaattaacggcaaggagctgaaggtggagggccagattacctactacaacagatacaagagacagaacgtagtcaaggacctgtccgtcgagctggatagactgagcgaagaatctgtgaacaacgacatctcctcctggacaaagggcagaagcggagaagctctgagcctcctgaagaaaagattctcccatagacccgtgcaggagaagttcgtgtgcctgaactgcggcttcgagacacacgcagccgagcaagccgccctgaacatcgccagatcctggctgttcctgcggagccaggagtacaagaaataccagacaaacaagacaaccggcaacaccgataagagagccttcgtcgagacctggcagtccttttaccggaagaagcttaaggaggtgtggaaacctgccgtgcggtctggcggatctggcggaggctccaccagccccaagaaaaagagaaaagtctaagctgccttctgcggggcttgccttctggccatgcccttcttctctcccttgcacctgtacctcttggtctttgaataaagcctgagtaggaaggctagcaaaaaaaaaaaaaaaaaaaaaaaaaaaaaaaaaaaaaaaaaaaaaaaaaaaaaaaaaaaaaaaaaaaaaaaaaaaaaaaagcccagccggctccccaacctctaccgaggagggcacctctgagtccgccacccccgagagcggccctggcacctccaccgagcccagcgagggcagcgcacccggcagccctgccggcagccccacctccacagaggagggaaccagcaccgagcccagcgaaggcagcgccccaggcaccagcaccgagcctagtgagcaggagattaaacggatcaacaagatcagaagaagacttgtgaaagacagcaacaccaagaaggccggcaagacaggccccatgaaaaccctgctggttagagtgatgacacccgatctgagagagcggctggaaaacctgagaaagaagcctgaaaatatcccccagcccatcagcaatacatctagagccaacctgaataagctgctgaccgattacaccgaaatgaagaaggcgatcctgcatgtgtactgggaagagttccagaaggaccctgtgggcctgatgagccgggtggcccagcctgccagcaagaagatcgatcagaacaagctgaaacctgagatggacgagaagggcaacctgaccaccgccggctttgcctgctctcagtgtggccagcccctgttcgtgtacaagctggagcaggtgtctgagaagggcaaggcttacaccaactacttcggacggtgcaatgtggccgagcacgaaaagctgatcctgctggcccagctgaagcccgagaaggatagcgacgaagccgtgacatatagcctgggaaagtttgggcagagggccctggatttctacagcattcatgtgaccaaggagtccacccaccccgtgaagcccctggcccagatcgccggaaacagatacgcctccggacctgtgggaaaggccctgagcgacgcatgtatgggcacaatcgcctccttcctgtctaagtaccaggacatcatcatcgaacaccagaaggtggtgaagggcaaccagaagagactggagagcctgcgggagctggccggcaaggaaaacctggaataccctagcgtgaccctgccacctcagcctcacaccaaggagggcgttgatgcctacaacgaagtgatcgcccgggtgcgaatgtgggtgaacctgaacctgtggcagaagctgaagctaagcagagatgatgccaagcctctgctgagactgaagggattcccttcctttcctctggtcgagagacaggccaacgaagtggactggtgggacatggtgtgtaacgtgaagaagctgatcaacgagaaaaaggaggatggcaaggtgttttggcagaatctggctggctacaagagacaggaagccctgagaccatacctgagcagcgaggaagatcggaagaagggaaagaaattcgctcggtaccagctgggcgacctgctgctgcacctggaaaagaagcacggcgaggactggggaaaggtgtacgacgaggcctgggagcggattgacaagaaagtggaaggcctgagcaagcacatcaagctggaagaggaacggagaagcgaggacgcccagagcaaggccgccctgaccgactggctgcgggctaaggccagcttcgtgatcgagggcctgaaggaggccgacaaggacgagttctgcagatgcgagctgaagctgcagaagtggtacggggacctgcggggaaagcccttcgccatcgaagccgagaacagcatcctggacatcagcggcttcagcaagcagtacaactgtgccttcatctggcagaaggacggcgtgaagaagctgaacctgtacctgatcatcaactacttcaagggcggcaagctgcggttcaagaagatcaaacctgaagccttcgaagccaacagattctacaccgtgatcaacaaaaagagcggcgagatcgtgcccatggaggtgaacttcaacttcgacgaccccaacctgatcatcctgcctctggcctttggcaagagacagggcagagaattcatctggaacgacctgctgtccctggaaaccggcagcctgaagctggccaacggaagagtgatcgagaagacactgtacaacagaagaacccggcaggatgagcctgccctgttcgtggccctgaccttcgagcggcgggaggtcctggactcctccaatatcaaaccaatgaacctgatcggcgtggcaagaggcgaaaacatccccgccgtgatcgccctgaccgaccccgagggctgcccactgagccggtttaaggatagcctgggaaacccaacccacatcctgagaatcggcgagagctataaggagaagcagcggaccatccaggccaagaaggaggtggagcagcggagagccggcggctacagccggaagtacgccagcaaagccaagaatctggcagacgatatggtgagaaacaccgctagagatctgctgtactacgccgtgacccaggatgccatgctgatcttcgccaacctgagccggggcttcggccggcagggcaagcggaccttcatggccgagagacagtacacacggatggaggactggctgaccgccaagctggcctacgagggcctgagcaagacctacctgtccaagacactggcccagtacacctccaagacatgcagcaactgtgggtttaccatcaccagcgccgactacgacagggtgctggagaagctgaagaagacagcaacaggctggatgaccacaattaacggcaaggagctgaaggtggagggccagattacctactacaacagatacaagagacagaacgtagtcaaggacctgtccgtcgagctggatagactgagcgaagaatctgtgaacaacgacatctcctcctggacaaagggcagaagcggagaagctctgagcctcctgaagaaaagattctcccatagacccgtgcaggagaagttcgtgtgcctgaactgcggcttcgagacacacgcagccgagcaagccgccctgaacatcgccagatcctggctgttcctgcggagccaggagtacaagaaataccagacaaacaagacaaccggcaacaccgataagagagccttcgtcgagacctggcagtccttttaccggaagaagcttaaggaggtgtggaaacctgccgtgcggtctggcggatctggcggaggctccaccagccccaagaaaaagagaaaagtctaagctgccttctgcggggcttgccttctggccatgcccttcttctctcccttgcacctgtacctcttggtctttgaataaagcctgagtaggaaggctagcaaaaaaaaaaaaaaaaaaaaaaaaaaaaaaaaaaaaaaaaaaaaaaaaaaaaaaaaaaaaaaaaaaaaaaaaaaaaaaaa

SEQ ID NO: 10421 - RNA, 8787 nt, synthetic construct
  source 1..8787: mol_type = other RNA
aggaaataagagagaaaagaagagtaagaagaaatataagagccaccatggcccctaagaagaagcgtaaagtgagccggatgaaccacgaccaggagttcgacccccctaaggtgtaccctcccgtccccgccgagaagagaaagcccatccgggtcctgagcctgttcgatggcatcgccaccggtctgctggtgctgaaggacctgggcatccaggtggataggtacattgcctccgaggtgtgcgaggactccatcaccgtgggaatggtgcgtcatcagggcaagatcatgtacgtgggcgacgtgcggagcgtgacacagaagcatatccaggagtggggccctttcgacctggtgatcggcggcagcccttgcaatgacctgagcatcgtgaacccagcccggaagggcctgtacgagggaaccggcagactgttcttcgagttttacagactgctgcacgacgcccggcctaaggaaggcgacgaccggcccttcttttggctgttcgagaatgtggtggccatgggagtcagcgacaagcgggatattagccggttcctggagagcaaccccgtgatgatcgatgccaaggaagtgagcgccgcccaccgggccagatacttctggggcaatctgcctggcatgaacagacccctggccagcaccgtgaacgacaagctggagctgcaggagtgcctggagcacggccggatcgccaagttcagcaaggtgagaaccatcaccacccgaagcaacagcatcaaacaaggcaaggaccagcactttcctgtgttcatgaacgagaaggaggacatcctgtggtgtaccgagatggagagagtgttcgggttcccagtccactacacagatgtcagcaacatgtctagactggccagacagagactgctgggaagaagctggtccgtccctgtgatcagacacctgttcgcccctctgaaggagtacttcgcctgcgtgagcagcggcaacagcaacgccaacagccggggccccagcttctctagcggcctggtgccactgtccctgagagggagccacatgggccccatggagatctacaaaaccgtgagcgcctggaagcggcagcctgtgcgcgtgctgagcctgtttcggaatatcgataaagtcctgaaaagcctgggattcctggagagcggctctggctccggcggtggcaccctgaagtacgtggaggatgtgacaaacgtggtcagacgggatgtggagaagtggggccccttcgatctggtgtacggcagcacccaacccctgggcagctcttgtgaccggtgccctggctggtacatgtttcagttccaccggatcctgcagtacgccctgccgagacaggagtcccagcggccattcttttggattttcatggacaacttgctgctgaccgaggatgaccaggaaactaccactcggttcctgcagaccgaagccgtgaccctgcaggacgtgagaggccgggactaccagaacgccatgcgggtgtggtccaacatccctggactgaaaagcaagcacgcacctctgacccctaaagaagaggagtacctgcaggcccaggtgcggagcagaagcaagctggacgcccctaaggtggatctgctggtgaagaattgcctcctgcccctgagagagtacttcaagtatttcagccagaatagtctgcccctgggaggcagcggcggcggcgtgagggagcccctgaccttcgaggacgtggccgtgaacttcacccaggaggagtggcagcagctggaccccgcccagaagaccctgcacagggacgtgatgctggagatctacagccacctggtgagcgtgggctgcagcggcatcaagcccgacatcatcagcaagctggagcacggcgaggacccctggatcagggagagcgagctgcccaggtggacctacagcgacagggagaagagcggcggcccaagcagcggcgcccctcctcccagcggcggcaggcggcccaagcagcggcgcccctcctcccagcggcggcagcccagccggctccccaacctctaccgaggagggcacctctgagtccgccacccccgagagcggccctggcacctccaccgagcccagcgagggcagcgcacccggcagccctgccggcagccccacctccacagaggagggaaccagcaccgagcccagcgaaggcagcgccccaggcaccagcaccgagcctagtgagcaggagattaaacggatcaacaagatcagaagaagacttgtgaaagacagcaacaccaagaaggccggcaagacaggccccatgaaaaccctgctggttagagtgatgacacccgatctgagagagcggctggaaaacctgagaaagaagcctgaaaatatcccccagcccatcagcaatacatctagagccaacctgaataagctgctgaccgattacaccgaaatgaagaaggcgatcctgcatgtgtactgggaagagttccagaaggaccctgtgggcctgatgagccgggtggcccagcctgccagcaagaagatcgatcagaacaagctgaaacctgagatggacgagaagggcaacctgaccaccgccggctttgcctgctctcagtgtggccagcccctgttcgtgtacaagctggagcaggtgtctgagaagggcaaggcttacaccaactacttcggacggtgcaatgtggccgagcacgaaaagctgatcctgctggcccagctgaagcccgagaaggatagcgacgaagccgtgacatatagcctgggaaagtttgggcagagggccctggatttctacagcattcatgtgaccaaggagtccacccaccccgtgaagcccctggcccagatcgccggaaacagatacgcctccggacctgtgggaaaggccctgagcgacgcatgtatgggcacaatcgcctccttcctgtctaagtaccaggacatcatcatcgaacaccagaaggtggtgaagggcaaccagaagagactggagagcctgcgggagctggccggcaaggaaaacctggaataccctagcgtgaccctgccacctcagcctcacaccaaggagggcgttgatgcctacaacgaagtgatcgcccgggtgcgaatgtgggtgaacctgaacctgtggcagaagctgaagctaagcagagatgatgccaagcctctgctgagactgaagggattcccttcctttcctctggtcgagagacaggccaacgaagtggactggtgggacatggtgtgtaacgtgaagaagctgatcaacgagaaaaaggaggatggcaaggtgttttggcagaatctggctggctacaagagacaggaagccctgagaccatacctgagcagcgaggaagatcggaagaagggaaagaaattcgctcggtaccagctgggcgacctgctgctgcacctggaaaagaagcacggcgaggactggggaaaggtgtacgacgaggcctgggagcggattgacaagaaagtggaaggcctgagcaagcacatcaagctggaagaggaacggagaagcgaggacgcccagagcaaggccgccctgaccgactggctgcgggctaaggccagcttcgtgatcgagggcctgaaggaggccgacaaggacgagttctgcagatgcgagctgaagctgcagaagtggtacggggacctgcggggaaagcccttcgccatcgaagccgagaacagcatcctggacatcagcggcttcagcaagcagtacaactgtgccttcatctggcagaaggacggcgtgaagaagctgaacctgtacctgatcatcaactacttcaagggcggcaagctgcggttcaagaagatcaaacctgaagccttcgaagccaacagattctacaccgtgatcaacaaaaagagcggcgagatcgtgcccatggaggtgaacttcaacttcgacgaccccaacctgatcatcctgcctctggcctttggcaagagacagggcagagaattcatctggaacgacctgctgtccctggaaaccggcagcctgaagctggccaacggaagagtgatcgagaagacactgtacaacagaagaacccggcaggatgagcctgccctgttcgtggccctgaccttcgagcggcgggaggtcctggactcctccaatatcaaaccaatgaacctgatcggcgtggcaagaggcgaaaacatccccgccgtgatcgccctgaccgaccccgagggctgcccactgagccggtttaaggatagcctgggaaacccaacccacatcctgagaatcggcgagagctataaggagaagcagcggaccatccaggccaagaaggaggtggagcagcggagagccggcggctacagccggaagtacgccagcaaagccaagaatctggcagacgatatggtgagaaacaccgctagagatctgctgtactacgccgtgacccaggatgccatgctgatcttcgccaacctgagccggggcttcggccggcagggcaagcggaccttcatggccgagagacagtacacacggatggaggactggctgaccgccaagctggcctacgagggcctgagcaagacctacctgtccaagacactggcccagtacacctccaagacatgcagcaactgtgggtttaccatcaccagcgccgactacgacagggtgctggagaagctgaagaagacagcaacaggctggatgaccacaattaacggcaaggagctgaaggtggagggccagattacctactacaacagatacaagagacagaacgtagtcaaggacctgtccgtcgagctggatagactgagcgaagaatctgtgaacaacgacatctcctcctggacaaagggcagaagcggagaagctctgagcctcctgaagaaaagattctcccatagacccgtgcaggagaagttcgtgtgcctgaactgcggcttcgagacacacgcagccgagcaagccgccctgaacatcgccagatcctggctgttcctgcggagccaggagtacaagaaataccagacaaacaagacaaccggcaacaccgataagagagccttcgtcgagacctggcagtccttttaccggaagaagcttaaggaggtgtggaaacctgccgtgcggtctggcggatctggcggaggctccaccagccccaagaaaaagagaaaagtctaagctgccttctgcggggcttgccttctggccatgcccttcttctctcccttgcacctgtacctcttggtctttgaataaagcctgagtaggaaggctagcaaaaaaaaaaaaaaaaaaaaaaaaaaaaaaaaaaaaaaaaaaaaaaaaaaaaaaaaaaaaaaaaaaaaaaaaaaaaaaaagcccagccggctccccaacctctaccgaggagggcacctctgagtccgccacccccgagagcggccctggcacctccaccgagcccagcgagggcagcgcacccggcagccctgccggcagccccacctccacagaggagggaaccagcaccgagcccagcgaaggcagcgccccaggcaccagcaccgagcctagtgagcaggagattaaacggatcaacaagatcagaagaagacttgtgaaagacagcaacaccaagaaggccggcaagacaggccccatgaaaaccctgctggttagagtgatgacacccgatctgagagagcggctggaaaacctgagaaagaagcctgaaaatatcccccagcccatcagcaatacatctagagccaacctgaataagctgctgaccgattacaccgaaatgaagaaggcgatcctgcatgtgtactgggaagagttccagaaggaccctgtgggcctgatgagccgggtggcccagcctgccagcaagaagatcgatcagaacaagctgaaacctgagatggacgagaagggcaacctgaccaccgccggctttgcctgctctcagtgtggccagcccctgttcgtgtacaagctggagcaggtgtctgagaagggcaaggcttacaccaactacttcggacggtgcaatgtggccgagcacgaaaagctgatcctgctggcccagctgaagcccgagaaggatagcgacgaagccgtgacatatagcctgggaaagtttgggcagagggccctggatttctacagcattcatgtgaccaaggagtccacccaccccgtgaagcccctggcccagatcgccggaaacagatacgcctccggacctgtgggaaaggccctgagcgacgcatgtatgggcacaatcgcctccttcctgtctaagtaccaggacatcatcatcgaacaccagaaggtggtgaagggcaaccagaagagactggagagcctgcgggagctggccggcaaggaaaacctggaataccctagcgtgaccctgccacctcagcctcacaccaaggagggcgttgatgcctacaacgaagtgatcgcccgggtgcgaatgtgggtgaacctgaacctgtggcagaagctgaagctaagcagagatgatgccaagcctctgctgagactgaagggattcccttcctttcctctggtcgagagacaggccaacgaagtggactggtgggacatggtgtgtaacgtgaagaagctgatcaacgagaaaaaggaggatggcaaggtgttttggcagaatctggctggctacaagagacaggaagccctgagaccatacctgagcagcgaggaagatcggaagaagggaaagaaattcgctcggtaccagctgggcgacctgctgctgcacctggaaaagaagcacggcgaggactggggaaaggtgtacgacgaggcctgggagcggattgacaagaaagtggaaggcctgagcaagcacatcaagctggaagaggaacggagaagcgaggacgcccagagcaaggccgccctgaccgactggctgcgggctaaggccagcttcgtgatcgagggcctgaaggaggccgacaaggacgagttctgcagatgcgagctgaagctgcagaagtggtacggggacctgcggggaaagcccttcgccatcgaagccgagaacagcatcctggacatcagcggcttcagcaagcagtacaactgtgccttcatctggcagaaggacggcgtgaagaagctgaacctgtacctgatcatcaactacttcaagggcggcaagctgcggttcaagaagatcaaacctgaagccttcgaagccaacagattctacaccgtgatcaacaaaaagagcggcgagatcgtgcccatggaggtgaacttcaacttcgacgaccccaacctgatcatcctgcctctggcctttggcaagagacagggcagagaattcatctggaacgacctgctgtccctggaaaccggcagcctgaagctggccaacggaagagtgatcgagaagacactgtacaacagaagaacccggcaggatgagcctgccctgttcgtggccctgaccttcgagcggcgggaggtcctggactcctccaatatcaaaccaatgaacctgatcggcgtggcaagaggcgaaaacatccccgccgtgatcgccctgaccgaccccgagggctgcccactgagccggtttaaggatagcctgggaaacccaacccacatcctgagaatcggcgagagctataaggagaagcagcggaccatccaggccaagaaggaggtggagcagcggagagccggcggctacagccggaagtacgccagcaaagccaagaatctggcagacgatatggtgagaaacaccgctagagatctgctgtactacgccgtgacccaggatgccatgctgatcttcgccaacctgagccggggcttcggccggcagggcaagcggaccttcatggccgagagacagtacacacggatggaggactggctgaccgccaagctggcctacgagggcctgagcaagacctacctgtccaagacactggcccagtacacctccaagacatgcagcaactgtgggtttaccatcaccagcgccgactacgacagggtgctggagaagctgaagaagacagcaacaggctggatgaccacaattaacggcaaggagctgaaggtggagggccagattacctactacaacagatacaagagacagaacgtagtcaaggacctgtccgtcgagctggatagactgagcgaagaatctgtgaacaacgacatctcctcctggacaaagggcagaagcggagaagctctgagcctcctgaagaaaagattctcccatagacccgtgcaggagaagttcgtgtgcctgaactgcggcttcgagacacacgcagccgagcaagccgccctgaacatcgccagatcctggctgttcctgcggagccaggagtacaagaaataccagacaaacaagacaaccggcaacaccgataagagagccttcgtcgagacctggcagtccttttaccggaagaagcttaaggaggtgtggaaacctgccgtgcggtctggcggatctggcggaggctccaccagccccaagaaaaagagaaaagtctaagctgccttctgcggggcttgccttctggccatgcccttcttctctcccttgcacctgtacctcttggtctttgaataaagcctgagtaggaaggctagcaaaaaaaaaaaaaaaaaaaaaaaaaaaaaaaaaaaaaaaaaaaaaaaaaaaaaaaaaaaaaaaaaaaaaaaaaaaaaaaa

SEQ ID NO: 10422 - RNA, 8787 nt, synthetic construct
  source 1..8787: mol_type = other RNA
aggaaataagagagaaaagaagagtaagaagaaatataagagccaccatggcccctaagaagaagcgtaaagtgagccggatgaaccacgaccaggagttcgacccccctaaggtgtaccctcccgtccccgccgagaagagaaagcccatccgggtcctgagcctgttcgatggcatcgccaccggtctgctggtgctgaaggacctgggcatccaggtggataggtacattgcctccgaggtgtgcgaggactccatcaccgtgggaatggtgcgtcatcagggcaagatcatgtacgtgggcgacgtgcggagcgtgacacagaagcatatccaggagtggggccctttcgacctggtgatcggcggcagcccttgcaatgacctgagcatcgtgaacccagcccggaagggcctgtacgagggaaccggcagactgttcttcgagttttacagactgctgcacgacgcccggcctaaggaaggcgacgaccggcccttcttttggctgttcgagaatgtggtggccatgggagtcagcgacaagcgggatattagccggttcctggagagcaaccccgtgatgatcgatgccaaggaagtgagcgccgcccaccgggccagatacttctggggcaatctgcctggcatgaacagacccctggccagcaccgtgaacgacaagctggagctgcaggagtgcctggagcacggccggatcgccaagttcagcaaggtgagaaccatcaccacccgaagcaacagcatcaaacaaggcaaggaccagcactttcctgtgttcatgaacgagaaggaggacatcctgtggtgtaccgagatggagagagtgttcgggttcccagtccactacacagatgtcagcaacatgtctagactggccagacagagactgctgggaagaagctggtccgtccctgtgatcagacacctgttcgcccctctgaaggagtacttcgcctgcgtgagcagcggcaacagcaacgccaacagccggggccccagcttctctagcggcctggtgccactgtccctgagagggagccacatgggccccatggagatctacaaaaccgtgagcgcctggaagcggcagcctgtgcgcgtgctgagcctgtttcggaatatcgataaagtcctgaaaagcctgggattcctggagagcggctctggctccggcggtggcaccctgaagtacgtggaggatgtgacaaacgtggtcagacgggatgtggagaagtggggccccttcgatctggtgtacggcagcacccaacccctgggcagctcttgtgaccggtgccctggctggtacatgtttcagttccaccggatcctgcagtacgccctgccgagacaggagtcccagcggccattcttttggattttcatggacaacttgctgctgaccgaggatgaccaggaaactaccactcggttcctgcagaccgaagccgtgaccctgcaggacgtgagaggccgggactaccagaacgccatgcgggtgtggtccaacatccctggactgaaaagcaagcacgcacctctgacccctaaagaagaggagtacctgcaggcccaggtgcggagcagaagcaagctggacgcccctaaggtggatctgctggtgaagaattgcctcctgcccctgagagagtacttcaagtatttcagccagaatagtctgcccctgggaggcagcggcggcggcatgaagctgggcagcgtgaccttcgaggacgtggccgtgtacttcagctgggaggagtgggccctgctggacgaggcccagaggtgcctgtaccacgacgtgatgctggagaacttcgccctgaccagcagcctggtggtgagcagcagcagccacaccatcgcccagctgggcctgggcgaggagagcttcgtgctgcccaggatgcacatgatccccctgagcaccaggtgggcccagaggggcggcccaagcagcggcgcccctcctcccagcggcggcaggcggcccaagcagcggcgcccctcctcccagcggcggcagcccagccggctccccaacctctaccgaggagggcacctctgagtccgccacccccgagagcggccctggcacctccaccgagcccagcgagggcagcgcacccggcagccctgccggcagccccacctccacagaggagggaaccagcaccgagcccagcgaaggcagcgccccaggcaccagcaccgagcctagtgagcaggagattaaacggatcaacaagatcagaagaagacttgtgaaagacagcaacaccaagaaggccggcaagacaggccccatgaaaaccctgctggttagagtgatgacacccgatctgagagagcggctggaaaacctgagaaagaagcctgaaaatatcccccagcccatcagcaatacatctagagccaacctgaataagctgctgaccgattacaccgaaatgaagaaggcgatcctgcatgtgtactgggaagagttccagaaggaccctgtgggcctgatgagccgggtggcccagcctgccagcaagaagatcgatcagaacaagctgaaacctgagatggacgagaagggcaacctgaccaccgccggctttgcctgctctcagtgtggccagcccctgttcgtgtacaagctggagcaggtgtctgagaagggcaaggcttacaccaactacttcggacggtgcaatgtggccgagcacgaaaagctgatcctgctggcccagctgaagcccgagaaggatagcgacgaagccgtgacatatagcctgggaaagtttgggcagagggccctggatttctacagcattcatgtgaccaaggagtccacccaccccgtgaagcccctggcccagatcgccggaaacagatacgcctccggacctgtgggaaaggccctgagcgacgcatgtatgggcacaatcgcctccttcctgtctaagtaccaggacatcatcatcgaacaccagaaggtggtgaagggcaaccagaagagactggagagcctgcgggagctggccggcaaggaaaacctggaataccctagcgtgaccctgccacctcagcctcacaccaaggagggcgttgatgcctacaacgaagtgatcgcccgggtgcgaatgtgggtgaacctgaacctgtggcagaagctgaagctaagcagagatgatgccaagcctctgctgagactgaagggattcccttcctttcctctggtcgagagacaggccaacgaagtggactggtgggacatggtgtgtaacgtgaagaagctgatcaacgagaaaaaggaggatggcaaggtgttttggcagaatctggctggctacaagagacaggaagccctgagaccatacctgagcagcgaggaagatcggaagaagggaaagaaattcgctcggtaccagctgggcgacctgctgctgcacctggaaaagaagcacggcgaggactggggaaaggtgtacgacgaggcctgggagcggattgacaagaaagtggaaggcctgagcaagcacatcaagctggaagaggaacggagaagcgaggacgcccagagcaaggccgccctgaccgactggctgcgggctaaggccagcttcgtgatcgagggcctgaaggaggccgacaaggacgagttctgcagatgcgagctgaagctgcagaagtggtacggggacctgcggggaaagcccttcgccatcgaagccgagaacagcatcctggacatcagcggcttcagcaagcagtacaactgtgccttcatctggcagaaggacggcgtgaagaagctgaacctgtacctgatcatcaactacttcaagggcggcaagctgcggttcaagaagatcaaacctgaagccttcgaagccaacagattctacaccgtgatcaacaaaaagagcggcgagatcgtgcccatggaggtgaacttcaacttcgacgaccccaacctgatcatcctgcctctggcctttggcaagagacagggcagagaattcatctggaacgacctgctgtccctggaaaccggcagcctgaagctggccaacggaagagtgatcgagaagacactgtacaacagaagaacccggcaggatgagcctgccctgttcgtggccctgaccttcgagcggcgggaggtcctggactcctccaatatcaaaccaatgaacctgatcggcgtggcaagaggcgaaaacatccccgccgtgatcgccctgaccgaccccgagggctgcccactgagccggtttaaggatagcctgggaaacccaacccacatcctgagaatcggcgagagctataaggagaagcagcggaccatccaggccaagaaggaggtggagcagcggagagccggcggctacagccggaagtacgccagcaaagccaagaatctggcagacgatatggtgagaaacaccgctagagatctgctgtactacgccgtgacccaggatgccatgctgatcttcgccaacctgagccggggcttcggccggcagggcaagcggaccttcatggccgagagacagtacacacggatggaggactggctgaccgccaagctggcctacgagggcctgagcaagacctacctgtccaagacactggcccagtacacctccaagacatgcagcaactgtgggtttaccatcaccagcgccgactacgacagggtgctggagaagctgaagaagacagcaacaggctggatgaccacaattaacggcaaggagctgaaggtggagggccagattacctactacaacagatacaagagacagaacgtagtcaaggacctgtccgtcgagctggatagactgagcgaagaatctgtgaacaacgacatctcctcctggacaaagggcagaagcggagaagctctgagcctcctgaagaaaagattctcccatagacccgtgcaggagaagttcgtgtgcctgaactgcggcttcgagacacacgcagccgagcaagccgccctgaacatcgccagatcctggctgttcctgcggagccaggagtacaagaaataccagacaaacaagacaaccggcaacaccgataagagagccttcgtcgagacctggcagtccttttaccggaagaagcttaaggaggtgtggaaacctgccgtgcggtctggcggatctggcggaggctccaccagccccaagaaaaagagaaaagtctaagctgccttctgcggggcttgccttctggccatgcccttcttctctcccttgcacctgtacctcttggtctttgaataaagcctgagtaggaaggctagcaaaaaaaaaaaaaaaaaaaaaaaaaaaaaaaaaaaaaaaaaaaaaaaaaaaaaaaaaaaaaaaaaaaaaaaaaaaaaaaagcccagccggctccccaacctctaccgaggagggcacctctgagtccgccacccccgagagcggccctggcacctccaccgagcccagcgagggcagcgcacccggcagccctgccggcagccccacctccacagaggagggaaccagcaccgagcccagcgaaggcagcgccccaggcaccagcaccgagcctagtgagcaggagattaaacggatcaacaagatcagaagaagacttgtgaaagacagcaacaccaagaaggccggcaagacaggccccatgaaaaccctgctggttagagtgatgacacccgatctgagagagcggctggaaaacctgagaaagaagcctgaaaatatcccccagcccatcagcaatacatctagagccaacctgaataagctgctgaccgattacaccgaaatgaagaaggcgatcctgcatgtgtactgggaagagttccagaaggaccctgtgggcctgatgagccgggtggcccagcctgccagcaagaagatcgatcagaacaagctgaaacctgagatggacgagaagggcaacctgaccaccgccggctttgcctgctctcagtgtggccagcccctgttcgtgtacaagctggagcaggtgtctgagaagggcaaggcttacaccaactacttcggacggtgcaatgtggccgagcacgaaaagctgatcctgctggcccagctgaagcccgagaaggatagcgacgaagccgtgacatatagcctgggaaagtttgggcagagggccctggatttctacagcattcatgtgaccaaggagtccacccaccccgtgaagcccctggcccagatcgccggaaacagatacgcctccggacctgtgggaaaggccctgagcgacgcatgtatgggcacaatcgcctccttcctgtctaagtaccaggacatcatcatcgaacaccagaaggtggtgaagggcaaccagaagagactggagagcctgcgggagctggccggcaaggaaaacctggaataccctagcgtgaccctgccacctcagcctcacaccaaggagggcgttgatgcctacaacgaagtgatcgcccgggtgcgaatgtgggtgaacctgaacctgtggcagaagctgaagctaagcagagatgatgccaagcctctgctgagactgaagggattcccttcctttcctctggtcgagagacaggccaacgaagtggactggtgggacatggtgtgtaacgtgaagaagctgatcaacgagaaaaaggaggatggcaaggtgttttggcagaatctggctggctacaagagacaggaagccctgagaccatacctgagcagcgaggaagatcggaagaagggaaagaaattcgctcggtaccagctgggcgacctgctgctgcacctggaaaagaagcacggcgaggactggggaaaggtgtacgacgaggcctgggagcggattgacaagaaagtggaaggcctgagcaagcacatcaagctggaagaggaacggagaagcgaggacgcccagagcaaggccgccctgaccgactggctgcgggctaaggccagcttcgtgatcgagggcctgaaggaggccgacaaggacgagttctgcagatgcgagctgaagctgcagaagtggtacggggacctgcggggaaagcccttcgccatcgaagccgagaacagcatcctggacatcagcggcttcagcaagcagtacaactgtgccttcatctggcagaaggacggcgtgaagaagctgaacctgtacctgatcatcaactacttcaagggcggcaagctgcggttcaagaagatcaaacctgaagccttcgaagccaacagattctacaccgtgatcaacaaaaagagcggcgagatcgtgcccatggaggtgaacttcaacttcgacgaccccaacctgatcatcctgcctctggcctttggcaagagacagggcagagaattcatctggaacgacctgctgtccctggaaaccggcagcctgaagctggccaacggaagagtgatcgagaagacactgtacaacagaagaacccggcaggatgagcctgccctgttcgtggccctgaccttcgagcggcgggaggtcctggactcctccaatatcaaaccaatgaacctgatcggcgtggcaagaggcgaaaacatccccgccgtgatcgccctgaccgaccccgagggctgcccactgagccggtttaaggatagcctgggaaacccaacccacatcctgagaatcggcgagagctataaggagaagcagcggaccatccaggccaagaaggaggtggagcagcggagagccggcggctacagccggaagtacgccagcaaagccaagaatctggcagacgatatggtgagaaacaccgctagagatctgctgtactacgccgtgacccaggatgccatgctgatcttcgccaacctgagccggggcttcggccggcagggcaagcggaccttcatggccgagagacagtacacacggatggaggactggctgaccgccaagctggcctacgagggcctgagcaagacctacctgtccaagacactggcccagtacacctccaagacatgcagcaactgtgggtttaccatcaccagcgccgactacgacagggtgctggagaagctgaagaagacagcaacaggctggatgaccacaattaacggcaaggagctgaaggtggagggccagattacctactacaacagatacaagagacagaacgtagtcaaggacctgtccgtcgagctggatagactgagcgaagaatctgtgaacaacgacatctcctcctggacaaagggcagaagcggagaagctctgagcctcctgaagaaaagattctcccatagacccgtgcaggagaagttcgtgtgcctgaactgcggcttcgagacacacgcagccgagcaagccgccctgaacatcgccagatcctggctgttcctgcggagccaggagtacaagaaataccagacaaacaagacaaccggcaacaccgataagagagccttcgtcgagacctggcagtccttttaccggaagaagcttaaggaggtgtggaaacctgccgtgcggtctggcggatctggcggaggctccaccagccccaagaaaaagagaaaagtctaagctgccttctgcggggcttgccttctggccatgcccttcttctctcccttgcacctgtacctcttggtctttgaataaagcctgagtaggaaggctagcaaaaaaaaaaaaaaaaaaaaaaaaaaaaaaaaaaaaaaaaaaaaaaaaaaaaaaaaaaaaaaaaaaaaaaaaaaaaaaaa

SEQ ID NO: 10423 - RNA, 8787 nt, synthetic construct
  source 1..8787: mol_type = other RNA
aggaaataagagagaaaagaagagtaagaagaaatataagagccaccatggcccctaagaagaagcgtaaagtgagccggatgaaccacgaccaggagttcgacccccctaaggtgtaccctcccgtccccgccgagaagagaaagcccatccgggtcctgagcctgttcgatggcatcgccaccggtctgctggtgctgaaggacctgggcatccaggtggataggtacattgcctccgaggtgtgcgaggactccatcaccgtgggaatggtgcgtcatcagggcaagatcatgtacgtgggcgacgtgcggagcgtgacacagaagcatatccaggagtggggccctttcgacctggtgatcggcggcagcccttgcaatgacctgagcatcgtgaacccagcccggaagggcctgtacgagggaaccggcagactgttcttcgagttttacagactgctgcacgacgcccggcctaaggaaggcgacgaccggcccttcttttggctgttcgagaatgtggtggccatgggagtcagcgacaagcgggatattagccggttcctggagagcaaccccgtgatgatcgatgccaaggaagtgagcgccgcccaccgggccagatacttctggggcaatctgcctggcatgaacagacccctggccagcaccgtgaacgacaagctggagctgcaggagtgcctggagcacggccggatcgccaagttcagcaaggtgagaaccatcaccacccgaagcaacagcatcaaacaaggcaaggaccagcactttcctgtgttcatgaacgagaaggaggacatcctgtggtgtaccgagatggagagagtgttcgggttcccagtccactacacagatgtcagcaacatgtctagactggccagacagagactgctgggaagaagctggtccgtccctgtgatcagacacctgttcgcccctctgaaggagtacttcgcctgcgtgagcagcggcaacagcaacgccaacagccggggccccagcttctctagcggcctggtgccactgtccctgagagggagccacatgggccccatggagatctacaaaaccgtgagcgcctggaagcggcagcctgtgcgcgtgctgagcctgtttcggaatatcgataaagtcctgaaaagcctgggattcctggagagcggctctggctccggcggtggcaccctgaagtacgtggaggatgtgacaaacgtggtcagacgggatgtggagaagtggggccccttcgatctggtgtacggcagcacccaacccctgggcagctcttgtgaccggtgccctggctggtacatgtttcagttccaccggatcctgcagtacgccctgccgagacaggagtcccagcggccattcttttggattttcatggacaacttgctgctgaccgaggatgaccaggaaactaccactcggttcctgcagaccgaagccgtgaccctgcaggacgtgagaggccgggactaccagaacgccatgcgggtgtggtccaacatccctggactgaaaagcaagcacgcacctctgacccctaaagaagaggagtacctgcaggcccaggtgcggagcagaagcaagctggacgcccctaaggtggatctgctggtgaagaattgcctcctgcccctgagagagtacttcaagtatttcagccagaatagtctgcccctgggaggcagcggcggcggccagatgtgggtgaccttcgaggacgtggccgtgagcttcagccaggaggagtgggtgtacctggacgagggccagaaggagctgtacagggaggtgatgaaggagaactacgagaccgtgatgagcctggccggcgaggagttcagcaggggcaaggagaaggagggcagcatcgagcagcagagcctgaagaccgaggtgcacgagatgaacaagagggtgaagctgttcaagtgcagcgagggcggcccaagcagcggcgcccctcctcccagcggcggcaggcggcccaagcagcggcgcccctcctcccagcggcggcagcccagccggctccccaacctctaccgaggagggcacctctgagtccgccacccccgagagcggccctggcacctccaccgagcccagcgagggcagcgcacccggcagccctgccggcagccccacctccacagaggagggaaccagcaccgagcccagcgaaggcagcgccccaggcaccagcaccgagcctagtgagcaggagattaaacggatcaacaagatcagaagaagacttgtgaaagacagcaacaccaagaaggccggcaagacaggccccatgaaaaccctgctggttagagtgatgacacccgatctgagagagcggctggaaaacctgagaaagaagcctgaaaatatcccccagcccatcagcaatacatctagagccaacctgaataagctgctgaccgattacaccgaaatgaagaaggcgatcctgcatgtgtactgggaagagttccagaaggaccctgtgggcctgatgagccgggtggcccagcctgccagcaagaagatcgatcagaacaagctgaaacctgagatggacgagaagggcaacctgaccaccgccggctttgcctgctctcagtgtggccagcccctgttcgtgtacaagctggagcaggtgtctgagaagggcaaggcttacaccaactacttcggacggtgcaatgtggccgagcacgaaaagctgatcctgctggcccagctgaagcccgagaaggatagcgacgaagccgtgacatatagcctgggaaagtttgggcagagggccctggatttctacagcattcatgtgaccaaggagtccacccaccccgtgaagcccctggcccagatcgccggaaacagatacgcctccggacctgtgggaaaggccctgagcgacgcatgtatgggcacaatcgcctccttcctgtctaagtaccaggacatcatcatcgaacaccagaaggtggtgaagggcaaccagaagagactggagagcctgcgggagctggccggcaaggaaaacctggaataccctagcgtgaccctgccacctcagcctcacaccaaggagggcgttgatgcctacaacgaagtgatcgcccgggtgcgaatgtgggtgaacctgaacctgtggcagaagctgaagctaagcagagatgatgccaagcctctgctgagactgaagggattcccttcctttcctctggtcgagagacaggccaacgaagtggactggtgggacatggtgtgtaacgtgaagaagctgatcaacgagaaaaaggaggatggcaaggtgttttggcagaatctggctggctacaagagacaggaagccctgagaccatacctgagcagcgaggaagatcggaagaagggaaagaaattcgctcggtaccagctgggcgacctgctgctgcacctggaaaagaagcacggcgaggactggggaaaggtgtacgacgaggcctgggagcggattgacaagaaagtggaaggcctgagcaagcacatcaagctggaagaggaacggagaagcgaggacgcccagagcaaggccgccctgaccgactggctgcgggctaaggccagcttcgtgatcgagggcctgaaggaggccgacaaggacgagttctgcagatgcgagctgaagctgcagaagtggtacggggacctgcggggaaagcccttcgccatcgaagccgagaacagcatcctggacatcagcggcttcagcaagcagtacaactgtgccttcatctggcagaaggacggcgtgaagaagctgaacctgtacctgatcatcaactacttcaagggcggcaagctgcggttcaagaagatcaaacctgaagccttcgaagccaacagattctacaccgtgatcaacaaaaagagcggcgagatcgtgcccatggaggtgaacttcaacttcgacgaccccaacctgatcatcctgcctctggcctttggcaagagacagggcagagaattcatctggaacgacctgctgtccctggaaaccggcagcctgaagctggccaacggaagagtgatcgagaagacactgtacaacagaagaacccggcaggatgagcctgccctgttcgtggccctgaccttcgagcggcgggaggtcctggactcctccaatatcaaaccaatgaacctgatcggcgtggcaagaggcgaaaacatccccgccgtgatcgccctgaccgaccccgagggctgcccactgagccggtttaaggatagcctgggaaacccaacccacatcctgagaatcggcgagagctataaggagaagcagcggaccatccaggccaagaaggaggtggagcagcggagagccggcggctacagccggaagtacgccagcaaagccaagaatctggcagacgatatggtgagaaacaccgctagagatctgctgtactacgccgtgacccaggatgccatgctgatcttcgccaacctgagccggggcttcggccggcagggcaagcggaccttcatggccgagagacagtacacacggatggaggactggctgaccgccaagctggcctacgagggcctgagcaagacctacctgtccaagacactggcccagtacacctccaagacatgcagcaactgtgggtttaccatcaccagcgccgactacgacagggtgctggagaagctgaagaagacagcaacaggctggatgaccacaattaacggcaaggagctgaaggtggagggccagattacctactacaacagatacaagagacagaacgtagtcaaggacctgtccgtcgagctggatagactgagcgaagaatctgtgaacaacgacatctcctcctggacaaagggcagaagcggagaagctctgagcctcctgaagaaaagattctcccatagacccgtgcaggagaagttcgtgtgcctgaactgcggcttcgagacacacgcagccgagcaagccgccctgaacatcgccagatcctggctgttcctgcggagccaggagtacaagaaataccagacaaacaagacaaccggcaacaccgataagagagccttcgtcgagacctggcagtccttttaccggaagaagcttaaggaggtgtggaaacctgccgtgcggtctggcggatctggcggaggctccaccagccccaagaaaaagagaaaagtctaagctgccttctgcggggcttgccttctggccatgcccttcttctctcccttgcacctgtacctcttggtctttgaataaagcctgagtaggaaggctagcaaaaaaaaaaaaaaaaaaaaaaaaaaaaaaaaaaaaaaaaaaaaaaaaaaaaaaaaaaaaaaaaaaaaaaaaaaaaaaaagcccagccggctccccaacctctaccgaggagggcacctctgagtccgccacccccgagagcggccctggcacctccaccgagcccagcgagggcagcgcacccggcagccctgccggcagccccacctccacagaggagggaaccagcaccgagcccagcgaaggcagcgccccaggcaccagcaccgagcctagtgagcaggagattaaacggatcaacaagatcagaagaagacttgtgaaagacagcaacaccaagaaggccggcaagacaggccccatgaaaaccctgctggttagagtgatgacacccgatctgagagagcggctggaaaacctgagaaagaagcctgaaaatatcccccagcccatcagcaatacatctagagccaacctgaataagctgctgaccgattacaccgaaatgaagaaggcgatcctgcatgtgtactgggaagagttccagaaggaccctgtgggcctgatgagccgggtggcccagcctgccagcaagaagatcgatcagaacaagctgaaacctgagatggacgagaagggcaacctgaccaccgccggctttgcctgctctcagtgtggccagcccctgttcgtgtacaagctggagcaggtgtctgagaagggcaaggcttacaccaactacttcggacggtgcaatgtggccgagcacgaaaagctgatcctgctggcccagctgaagcccgagaaggatagcgacgaagccgtgacatatagcctgggaaagtttgggcagagggccctggatttctacagcattcatgtgaccaaggagtccacccaccccgtgaagcccctggcccagatcgccggaaacagatacgcctccggacctgtgggaaaggccctgagcgacgcatgtatgggcacaatcgcctccttcctgtctaagtaccaggacatcatcatcgaacaccagaaggtggtgaagggcaaccagaagagactggagagcctgcgggagctggccggcaaggaaaacctggaataccctagcgtgaccctgccacctcagcctcacaccaaggagggcgttgatgcctacaacgaagtgatcgcccgggtgcgaatgtgggtgaacctgaacctgtggcagaagctgaagctaagcagagatgatgccaagcctctgctgagactgaagggattcccttcctttcctctggtcgagagacaggccaacgaagtggactggtgggacatggtgtgtaacgtgaagaagctgatcaacgagaaaaaggaggatggcaaggtgttttggcagaatctggctggctacaagagacaggaagccctgagaccatacctgagcagcgaggaagatcggaagaagggaaagaaattcgctcggtaccagctgggcgacctgctgctgcacctggaaaagaagcacggcgaggactggggaaaggtgtacgacgaggcctgggagcggattgacaagaaagtggaaggcctgagcaagcacatcaagctggaagaggaacggagaagcgaggacgcccagagcaaggccgccctgaccgactggctgcgggctaaggccagcttcgtgatcgagggcctgaaggaggccgacaaggacgagttctgcagatgcgagctgaagctgcagaagtggtacggggacctgcggggaaagcccttcgccatcgaagccgagaacagcatcctggacatcagcggcttcagcaagcagtacaactgtgccttcatctggcagaaggacggcgtgaagaagctgaacctgtacctgatcatcaactacttcaagggcggcaagctgcggttcaagaagatcaaacctgaagccttcgaagccaacagattctacaccgtgatcaacaaaaagagcggcgagatcgtgcccatggaggtgaacttcaacttcgacgaccccaacctgatcatcctgcctctggcctttggcaagagacagggcagagaattcatctggaacgacctgctgtccctggaaaccggcagcctgaagctggccaacggaagagtgatcgagaagacactgtacaacagaagaacccggcaggatgagcctgccctgttcgtggccctgaccttcgagcggcgggaggtcctggactcctccaatatcaaaccaatgaacctgatcggcgtggcaagaggcgaaaacatccccgccgtgatcgccctgaccgaccccgagggctgcccactgagccggtttaaggatagcctgggaaacccaacccacatcctgagaatcggcgagagctataaggagaagcagcggaccatccaggccaagaaggaggtggagcagcggagagccggcggctacagccggaagtacgccagcaaagccaagaatctggcagacgatatggtgagaaacaccgctagagatctgctgtactacgccgtgacccaggatgccatgctgatcttcgccaacctgagccggggcttcggccggcagggcaagcggaccttcatggccgagagacagtacacacggatggaggactggctgaccgccaagctggcctacgagggcctgagcaagacctacctgtccaagacactggcccagtacacctccaagacatgcagcaactgtgggtttaccatcaccagcgccgactacgacagggtgctggagaagctgaagaagacagcaacaggctggatgaccacaattaacggcaaggagctgaaggtggagggccagattacctactacaacagatacaagagacagaacgtagtcaaggacctgtccgtcgagctggatagactgagcgaagaatctgtgaacaacgacatctcctcctggacaaagggcagaagcggagaagctctgagcctcctgaagaaaagattctcccatagacccgtgcaggagaagttcgtgtgcctgaactgcggcttcgagacacacgcagccgagcaagccgccctgaacatcgccagatcctggctgttcctgcggagccaggagtacaagaaataccagacaaacaagacaaccggcaacaccgataagagagccttcgtcgagacctggcagtccttttaccggaagaagcttaaggaggtgtggaaacctgccgtgcggtctggcggatctggcggaggctccaccagccccaagaaaaagagaaaagtctaagctgccttctgcggggcttgccttctggccatgcccttcttctctcccttgcacctgtacctcttggtctttgaataaagcctgagtaggaaggctagcaaaaaaaaaaaaaaaaaaaaaaaaaaaaaaaaaaaaaaaaaaaaaaaaaaaaaaaaaaaaaaaaaaaaaaaaaaaaaaaa

SEQ ID NO: 10424 - RNA, 8787 nt, synthetic construct
  source 1..8787: mol_type = other RNA
aggaaataagagagaaaagaagagtaagaagaaatataagagccaccatggcccctaagaagaagcgtaaagtgagccggatgaaccacgaccaggagttcgacccccctaaggtgtaccctcccgtccccgccgagaagagaaagcccatccgggtcctgagcctgttcgatggcatcgccaccggtctgctggtgctgaaggacctgggcatccaggtggataggtacattgcctccgaggtgtgcgaggactccatcaccgtgggaatggtgcgtcatcagggcaagatcatgtacgtgggcgacgtgcggagcgtgacacagaagcatatccaggagtggggccctttcgacctggtgatcggcggcagcccttgcaatgacctgagcatcgtgaacccagcccggaagggcctgtacgagggaaccggcagactgttcttcgagttttacagactgctgcacgacgcccggcctaaggaaggcgacgaccggcccttcttttggctgttcgagaatgtggtggccatgggagtcagcgacaagcgggatattagccggttcctggagagcaaccccgtgatgatcgatgccaaggaagtgagcgccgcccaccgggccagatacttctggggcaatctgcctggcatgaacagacccctggccagcaccgtgaacgacaagctggagctgcaggagtgcctggagcacggccggatcgccaagttcagcaaggtgagaaccatcaccacccgaagcaacagcatcaaacaaggcaaggaccagcactttcctgtgttcatgaacgagaaggaggacatcctgtggtgtaccgagatggagagagtgttcgggttcccagtccactacacagatgtcagcaacatgtctagactggccagacagagactgctgggaagaagctggtccgtccctgtgatcagacacctgttcgcccctctgaaggagtacttcgcctgcgtgagcagcggcaacagcaacgccaacagccggggccccagcttctctagcggcctggtgccactgtccctgagagggagccacatgggccccatggagatctacaaaaccgtgagcgcctggaagcggcagcctgtgcgcgtgctgagcctgtttcggaatatcgataaagtcctgaaaagcctgggattcctggagagcggctctggctccggcggtggcaccctgaagtacgtggaggatgtgacaaacgtggtcagacgggatgtggagaagtggggccccttcgatctggtgtacggcagcacccaacccctgggcagctcttgtgaccggtgccctggctggtacatgtttcagttccaccggatcctgcagtacgccctgccgagacaggagtcccagcggccattcttttggattttcatggacaacttgctgctgaccgaggatgaccaggaaactaccactcggttcctgcagaccgaagccgtgaccctgcaggacgtgagaggccgggactaccagaacgccatgcgggtgtggtccaacatccctggactgaaaagcaagcacgcacctctgacccctaaagaagaggagtacctgcaggcccaggtgcggagcagaagcaagctggacgcccctaaggtggatctgctggtgaagaattgcctcctgcccctgagagagtacttcaagtatttcagccagaatagtctgcccctgggaggcagcggcggcggcctgcaggccagcgtgaccttcgaggacgtggccgtggacttcagcgccgaggagtggaggaggctgaggcccctgcagagggagctgtacagggaggtgatgctggagaactacaggagcctggcctggctgggcctggccgccagcaagcccggcgtgatctgcaggctggagaggggcgaggcccccagggagcccgaccccgacggcccccagagcggctgggccgactgcggcaccggcggcggcccaagcagcggcgcccctcctcccagcggcggcaggcggcccaagcagcggcgcccctcctcccagcggcggcagcccagccggctccccaacctctaccgaggagggcacctctgagtccgccacccccgagagcggccctggcacctccaccgagcccagcgagggcagcgcacccggcagccctgccggcagccccacctccacagaggagggaaccagcaccgagcccagcgaaggcagcgccccaggcaccagcaccgagcctagtgagcaggagattaaacggatcaacaagatcagaagaagacttgtgaaagacagcaacaccaagaaggccggcaagacaggccccatgaaaaccctgctggttagagtgatgacacccgatctgagagagcggctggaaaacctgagaaagaagcctgaaaatatcccccagcccatcagcaatacatctagagccaacctgaataagctgctgaccgattacaccgaaatgaagaaggcgatcctgcatgtgtactgggaagagttccagaaggaccctgtgggcctgatgagccgggtggcccagcctgccagcaagaagatcgatcagaacaagctgaaacctgagatggacgagaagggcaacctgaccaccgccggctttgcctgctctcagtgtggccagcccctgttcgtgtacaagctggagcaggtgtctgagaagggcaaggcttacaccaactacttcggacggtgcaatgtggccgagcacgaaaagctgatcctgctggcccagctgaagcccgagaaggatagcgacgaagccgtgacatatagcctgggaaagtttgggcagagggccctggatttctacagcattcatgtgaccaaggagtccacccaccccgtgaagcccctggcccagatcgccggaaacagatacgcctccggacctgtgggaaaggccctgagcgacgcatgtatgggcacaatcgcctccttcctgtctaagtaccaggacatcatcatcgaacaccagaaggtggtgaagggcaaccagaagagactggagagcctgcgggagctggccggcaaggaaaacctggaataccctagcgtgaccctgccacctcagcctcacaccaaggagggcgttgatgcctacaacgaagtgatcgcccgggtgcgaatgtgggtgaacctgaacctgtggcagaagctgaagctaagcagagatgatgccaagcctctgctgagactgaagggattcccttcctttcctctggtcgagagacaggccaacgaagtggactggtgggacatggtgtgtaacgtgaagaagctgatcaacgagaaaaaggaggatggcaaggtgttttggcagaatctggctggctacaagagacaggaagccctgagaccatacctgagcagcgaggaagatcggaagaagggaaagaaattcgctcggtaccagctgggcgacctgctgctgcacctggaaaagaagcacggcgaggactggggaaaggtgtacgacgaggcctgggagcggattgacaagaaagtggaaggcctgagcaagcacatcaagctggaagaggaacggagaagcgaggacgcccagagcaaggccgccctgaccgactggctgcgggctaaggccagcttcgtgatcgagggcctgaaggaggccgacaaggacgagttctgcagatgcgagctgaagctgcagaagtggtacggggacctgcggggaaagcccttcgccatcgaagccgagaacagcatcctggacatcagcggcttcagcaagcagtacaactgtgccttcatctggcagaaggacggcgtgaagaagctgaacctgtacctgatcatcaactacttcaagggcggcaagctgcggttcaagaagatcaaacctgaagccttcgaagccaacagattctacaccgtgatcaacaaaaagagcggcgagatcgtgcccatggaggtgaacttcaacttcgacgaccccaacctgatcatcctgcctctggcctttggcaagagacagggcagagaattcatctggaacgacctgctgtccctggaaaccggcagcctgaagctggccaacggaagagtgatcgagaagacactgtacaacagaagaacccggcaggatgagcctgccctgttcgtggccctgaccttcgagcggcgggaggtcctggactcctccaatatcaaaccaatgaacctgatcggcgtggcaagaggcgaaaacatccccgccgtgatcgccctgaccgaccccgagggctgcccactgagccggtttaaggatagcctgggaaacccaacccacatcctgagaatcggcgagagctataaggagaagcagcggaccatccaggccaagaaggaggtggagcagcggagagccggcggctacagccggaagtacgccagcaaagccaagaatctggcagacgatatggtgagaaacaccgctagagatctgctgtactacgccgtgacccaggatgccatgctgatcttcgccaacctgagccggggcttcggccggcagggcaagcggaccttcatggccgagagacagtacacacggatggaggactggctgaccgccaagctggcctacgagggcctgagcaagacctacctgtccaagacactggcccagtacacctccaagacatgcagcaactgtgggtttaccatcaccagcgccgactacgacagggtgctggagaagctgaagaagacagcaacaggctggatgaccacaattaacggcaaggagctgaaggtggagggccagattacctactacaacagatacaagagacagaacgtagtcaaggacctgtccgtcgagctggatagactgagcgaagaatctgtgaacaacgacatctcctcctggacaaagggcagaagcggagaagctctgagcctcctgaagaaaagattctcccatagacccgtgcaggagaagttcgtgtgcctgaactgcggcttcgagacacacgcagccgagcaagccgccctgaacatcgccagatcctggctgttcctgcggagccaggagtacaagaaataccagacaaacaagacaaccggcaacaccgataagagagccttcgtcgagacctggcagtccttttaccggaagaagcttaaggaggtgtggaaacctgccgtgcggtctggcggatctggcggaggctccaccagccccaagaaaaagagaaaagtctaagctgccttctgcggggcttgccttctggccatgcccttcttctctcccttgcacctgtacctcttggtctttgaataaagcctgagtaggaaggctagcaaaaaaaaaaaaaaaaaaaaaaaaaaaaaaaaaaaaaaaaaaaaaaaaaaaaaaaaaaaaaaaaaaaaaaaaaaaaaaaagcccagccggctccccaacctctaccgaggagggcacctctgagtccgccacccccgagagcggccctggcacctccaccgagcccagcgagggcagcgcacccggcagccctgccggcagccccacctccacagaggagggaaccagcaccgagcccagcgaaggcagcgccccaggcaccagcaccgagcctagtgagcaggagattaaacggatcaacaagatcagaagaagacttgtgaaagacagcaacaccaagaaggccggcaagacaggccccatgaaaaccctgctggttagagtgatgacacccgatctgagagagcggctggaaaacctgagaaagaagcctgaaaatatcccccagcccatcagcaatacatctagagccaacctgaataagctgctgaccgattacaccgaaatgaagaaggcgatcctgcatgtgtactgggaagagttccagaaggaccctgtgggcctgatgagccgggtggcccagcctgccagcaagaagatcgatcagaacaagctgaaacctgagatggacgagaagggcaacctgaccaccgccggctttgcctgctctcagtgtggccagcccctgttcgtgtacaagctggagcaggtgtctgagaagggcaaggcttacaccaactacttcggacggtgcaatgtggccgagcacgaaaagctgatcctgctggcccagctgaagcccgagaaggatagcgacgaagccgtgacatatagcctgggaaagtttgggcagagggccctggatttctacagcattcatgtgaccaaggagtccacccaccccgtgaagcccctggcccagatcgccggaaacagatacgcctccggacctgtgggaaaggccctgagcgacgcatgtatgggcacaatcgcctccttcctgtctaagtaccaggacatcatcatcgaacaccagaaggtggtgaagggcaaccagaagagactggagagcctgcgggagctggccggcaaggaaaacctggaataccctagcgtgaccctgccacctcagcctcacaccaaggagggcgttgatgcctacaacgaagtgatcgcccgggtgcgaatgtgggtgaacctgaacctgtggcagaagctgaagctaagcagagatgatgccaagcctctgctgagactgaagggattcccttcctttcctctggtcgagagacaggccaacgaagtggactggtgggacatggtgtgtaacgtgaagaagctgatcaacgagaaaaaggaggatggcaaggtgttttggcagaatctggctggctacaagagacaggaagccctgagaccatacctgagcagcgaggaagatcggaagaagggaaagaaattcgctcggtaccagctgggcgacctgctgctgcacctggaaaagaagcacggcgaggactggggaaaggtgtacgacgaggcctgggagcggattgacaagaaagtggaaggcctgagcaagcacatcaagctggaagaggaacggagaagcgaggacgcccagagcaaggccgccctgaccgactggctgcgggctaaggccagcttcgtgatcgagggcctgaaggaggccgacaaggacgagttctgcagatgcgagctgaagctgcagaagtggtacggggacctgcggggaaagcccttcgccatcgaagccgagaacagcatcctggacatcagcggcttcagcaagcagtacaactgtgccttcatctggcagaaggacggcgtgaagaagctgaacctgtacctgatcatcaactacttcaagggcggcaagctgcggttcaagaagatcaaacctgaagccttcgaagccaacagattctacaccgtgatcaacaaaaagagcggcgagatcgtgcccatggaggtgaacttcaacttcgacgaccccaacctgatcatcctgcctctggcctttggcaagagacagggcagagaattcatctggaacgacctgctgtccctggaaaccggcagcctgaagctggccaacggaagagtgatcgagaagacactgtacaacagaagaacccggcaggatgagcctgccctgttcgtggccctgaccttcgagcggcgggaggtcctggactcctccaatatcaaaccaatgaacctgatcggcgtggcaagaggcgaaaacatccccgccgtgatcgccctgaccgaccccgagggctgcccactgagccggtttaaggatagcctgggaaacccaacccacatcctgagaatcggcgagagctataaggagaagcagcggaccatccaggccaagaaggaggtggagcagcggagagccggcggctacagccggaagtacgccagcaaagccaagaatctggcagacgatatggtgagaaacaccgctagagatctgctgtactacgccgtgacccaggatgccatgctgatcttcgccaacctgagccggggcttcggccggcagggcaagcggaccttcatggccgagagacagtacacacggatggaggactggctgaccgccaagctggcctacgagggcctgagcaagacctacctgtccaagacactggcccagtacacctccaagacatgcagcaactgtgggtttaccatcaccagcgccgactacgacagggtgctggagaagctgaagaagacagcaacaggctggatgaccacaattaacggcaaggagctgaaggtggagggccagattacctactacaacagatacaagagacagaacgtagtcaaggacctgtccgtcgagctggatagactgagcgaagaatctgtgaacaacgacatctcctcctggacaaagggcagaagcggagaagctctgagcctcctgaagaaaagattctcccatagacccgtgcaggagaagttcgtgtgcctgaactgcggcttcgagacacacgcagccgagcaagccgccctgaacatcgccagatcctggctgttcctgcggagccaggagtacaagaaataccagacaaacaagacaaccggcaacaccgataagagagccttcgtcgagacctggcagtccttttaccggaagaagcttaaggaggtgtggaaacctgccgtgcggtctggcggatctggcggaggctccaccagccccaagaaaaagagaaaagtctaagctgccttctgcggggcttgccttctggccatgcccttcttctctcccttgcacctgtacctcttggtctttgaataaagcctgagtaggaaggctagcaaaaaaaaaaaaaaaaaaaaaaaaaaaaaaaaaaaaaaaaaaaaaaaaaaaaaaaaaaaaaaaaaaaaaaaaaaaaaaaa

SEQ ID NO: 10425 - RNA, 8787 nt, synthetic construct
  source 1..8787: mol_type = other RNA
aggaaataagagagaaaagaagagtaagaagaaatataagagccaccatggcccctaagaagaagcgtaaagtgagccggatgaaccacgaccaggagttcgacccccctaaggtgtaccctcccgtccccgccgagaagagaaagcccatccgggtcctgagcctgttcgatggcatcgccaccggtctgctggtgctgaaggacctgggcatccaggtggataggtacattgcctccgaggtgtgcgaggactccatcaccgtgggaatggtgcgtcatcagggcaagatcatgtacgtgggcgacgtgcggagcgtgacacagaagcatatccaggagtggggccctttcgacctggtgatcggcggcagcccttgcaatgacctgagcatcgtgaacccagcccggaagggcctgtacgagggaaccggcagactgttcttcgagttttacagactgctgcacgacgcccggcctaaggaaggcgacgaccggcccttcttttggctgttcgagaatgtggtggccatgggagtcagcgacaagcgggatattagccggttcctggagagcaaccccgtgatgatcgatgccaaggaagtgagcgccgcccaccgggccagatacttctggggcaatctgcctggcatgaacagacccctggccagcaccgtgaacgacaagctggagctgcaggagtgcctggagcacggccggatcgccaagttcagcaaggtgagaaccatcaccacccgaagcaacagcatcaaacaaggcaaggaccagcactttcctgtgttcatgaacgagaaggaggacatcctgtggtgtaccgagatggagagagtgttcgggttcccagtccactacacagatgtcagcaacatgtctagactggccagacagagactgctgggaagaagctggtccgtccctgtgatcagacacctgttcgcccctctgaaggagtacttcgcctgcgtgagcagcggcaacagcaacgccaacagccggggccccagcttctctagcggcctggtgccactgtccctgagagggagccacatgggccccatggagatctacaaaaccgtgagcgcctggaagcggcagcctgtgcgcgtgctgagcctgtttcggaatatcgataaagtcctgaaaagcctgggattcctggagagcggctctggctccggcggtggcaccctgaagtacgtggaggatgtgacaaacgtggtcagacgggatgtggagaagtggggccccttcgatctggtgtacggcagcacccaacccctgggcagctcttgtgaccggtgccctggctggtacatgtttcagttccaccggatcctgcagtacgccctgccgagacaggagtcccagcggccattcttttggattttcatggacaacttgctgctgaccgaggatgaccaggaaactaccactcggttcctgcagaccgaagccgtgaccctgcaggacgtgagaggccgggactaccagaacgccatgcgggtgtggtccaacatccctggactgaaaagcaagcacgcacctctgacccctaaagaagaggagtacctgcaggcccaggtgcggagcagaagcaagctggacgcccctaaggtggatctgctggtgaagaattgcctcctgcccctgagagagtacttcaagtatttcagccagaatagtctgcccctgggaggcagcggcggcggcagccagggcctggtgaccttcggcgacgtggccgtggtgttcagccaggaggagtgggagtggctgagcagcgagcagaggagcctgtactggaaggtgatgctggacaactacaggaacctggccagcctgggcctgtgcgccagcaagcccgacatgatcaccagcctggagcagggcagggacccctggatgatgaagaggaagatgaggaagggccagaggctggacctgaaggccatgggcggcccaagcagcggcgcccctcctcccagcggcggcaggcggcccaagcagcggcgcccctcctcccagcggcggcagcccagccggctccccaacctctaccgaggagggcacctctgagtccgccacccccgagagcggccctggcacctccaccgagcccagcgagggcagcgcacccggcagccctgccggcagccccacctccacagaggagggaaccagcaccgagcccagcgaaggcagcgccccaggcaccagcaccgagcctagtgagcaggagattaaacggatcaacaagatcagaagaagacttgtgaaagacagcaacaccaagaaggccggcaagacaggccccatgaaaaccctgctggttagagtgatgacacccgatctgagagagcggctggaaaacctgagaaagaagcctgaaaatatcccccagcccatcagcaatacatctagagccaacctgaataagctgctgaccgattacaccgaaatgaagaaggcgatcctgcatgtgtactgggaagagttccagaaggaccctgtgggcctgatgagccgggtggcccagcctgccagcaagaagatcgatcagaacaagctgaaacctgagatggacgagaagggcaacctgaccaccgccggctttgcctgctctcagtgtggccagcccctgttcgtgtacaagctggagcaggtgtctgagaagggcaaggcttacaccaactacttcggacggtgcaatgtggccgagcacgaaaagctgatcctgctggcccagctgaagcccgagaaggatagcgacgaagccgtgacatatagcctgggaaagtttgggcagagggccctggatttctacagcattcatgtgaccaaggagtccacccaccccgtgaagcccctggcccagatcgccggaaacagatacgcctccggacctgtgggaaaggccctgagcgacgcatgtatgggcacaatcgcctccttcctgtctaagtaccaggacatcatcatcgaacaccagaaggtggtgaagggcaaccagaagagactggagagcctgcgggagctggccggcaaggaaaacctggaataccctagcgtgaccctgccacctcagcctcacaccaaggagggcgttgatgcctacaacgaagtgatcgcccgggtgcgaatgtgggtgaacctgaacctgtggcagaagctgaagctaagcagagatgatgccaagcctctgctgagactgaagggattcccttcctttcctctggtcgagagacaggccaacgaagtggactggtgggacatggtgtgtaacgtgaagaagctgatcaacgagaaaaaggaggatggcaaggtgttttggcagaatctggctggctacaagagacaggaagccctgagaccatacctgagcagcgaggaagatcggaagaagggaaagaaattcgctcggtaccagctgggcgacctgctgctgcacctggaaaagaagcacggcgaggactggggaaaggtgtacgacgaggcctgggagcggattgacaagaaagtggaaggcctgagcaagcacatcaagctggaagaggaacggagaagcgaggacgcccagagcaaggccgccctgaccgactggctgcgggctaaggccagcttcgtgatcgagggcctgaaggaggccgacaaggacgagttctgcagatgcgagctgaagctgcagaagtggtacggggacctgcggggaaagcccttcgccatcgaagccgagaacagcatcctggacatcagcggcttcagcaagcagtacaactgtgccttcatctggcagaaggacggcgtgaagaagctgaacctgtacctgatcatcaactacttcaagggcggcaagctgcggttcaagaagatcaaacctgaagccttcgaagccaacagattctacaccgtgatcaacaaaaagagcggcgagatcgtgcccatggaggtgaacttcaacttcgacgaccccaacctgatcatcctgcctctggcctttggcaagagacagggcagagaattcatctggaacgacctgctgtccctggaaaccggcagcctgaagctggccaacggaagagtgatcgagaagacactgtacaacagaagaacccggcaggatgagcctgccctgttcgtggccctgaccttcgagcggcgggaggtcctggactcctccaatatcaaaccaatgaacctgatcggcgtggcaagaggcgaaaacatccccgccgtgatcgccctgaccgaccccgagggctgcccactgagccggtttaaggatagcctgggaaacccaacccacatcctgagaatcggcgagagctataaggagaagcagcggaccatccaggccaagaaggaggtggagcagcggagagccggcggctacagccggaagtacgccagcaaagccaagaatctggcagacgatatggtgagaaacaccgctagagatctgctgtactacgccgtgacccaggatgccatgctgatcttcgccaacctgagccggggcttcggccggcagggcaagcggaccttcatggccgagagacagtacacacggatggaggactggctgaccgccaagctggcctacgagggcctgagcaagacctacctgtccaagacactggcccagtacacctccaagacatgcagcaactgtgggtttaccatcaccagcgccgactacgacagggtgctggagaagctgaagaagacagcaacaggctggatgaccacaattaacggcaaggagctgaaggtggagggccagattacctactacaacagatacaagagacagaacgtagtcaaggacctgtccgtcgagctggatagactgagcgaagaatctgtgaacaacgacatctcctcctggacaaagggcagaagcggagaagctctgagcctcctgaagaaaagattctcccatagacccgtgcaggagaagttcgtgtgcctgaactgcggcttcgagacacacgcagccgagcaagccgccctgaacatcgccagatcctggctgttcctgcggagccaggagtacaagaaataccagacaaacaagacaaccggcaacaccgataagagagccttcgtcgagacctggcagtccttttaccggaagaagcttaaggaggtgtggaaacctgccgtgcggtctggcggatctggcggaggctccaccagccccaagaaaaagagaaaagtctaagctgccttctgcggggcttgccttctggccatgcccttcttctctcccttgcacctgtacctcttggtctttgaataaagcctgagtaggaaggctagcaaaaaaaaaaaaaaaaaaaaaaaaaaaaaaaaaaaaaaaaaaaaaaaaaaaaaaaaaaaaaaaaaaaaaaaaaaaaaaaagcccagccggctccccaacctctaccgaggagggcacctctgagtccgccacccccgagagcggccctggcacctccaccgagcccagcgagggcagcgcacccggcagccctgccggcagccccacctccacagaggagggaaccagcaccgagcccagcgaaggcagcgccccaggcaccagcaccgagcctagtgagcaggagattaaacggatcaacaagatcagaagaagacttgtgaaagacagcaacaccaagaaggccggcaagacaggccccatgaaaaccctgctggttagagtgatgacacccgatctgagagagcggctggaaaacctgagaaagaagcctgaaaatatcccccagcccatcagcaatacatctagagccaacctgaataagctgctgaccgattacaccgaaatgaagaaggcgatcctgcatgtgtactgggaagagttccagaaggaccctgtgggcctgatgagccgggtggcccagcctgccagcaagaagatcgatcagaacaagctgaaacctgagatggacgagaagggcaacctgaccaccgccggctttgcctgctctcagtgtggccagcccctgttcgtgtacaagctggagcaggtgtctgagaagggcaaggcttacaccaactacttcggacggtgcaatgtggccgagcacgaaaagctgatcctgctggcccagctgaagcccgagaaggatagcgacgaagccgtgacatatagcctgggaaagtttgggcagagggccctggatttctacagcattcatgtgaccaaggagtccacccaccccgtgaagcccctggcccagatcgccggaaacagatacgcctccggacctgtgggaaaggccctgagcgacgcatgtatgggcacaatcgcctccttcctgtctaagtaccaggacatcatcatcgaacaccagaaggtggtgaagggcaaccagaagagactggagagcctgcgggagctggccggcaaggaaaacctggaataccctagcgtgaccctgccacctcagcctcacaccaaggagggcgttgatgcctacaacgaagtgatcgcccgggtgcgaatgtgggtgaacctgaacctgtggcagaagctgaagctaagcagagatgatgccaagcctctgctgagactgaagggattcccttcctttcctctggtcgagagacaggccaacgaagtggactggtgggacatggtgtgtaacgtgaagaagctgatcaacgagaaaaaggaggatggcaaggtgttttggcagaatctggctggctacaagagacaggaagccctgagaccatacctgagcagcgaggaagatcggaagaagggaaagaaattcgctcggtaccagctgggcgacctgctgctgcacctggaaaagaagcacggcgaggactggggaaaggtgtacgacgaggcctgggagcggattgacaagaaagtggaaggcctgagcaagcacatcaagctggaagaggaacggagaagcgaggacgcccagagcaaggccgccctgaccgactggctgcgggctaaggccagcttcgtgatcgagggcctgaaggaggccgacaaggacgagttctgcagatgcgagctgaagctgcagaagtggtacggggacctgcggggaaagcccttcgccatcgaagccgagaacagcatcctggacatcagcggcttcagcaagcagtacaactgtgccttcatctggcagaaggacggcgtgaagaagctgaacctgtacctgatcatcaactacttcaagggcggcaagctgcggttcaagaagatcaaacctgaagccttcgaagccaacagattctacaccgtgatcaacaaaaagagcggcgagatcgtgcccatggaggtgaacttcaacttcgacgaccccaacctgatcatcctgcctctggcctttggcaagagacagggcagagaattcatctggaacgacctgctgtccctggaaaccggcagcctgaagctggccaacggaagagtgatcgagaagacactgtacaacagaagaacccggcaggatgagcctgccctgttcgtggccctgaccttcgagcggcgggaggtcctggactcctccaatatcaaaccaatgaacctgatcggcgtggcaagaggcgaaaacatccccgccgtgatcgccctgaccgaccccgagggctgcccactgagccggtttaaggatagcctgggaaacccaacccacatcctgagaatcggcgagagctataaggagaagcagcggaccatccaggccaagaaggaggtggagcagcggagagccggcggctacagccggaagtacgccagcaaagccaagaatctggcagacgatatggtgagaaacaccgctagagatctgctgtactacgccgtgacccaggatgccatgctgatcttcgccaacctgagccggggcttcggccggcagggcaagcggaccttcatggccgagagacagtacacacggatggaggactggctgaccgccaagctggcctacgagggcctgagcaagacctacctgtccaagacactggcccagtacacctccaagacatgcagcaactgtgggtttaccatcaccagcgccgactacgacagggtgctggagaagctgaagaagacagcaacaggctggatgaccacaattaacggcaaggagctgaaggtggagggccagattacctactacaacagatacaagagacagaacgtagtcaaggacctgtccgtcgagctggatagactgagcgaagaatctgtgaacaacgacatctcctcctggacaaagggcagaagcggagaagctctgagcctcctgaagaaaagattctcccatagacccgtgcaggagaagttcgtgtgcctgaactgcggcttcgagacacacgcagccgagcaagccgccctgaacatcgccagatcctggctgttcctgcggagccaggagtacaagaaataccagacaaacaagacaaccggcaacaccgataagagagccttcgtcgagacctggcagtccttttaccggaagaagcttaaggaggtgtggaaacctgccgtgcggtctggcggatctggcggaggctccaccagccccaagaaaaagagaaaagtctaagctgccttctgcggggcttgccttctggccatgcccttcttctctcccttgcacctgtacctcttggtctttgaataaagcctgagtaggaaggctagcaaaaaaaaaaaaaaaaaaaaaaaaaaaaaaaaaaaaaaaaaaaaaaaaaaaaaaaaaaaaaaaaaaaaaaaaaaaaaaaa

SEQ ID NO: 10426 - RNA, 8787 nt, synthetic construct
  source 1..8787: mol_type = other RNA
aggaaataagagagaaaagaagagtaagaagaaatataagagccaccatggcccctaagaagaagcgtaaagtgagccggatgaaccacgaccaggagttcgacccccctaaggtgtaccctcccgtccccgccgagaagagaaagcccatccgggtcctgagcctgttcgatggcatcgccaccggtctgctggtgctgaaggacctgggcatccaggtggataggtacattgcctccgaggtgtgcgaggactccatcaccgtgggaatggtgcgtcatcagggcaagatcatgtacgtgggcgacgtgcggagcgtgacacagaagcatatccaggagtggggccctttcgacctggtgatcggcggcagcccttgcaatgacctgagcatcgtgaacccagcccggaagggcctgtacgagggaaccggcagactgttcttcgagttttacagactgctgcacgacgcccggcctaaggaaggcgacgaccggcccttcttttggctgttcgagaatgtggtggccatgggagtcagcgacaagcgggatattagccggttcctggagagcaaccccgtgatgatcgatgccaaggaagtgagcgccgcccaccgggccagatacttctggggcaatctgcctggcatgaacagacccctggccagcaccgtgaacgacaagctggagctgcaggagtgcctggagcacggccggatcgccaagttcagcaaggtgagaaccatcaccacccgaagcaacagcatcaaacaaggcaaggaccagcactttcctgtgttcatgaacgagaaggaggacatcctgtggtgtaccgagatggagagagtgttcgggttcccagtccactacacagatgtcagcaacatgtctagactggccagacagagactgctgggaagaagctggtccgtccctgtgatcagacacctgttcgcccctctgaaggagtacttcgcctgcgtgagcagcggcaacagcaacgccaacagccggggccccagcttctctagcggcctggtgccactgtccctgagagggagccacatgggccccatggagatctacaaaaccgtgagcgcctggaagcggcagcctgtgcgcgtgctgagcctgtttcggaatatcgataaagtcctgaaaagcctgggattcctggagagcggctctggctccggcggtggcaccctgaagtacgtggaggatgtgacaaacgtggtcagacgggatgtggagaagtggggccccttcgatctggtgtacggcagcacccaacccctgggcagctcttgtgaccggtgccctggctggtacatgtttcagttccaccggatcctgcagtacgccctgccgagacaggagtcccagcggccattcttttggattttcatggacaacttgctgctgaccgaggatgaccaggaaactaccactcggttcctgcagaccgaagccgtgaccctgcaggacgtgagaggccgggactaccagaacgccatgcgggtgtggtccaacatccctggactgaaaagcaagcacgcacctctgacccctaaagaagaggagtacctgcaggcccaggtgcggagcagaagcaagctggacgcccctaaggtggatctgctggtgaagaattgcctcctgcccctgagagagtacttcaagtatttcagccagaatagtctgcccctgggaggcagcggcggcggcaggcccgagctggtgaccttcgaggacgtggccgtgtacttcagcgagaacgagtggaccagcctggcccccacccagagggtgctgtacagggacgtgatgctggagaactacggcgccgtggccagcctggccgtgcccttccccaagcccgccctgatcagccagctggagaggggcgaggccccctggtgcaaggccccccagggcgccctggacggcgagggccccaggggcatcagcggcggcccaagcagcggcgcccctcctcccagcggcggcaggcggcccaagcagcggcgcccctcctcccagcggcggcagcccagccggctccccaacctctaccgaggagggcacctctgagtccgccacccccgagagcggccctggcacctccaccgagcccagcgagggcagcgcacccggcagccctgccggcagccccacctccacagaggagggaaccagcaccgagcccagcgaaggcagcgccccaggcaccagcaccgagcctagtgagcaggagattaaacggatcaacaagatcagaagaagacttgtgaaagacagcaacaccaagaaggccggcaagacaggccccatgaaaaccctgctggttagagtgatgacacccgatctgagagagcggctggaaaacctgagaaagaagcctgaaaatatcccccagcccatcagcaatacatctagagccaacctgaataagctgctgaccgattacaccgaaatgaagaaggcgatcctgcatgtgtactgggaagagttccagaaggaccctgtgggcctgatgagccgggtggcccagcctgccagcaagaagatcgatcagaacaagctgaaacctgagatggacgagaagggcaacctgaccaccgccggctttgcctgctctcagtgtggccagcccctgttcgtgtacaagctggagcaggtgtctgagaagggcaaggcttacaccaactacttcggacggtgcaatgtggccgagcacgaaaagctgatcctgctggcccagctgaagcccgagaaggatagcgacgaagccgtgacatatagcctgggaaagtttgggcagagggccctggatttctacagcattcatgtgaccaaggagtccacccaccccgtgaagcccctggcccagatcgccggaaacagatacgcctccggacctgtgggaaaggccctgagcgacgcatgtatgggcacaatcgcctccttcctgtctaagtaccaggacatcatcatcgaacaccagaaggtggtgaagggcaaccagaagagactggagagcctgcgggagctggccggcaaggaaaacctggaataccctagcgtgaccctgccacctcagcctcacaccaaggagggcgttgatgcctacaacgaagtgatcgcccgggtgcgaatgtgggtgaacctgaacctgtggcagaagctgaagctaagcagagatgatgccaagcctctgctgagactgaagggattcccttcctttcctctggtcgagagacaggccaacgaagtggactggtgggacatggtgtgtaacgtgaagaagctgatcaacgagaaaaaggaggatggcaaggtgttttggcagaatctggctggctacaagagacaggaagccctgagaccatacctgagcagcgaggaagatcggaagaagggaaagaaattcgctcggtaccagctgggcgacctgctgctgcacctggaaaagaagcacggcgaggactggggaaaggtgtacgacgaggcctgggagcggattgacaagaaagtggaaggcctgagcaagcacatcaagctggaagaggaacggagaagcgaggacgcccagagcaaggccgccctgaccgactggctgcgggctaaggccagcttcgtgatcgagggcctgaaggaggccgacaaggacgagttctgcagatgcgagctgaagctgcagaagtggtacggggacctgcggggaaagcccttcgccatcgaagccgagaacagcatcctggacatcagcggcttcagcaagcagtacaactgtgccttcatctggcagaaggacggcgtgaagaagctgaacctgtacctgatcatcaactacttcaagggcggcaagctgcggttcaagaagatcaaacctgaagccttcgaagccaacagattctacaccgtgatcaacaaaaagagcggcgagatcgtgcccatggaggtgaacttcaacttcgacgaccccaacctgatcatcctgcctctggcctttggcaagagacagggcagagaattcatctggaacgacctgctgtccctggaaaccggcagcctgaagctggccaacggaagagtgatcgagaagacactgtacaacagaagaacccggcaggatgagcctgccctgttcgtggccctgaccttcgagcggcgggaggtcctggactcctccaatatcaaaccaatgaacctgatcggcgtggcaagaggcgaaaacatccccgccgtgatcgccctgaccgaccccgagggctgcccactgagccggtttaaggatagcctgggaaacccaacccacatcctgagaatcggcgagagctataaggagaagcagcggaccatccaggccaagaaggaggtggagcagcggagagccggcggctacagccggaagtacgccagcaaagccaagaatctggcagacgatatggtgagaaacaccgctagagatctgctgtactacgccgtgacccaggatgccatgctgatcttcgccaacctgagccggggcttcggccggcagggcaagcggaccttcatggccgagagacagtacacacggatggaggactggctgaccgccaagctggcctacgagggcctgagcaagacctacctgtccaagacactggcccagtacacctccaagacatgcagcaactgtgggtttaccatcaccagcgccgactacgacagggtgctggagaagctgaagaagacagcaacaggctggatgaccacaattaacggcaaggagctgaaggtggagggccagattacctactacaacagatacaagagacagaacgtagtcaaggacctgtccgtcgagctggatagactgagcgaagaatctgtgaacaacgacatctcctcctggacaaagggcagaagcggagaagctctgagcctcctgaagaaaagattctcccatagacccgtgcaggagaagttcgtgtgcctgaactgcggcttcgagacacacgcagccgagcaagccgccctgaacatcgccagatcctggctgttcctgcggagccaggagtacaagaaataccagacaaacaagacaaccggcaacaccgataagagagccttcgtcgagacctggcagtccttttaccggaagaagcttaaggaggtgtggaaacctgccgtgcggtctggcggatctggcggaggctccaccagccccaagaaaaagagaaaagtctaagctgccttctgcggggcttgccttctggccatgcccttcttctctcccttgcacctgtacctcttggtctttgaataaagcctgagtaggaaggctagcaaaaaaaaaaaaaaaaaaaaaaaaaaaaaaaaaaaaaaaaaaaaaaaaaaaaaaaaaaaaaaaaaaaaaaaaaaaaaaaagcccagccggctccccaacctctaccgaggagggcacctctgagtccgccacccccgagagcggccctggcacctccaccgagcccagcgagggcagcgcacccggcagccctgccggcagccccacctccacagaggagggaaccagcaccgagcccagcgaaggcagcgccccaggcaccagcaccgagcctagtgagcaggagattaaacggatcaacaagatcagaagaagacttgtgaaagacagcaacaccaagaaggccggcaagacaggccccatgaaaaccctgctggttagagtgatgacacccgatctgagagagcggctggaaaacctgagaaagaagcctgaaaatatcccccagcccatcagcaatacatctagagccaacctgaataagctgctgaccgattacaccgaaatgaagaaggcgatcctgcatgtgtactgggaagagttccagaaggaccctgtgggcctgatgagccgggtggcccagcctgccagcaagaagatcgatcagaacaagctgaaacctgagatggacgagaagggcaacctgaccaccgccggctttgcctgctctcagtgtggccagcccctgttcgtgtacaagctggagcaggtgtctgagaagggcaaggcttacaccaactacttcggacggtgcaatgtggccgagcacgaaaagctgatcctgctggcccagctgaagcccgagaaggatagcgacgaagccgtgacatatagcctgggaaagtttgggcagagggccctggatttctacagcattcatgtgaccaaggagtccacccaccccgtgaagcccctggcccagatcgccggaaacagatacgcctccggacctgtgggaaaggccctgagcgacgcatgtatgggcacaatcgcctccttcctgtctaagtaccaggacatcatcatcgaacaccagaaggtggtgaagggcaaccagaagagactggagagcctgcgggagctggccggcaaggaaaacctggaataccctagcgtgaccctgccacctcagcctcacaccaaggagggcgttgatgcctacaacgaagtgatcgcccgggtgcgaatgtgggtgaacctgaacctgtggcagaagctgaagctaagcagagatgatgccaagcctctgctgagactgaagggattcccttcctttcctctggtcgagagacaggccaacgaagtggactggtgggacatggtgtgtaacgtgaagaagctgatcaacgagaaaaaggaggatggcaaggtgttttggcagaatctggctggctacaagagacaggaagccctgagaccatacctgagcagcgaggaagatcggaagaagggaaagaaattcgctcggtaccagctgggcgacctgctgctgcacctggaaaagaagcacggcgaggactggggaaaggtgtacgacgaggcctgggagcggattgacaagaaagtggaaggcctgagcaagcacatcaagctggaagaggaacggagaagcgaggacgcccagagcaaggccgccctgaccgactggctgcgggctaaggccagcttcgtgatcgagggcctgaaggaggccgacaaggacgagttctgcagatgcgagctgaagctgcagaagtggtacggggacctgcggggaaagcccttcgccatcgaagccgagaacagcatcctggacatcagcggcttcagcaagcagtacaactgtgccttcatctggcagaaggacggcgtgaagaagctgaacctgtacctgatcatcaactacttcaagggcggcaagctgcggttcaagaagatcaaacctgaagccttcgaagccaacagattctacaccgtgatcaacaaaaagagcggcgagatcgtgcccatggaggtgaacttcaacttcgacgaccccaacctgatcatcctgcctctggcctttggcaagagacagggcagagaattcatctggaacgacctgctgtccctggaaaccggcagcctgaagctggccaacggaagagtgatcgagaagacactgtacaacagaagaacccggcaggatgagcctgccctgttcgtggccctgaccttcgagcggcgggaggtcctggactcctccaatatcaaaccaatgaacctgatcggcgtggcaagaggcgaaaacatccccgccgtgatcgccctgaccgaccccgagggctgcccactgagccggtttaaggatagcctgggaaacccaacccacatcctgagaatcggcgagagctataaggagaagcagcggaccatccaggccaagaaggaggtggagcagcggagagccggcggctacagccggaagtacgccagcaaagccaagaatctggcagacgatatggtgagaaacaccgctagagatctgctgtactacgccgtgacccaggatgccatgctgatcttcgccaacctgagccggggcttcggccggcagggcaagcggaccttcatggccgagagacagtacacacggatggaggactggctgaccgccaagctggcctacgagggcctgagcaagacctacctgtccaagacactggcccagtacacctccaagacatgcagcaactgtgggtttaccatcaccagcgccgactacgacagggtgctggagaagctgaagaagacagcaacaggctggatgaccacaattaacggcaaggagctgaaggtggagggccagattacctactacaacagatacaagagacagaacgtagtcaaggacctgtccgtcgagctggatagactgagcgaagaatctgtgaacaacgacatctcctcctggacaaagggcagaagcggagaagctctgagcctcctgaagaaaagattctcccatagacccgtgcaggagaagttcgtgtgcctgaactgcggcttcgagacacacgcagccgagcaagccgccctgaacatcgccagatcctggctgttcctgcggagccaggagtacaagaaataccagacaaacaagacaaccggcaacaccgataagagagccttcgtcgagacctggcagtccttttaccggaagaagcttaaggaggtgtggaaacctgccgtgcggtctggcggatctggcggaggctccaccagccccaagaaaaagagaaaagtctaagctgccttctgcggggcttgccttctggccatgcccttcttctctcccttgcacctgtacctcttggtctttgaataaagcctgagtaggaaggctagcaaaaaaaaaaaaaaaaaaaaaaaaaaaaaaaaaaaaaaaaaaaaaaaaaaaaaaaaaaaaaaaaaaaaaaaaaaaaaaaa

SEQ ID NO: 10427 - RNA, 8787 nt, synthetic construct
  source 1..8787: mol_type = other RNA
aggaaataagagagaaaagaagagtaagaagaaatataagagccaccatggcccctaagaagaagcgtaaagtgagccggatgaaccacgaccaggagttcgacccccctaaggtgtaccctcccgtccccgccgagaagagaaagcccatccgggtcctgagcctgttcgatggcatcgccaccggtctgctggtgctgaaggacctgggcatccaggtggataggtacattgcctccgaggtgtgcgaggactccatcaccgtgggaatggtgcgtcatcagggcaagatcatgtacgtgggcgacgtgcggagcgtgacacagaagcatatccaggagtggggccctttcgacctggtgatcggcggcagcccttgcaatgacctgagcatcgtgaacccagcccggaagggcctgtacgagggaaccggcagactgttcttcgagttttacagactgctgcacgacgcccggcctaaggaaggcgacgaccggcccttcttttggctgttcgagaatgtggtggccatgggagtcagcgacaagcgggatattagccggttcctggagagcaaccccgtgatgatcgatgccaaggaagtgagcgccgcccaccgggccagatacttctggggcaatctgcctggcatgaacagacccctggccagcaccgtgaacgacaagctggagctgcaggagtgcctggagcacggccggatcgccaagttcagcaaggtgagaaccatcaccacccgaagcaacagcatcaaacaaggcaaggaccagcactttcctgtgttcatgaacgagaaggaggacatcctgtggtgtaccgagatggagagagtgttcgggttcccagtccactacacagatgtcagcaacatgtctagactggccagacagagactgctgggaagaagctggtccgtccctgtgatcagacacctgttcgcccctctgaaggagtacttcgcctgcgtgagcagcggcaacagcaacgccaacagccggggccccagcttctctagcggcctggtgccactgtccctgagagggagccacatgggccccatggagatctacaaaaccgtgagcgcctggaagcggcagcctgtgcgcgtgctgagcctgtttcggaatatcgataaagtcctgaaaagcctgggattcctggagagcggctctggctccggcggtggcaccctgaagtacgtggaggatgtgacaaacgtggtcagacgggatgtggagaagtggggccccttcgatctggtgtacggcagcacccaacccctgggcagctcttgtgaccggtgccctggctggtacatgtttcagttccaccggatcctgcagtacgccctgccgagacaggagtcccagcggccattcttttggattttcatggacaacttgctgctgaccgaggatgaccaggaaactaccactcggttcctgcagaccgaagccgtgaccctgcaggacgtgagaggccgggactaccagaacgccatgcgggtgtggtccaacatccctggactgaaaagcaagcacgcacctctgacccctaaagaagaggagtacctgcaggcccaggtgcggagcagaagcaagctggacgcccctaaggtggatctgctggtgaagaattgcctcctgcccctgagagagtacttcaagtatttcagccagaatagtctgcccctgggaggcagcggcggcggcttccagggcagcgtgaccttcgaggacgtggccatcgccttcagccagcaggagtgggagagcctggacagcagccagaggggcctgtacagggacgtgatgctggagaactacaggaacctggtgagcatggccggccacagcctgagcaagccccacgtgatcgccctgctggagaggtggaaggagcccaaggtgaccgagaggaaggacggcaggaggtggtgcaccgacctgcagctgggcggcccaagcagcggcgcccctcctcccagcggcggcaggcggcccaagcagcggcgcccctcctcccagcggcggcagcccagccggctccccaacctctaccgaggagggcacctctgagtccgccacccccgagagcggccctggcacctccaccgagcccagcgagggcagcgcacccggcagccctgccggcagccccacctccacagaggagggaaccagcaccgagcccagcgaaggcagcgccccaggcaccagcaccgagcctagtgagcaggagattaaacggatcaacaagatcagaagaagacttgtgaaagacagcaacaccaagaaggccggcaagacaggccccatgaaaaccctgctggttagagtgatgacacccgatctgagagagcggctggaaaacctgagaaagaagcctgaaaatatcccccagcccatcagcaatacatctagagccaacctgaataagctgctgaccgattacaccgaaatgaagaaggcgatcctgcatgtgtactgggaagagttccagaaggaccctgtgggcctgatgagccgggtggcccagcctgccagcaagaagatcgatcagaacaagctgaaacctgagatggacgagaagggcaacctgaccaccgccggctttgcctgctctcagtgtggccagcccctgttcgtgtacaagctggagcaggtgtctgagaagggcaaggcttacaccaactacttcggacggtgcaatgtggccgagcacgaaaagctgatcctgctggcccagctgaagcccgagaaggatagcgacgaagccgtgacatatagcctgggaaagtttgggcagagggccctggatttctacagcattcatgtgaccaaggagtccacccaccccgtgaagcccctggcccagatcgccggaaacagatacgcctccggacctgtgggaaaggccctgagcgacgcatgtatgggcacaatcgcctccttcctgtctaagtaccaggacatcatcatcgaacaccagaaggtggtgaagggcaaccagaagagactggagagcctgcgggagctggccggcaaggaaaacctggaataccctagcgtgaccctgccacctcagcctcacaccaaggagggcgttgatgcctacaacgaagtgatcgcccgggtgcgaatgtgggtgaacctgaacctgtggcagaagctgaagctaagcagagatgatgccaagcctctgctgagactgaagggattcccttcctttcctctggtcgagagacaggccaacgaagtggactggtgggacatggtgtgtaacgtgaagaagctgatcaacgagaaaaaggaggatggcaaggtgttttggcagaatctggctggctacaagagacaggaagccctgagaccatacctgagcagcgaggaagatcggaagaagggaaagaaattcgctcggtaccagctgggcgacctgctgctgcacctggaaaagaagcacggcgaggactggggaaaggtgtacgacgaggcctgggagcggattgacaagaaagtggaaggcctgagcaagcacatcaagctggaagaggaacggagaagcgaggacgcccagagcaaggccgccctgaccgactggctgcgggctaaggccagcttcgtgatcgagggcctgaaggaggccgacaaggacgagttctgcagatgcgagctgaagctgcagaagtggtacggggacctgcggggaaagcccttcgccatcgaagccgagaacagcatcctggacatcagcggcttcagcaagcagtacaactgtgccttcatctggcagaaggacggcgtgaagaagctgaacctgtacctgatcatcaactacttcaagggcggcaagctgcggttcaagaagatcaaacctgaagccttcgaagccaacagattctacaccgtgatcaacaaaaagagcggcgagatcgtgcccatggaggtgaacttcaacttcgacgaccccaacctgatcatcctgcctctggcctttggcaagagacagggcagagaattcatctggaacgacctgctgtccctggaaaccggcagcctgaagctggccaacggaagagtgatcgagaagacactgtacaacagaagaacccggcaggatgagcctgccctgttcgtggccctgaccttcgagcggcgggaggtcctggactcctccaatatcaaaccaatgaacctgatcggcgtggcaagaggcgaaaacatccccgccgtgatcgccctgaccgaccccgagggctgcccactgagccggtttaaggatagcctgggaaacccaacccacatcctgagaatcggcgagagctataaggagaagcagcggaccatccaggccaagaaggaggtggagcagcggagagccggcggctacagccggaagtacgccagcaaagccaagaatctggcagacgatatggtgagaaacaccgctagagatctgctgtactacgccgtgacccaggatgccatgctgatcttcgccaacctgagccggggcttcggccggcagggcaagcggaccttcatggccgagagacagtacacacggatggaggactggctgaccgccaagctggcctacgagggcctgagcaagacctacctgtccaagacactggcccagtacacctccaagacatgcagcaactgtgggtttaccatcaccagcgccgactacgacagggtgctggagaagctgaagaagacagcaacaggctggatgaccacaattaacggcaaggagctgaaggtggagggccagattacctactacaacagatacaagagacagaacgtagtcaaggacctgtccgtcgagctggatagactgagcgaagaatctgtgaacaacgacatctcctcctggacaaagggcagaagcggagaagctctgagcctcctgaagaaaagattctcccatagacccgtgcaggagaagttcgtgtgcctgaactgcggcttcgagacacacgcagccgagcaagccgccctgaacatcgccagatcctggctgttcctgcggagccaggagtacaagaaataccagacaaacaagacaaccggcaacaccgataagagagccttcgtcgagacctggcagtccttttaccggaagaagcttaaggaggtgtggaaacctgccgtgcggtctggcggatctggcggaggctccaccagccccaagaaaaagagaaaagtctaagctgccttctgcggggcttgccttctggccatgcccttcttctctcccttgcacctgtacctcttggtctttgaataaagcctgagtaggaaggctagcaaaaaaaaaaaaaaaaaaaaaaaaaaaaaaaaaaaaaaaaaaaaaaaaaaaaaaaaaaaaaaaaaaaaaaaaaaaaaaaagcccagccggctccccaacctctaccgaggagggcacctctgagtccgccacccccgagagcggccctggcacctccaccgagcccagcgagggcagcgcacccggcagccctgccggcagccccacctccacagaggagggaaccagcaccgagcccagcgaaggcagcgccccaggcaccagcaccgagcctagtgagcaggagattaaacggatcaacaagatcagaagaagacttgtgaaagacagcaacaccaagaaggccggcaagacaggccccatgaaaaccctgctggttagagtgatgacacccgatctgagagagcggctggaaaacctgagaaagaagcctgaaaatatcccccagcccatcagcaatacatctagagccaacctgaataagctgctgaccgattacaccgaaatgaagaaggcgatcctgcatgtgtactgggaagagttccagaaggaccctgtgggcctgatgagccgggtggcccagcctgccagcaagaagatcgatcagaacaagctgaaacctgagatggacgagaagggcaacctgaccaccgccggctttgcctgctctcagtgtggccagcccctgttcgtgtacaagctggagcaggtgtctgagaagggcaaggcttacaccaactacttcggacggtgcaatgtggccgagcacgaaaagctgatcctgctggcccagctgaagcccgagaaggatagcgacgaagccgtgacatatagcctgggaaagtttgggcagagggccctggatttctacagcattcatgtgaccaaggagtccacccaccccgtgaagcccctggcccagatcgccggaaacagatacgcctccggacctgtgggaaaggccctgagcgacgcatgtatgggcacaatcgcctccttcctgtctaagtaccaggacatcatcatcgaacaccagaaggtggtgaagggcaaccagaagagactggagagcctgcgggagctggccggcaaggaaaacctggaataccctagcgtgaccctgccacctcagcctcacaccaaggagggcgttgatgcctacaacgaagtgatcgcccgggtgcgaatgtgggtgaacctgaacctgtggcagaagctgaagctaagcagagatgatgccaagcctctgctgagactgaagggattcccttcctttcctctggtcgagagacaggccaacgaagtggactggtgggacatggtgtgtaacgtgaagaagctgatcaacgagaaaaaggaggatggcaaggtgttttggcagaatctggctggctacaagagacaggaagccctgagaccatacctgagcagcgaggaagatcggaagaagggaaagaaattcgctcggtaccagctgggcgacctgctgctgcacctggaaaagaagcacggcgaggactggggaaaggtgtacgacgaggcctgggagcggattgacaagaaagtggaaggcctgagcaagcacatcaagctggaagaggaacggagaagcgaggacgcccagagcaaggccgccctgaccgactggctgcgggctaaggccagcttcgtgatcgagggcctgaaggaggccgacaaggacgagttctgcagatgcgagctgaagctgcagaagtggtacggggacctgcggggaaagcccttcgccatcgaagccgagaacagcatcctggacatcagcggcttcagcaagcagtacaactgtgccttcatctggcagaaggacggcgtgaagaagctgaacctgtacctgatcatcaactacttcaagggcggcaagctgcggttcaagaagatcaaacctgaagccttcgaagccaacagattctacaccgtgatcaacaaaaagagcggcgagatcgtgcccatggaggtgaacttcaacttcgacgaccccaacctgatcatcctgcctctggcctttggcaagagacagggcagagaattcatctggaacgacctgctgtccctggaaaccggcagcctgaagctggccaacggaagagtgatcgagaagacactgtacaacagaagaacccggcaggatgagcctgccctgttcgtggccctgaccttcgagcggcgggaggtcctggactcctccaatatcaaaccaatgaacctgatcggcgtggcaagaggcgaaaacatccccgccgtgatcgccctgaccgaccccgagggctgcccactgagccggtttaaggatagcctgggaaacccaacccacatcctgagaatcggcgagagctataaggagaagcagcggaccatccaggccaagaaggaggtggagcagcggagagccggcggctacagccggaagtacgccagcaaagccaagaatctggcagacgatatggtgagaaacaccgctagagatctgctgtactacgccgtgacccaggatgccatgctgatcttcgccaacctgagccggggcttcggccggcagggcaagcggaccttcatggccgagagacagtacacacggatggaggactggctgaccgccaagctggcctacgagggcctgagcaagacctacctgtccaagacactggcccagtacacctccaagacatgcagcaactgtgggtttaccatcaccagcgccgactacgacagggtgctggagaagctgaagaagacagcaacaggctggatgaccacaattaacggcaaggagctgaaggtggagggccagattacctactacaacagatacaagagacagaacgtagtcaaggacctgtccgtcgagctggatagactgagcgaagaatctgtgaacaacgacatctcctcctggacaaagggcagaagcggagaagctctgagcctcctgaagaaaagattctcccatagacccgtgcaggagaagttcgtgtgcctgaactgcggcttcgagacacacgcagccgagcaagccgccctgaacatcgccagatcctggctgttcctgcggagccaggagtacaagaaataccagacaaacaagacaaccggcaacaccgataagagagccttcgtcgagacctggcagtccttttaccggaagaagcttaaggaggtgtggaaacctgccgtgcggtctggcggatctggcggaggctccaccagccccaagaaaaagagaaaagtctaagctgccttctgcggggcttgccttctggccatgcccttcttctctcccttgcacctgtacctcttggtctttgaataaagcctgagtaggaaggctagcaaaaaaaaaaaaaaaaaaaaaaaaaaaaaaaaaaaaaaaaaaaaaaaaaaaaaaaaaaaaaaaaaaaaaaaaaaaaaaaa

SEQ ID NO: 10428 - RNA, 8787 nt, synthetic construct
  source 1..8787: mol_type = other RNA
aggaaataagagagaaaagaagagtaagaagaaatataagagccaccatggcccctaagaagaagcgtaaagtgagccggatgaaccacgaccaggagttcgacccccctaaggtgtaccctcccgtccccgccgagaagagaaagcccatccgggtcctgagcctgttcgatggcatcgccaccggtctgctggtgctgaaggacctgggcatccaggtggataggtacattgcctccgaggtgtgcgaggactccatcaccgtgggaatggtgcgtcatcagggcaagatcatgtacgtgggcgacgtgcggagcgtgacacagaagcatatccaggagtggggccctttcgacctggtgatcggcggcagcccttgcaatgacctgagcatcgtgaacccagcccggaagggcctgtacgagggaaccggcagactgttcttcgagttttacagactgctgcacgacgcccggcctaaggaaggcgacgaccggcccttcttttggctgttcgagaatgtggtggccatgggagtcagcgacaagcgggatattagccggttcctggagagcaaccccgtgatgatcgatgccaaggaagtgagcgccgcccaccgggccagatacttctggggcaatctgcctggcatgaacagacccctggccagcaccgtgaacgacaagctggagctgcaggagtgcctggagcacggccggatcgccaagttcagcaaggtgagaaccatcaccacccgaagcaacagcatcaaacaaggcaaggaccagcactttcctgtgttcatgaacgagaaggaggacatcctgtggtgtaccgagatggagagagtgttcgggttcccagtccactacacagatgtcagcaacatgtctagactggccagacagagactgctgggaagaagctggtccgtccctgtgatcagacacctgttcgcccctctgaaggagtacttcgcctgcgtgagcagcggcaacagcaacgccaacagccggggccccagcttctctagcggcctggtgccactgtccctgagagggagccacatgggccccatggagatctacaaaaccgtgagcgcctggaagcggcagcctgtgcgcgtgctgagcctgtttcggaatatcgataaagtcctgaaaagcctgggattcctggagagcggctctggctccggcggtggcaccctgaagtacgtggaggatgtgacaaacgtggtcagacgggatgtggagaagtggggccccttcgatctggtgtacggcagcacccaacccctgggcagctcttgtgaccggtgccctggctggtacatgtttcagttccaccggatcctgcagtacgccctgccgagacaggagtcccagcggccattcttttggattttcatggacaacttgctgctgaccgaggatgaccaggaaactaccactcggttcctgcagaccgaagccgtgaccctgcaggacgtgagaggccgggactaccagaacgccatgcgggtgtggtccaacatccctggactgaaaagcaagcacgcacctctgacccctaaagaagaggagtacctgcaggcccaggtgcggagcagaagcaagctggacgcccctaaggtggatctgctggtgaagaattgcctcctgcccctgagagagtacttcaagtatttcagccagaatagtctgcccctgggaggcagcggcggcggcagcctggagagcgacgtgttcaccgacgtggccatcgtgttcagccaggaggagtgggagcagctggcccccgcccagagggacctgtacagggacgtgatgctggagacctacagcaacctggtgagcctgggcctggccatcgccaagcccgacgtgatcagcttcctggaggagggcaaggagccctgggtggtggagaagaccagcaggggcggcctgtgccccgtgctggagagcaggggcggcccaagcagcggcgcccctcctcccagcggcggcaggcggcccaagcagcggcgcccctcctcccagcggcggcagcccagccggctccccaacctctaccgaggagggcacctctgagtccgccacccccgagagcggccctggcacctccaccgagcccagcgagggcagcgcacccggcagccctgccggcagccccacctccacagaggagggaaccagcaccgagcccagcgaaggcagcgccccaggcaccagcaccgagcctagtgagcaggagattaaacggatcaacaagatcagaagaagacttgtgaaagacagcaacaccaagaaggccggcaagacaggccccatgaaaaccctgctggttagagtgatgacacccgatctgagagagcggctggaaaacctgagaaagaagcctgaaaatatcccccagcccatcagcaatacatctagagccaacctgaataagctgctgaccgattacaccgaaatgaagaaggcgatcctgcatgtgtactgggaagagttccagaaggaccctgtgggcctgatgagccgggtggcccagcctgccagcaagaagatcgatcagaacaagctgaaacctgagatggacgagaagggcaacctgaccaccgccggctttgcctgctctcagtgtggccagcccctgttcgtgtacaagctggagcaggtgtctgagaagggcaaggcttacaccaactacttcggacggtgcaatgtggccgagcacgaaaagctgatcctgctggcccagctgaagcccgagaaggatagcgacgaagccgtgacatatagcctgggaaagtttgggcagagggccctggatttctacagcattcatgtgaccaaggagtccacccaccccgtgaagcccctggcccagatcgccggaaacagatacgcctccggacctgtgggaaaggccctgagcgacgcatgtatgggcacaatcgcctccttcctgtctaagtaccaggacatcatcatcgaacaccagaaggtggtgaagggcaaccagaagagactggagagcctgcgggagctggccggcaaggaaaacctggaataccctagcgtgaccctgccacctcagcctcacaccaaggagggcgttgatgcctacaacgaagtgatcgcccgggtgcgaatgtgggtgaacctgaacctgtggcagaagctgaagctaagcagagatgatgccaagcctctgctgagactgaagggattcccttcctttcctctggtcgagagacaggccaacgaagtggactggtgggacatggtgtgtaacgtgaagaagctgatcaacgagaaaaaggaggatggcaaggtgttttggcagaatctggctggctacaagagacaggaagccctgagaccatacctgagcagcgaggaagatcggaagaagggaaagaaattcgctcggtaccagctgggcgacctgctgctgcacctggaaaagaagcacggcgaggactggggaaaggtgtacgacgaggcctgggagcggattgacaagaaagtggaaggcctgagcaagcacatcaagctggaagaggaacggagaagcgaggacgcccagagcaaggccgccctgaccgactggctgcgggctaaggccagcttcgtgatcgagggcctgaaggaggccgacaaggacgagttctgcagatgcgagctgaagctgcagaagtggtacggggacctgcggggaaagcccttcgccatcgaagccgagaacagcatcctggacatcagcggcttcagcaagcagtacaactgtgccttcatctggcagaaggacggcgtgaagaagctgaacctgtacctgatcatcaactacttcaagggcggcaagctgcggttcaagaagatcaaacctgaagccttcgaagccaacagattctacaccgtgatcaacaaaaagagcggcgagatcgtgcccatggaggtgaacttcaacttcgacgaccccaacctgatcatcctgcctctggcctttggcaagagacagggcagagaattcatctggaacgacctgctgtccctggaaaccggcagcctgaagctggccaacggaagagtgatcgagaagacactgtacaacagaagaacccggcaggatgagcctgccctgttcgtggccctgaccttcgagcggcgggaggtcctggactcctccaatatcaaaccaatgaacctgatcggcgtggcaagaggcgaaaacatccccgccgtgatcgccctgaccgaccccgagggctgcccactgagccggtttaaggatagcctgggaaacccaacccacatcctgagaatcggcgagagctataaggagaagcagcggaccatccaggccaagaaggaggtggagcagcggagagccggcggctacagccggaagtacgccagcaaagccaagaatctggcagacgatatggtgagaaacaccgctagagatctgctgtactacgccgtgacccaggatgccatgctgatcttcgccaacctgagccggggcttcggccggcagggcaagcggaccttcatggccgagagacagtacacacggatggaggactggctgaccgccaagctggcctacgagggcctgagcaagacctacctgtccaagacactggcccagtacacctccaagacatgcagcaactgtgggtttaccatcaccagcgccgactacgacagggtgctggagaagctgaagaagacagcaacaggctggatgaccacaattaacggcaaggagctgaaggtggagggccagattacctactacaacagatacaagagacagaacgtagtcaaggacctgtccgtcgagctggatagactgagcgaagaatctgtgaacaacgacatctcctcctggacaaagggcagaagcggagaagctctgagcctcctgaagaaaagattctcccatagacccgtgcaggagaagttcgtgtgcctgaactgcggcttcgagacacacgcagccgagcaagccgccctgaacatcgccagatcctggctgttcctgcggagccaggagtacaagaaataccagacaaacaagacaaccggcaacaccgataagagagccttcgtcgagacctggcagtccttttaccggaagaagcttaaggaggtgtggaaacctgccgtgcggtctggcggatctggcggaggctccaccagccccaagaaaaagagaaaagtctaagctgccttctgcggggcttgccttctggccatgcccttcttctctcccttgcacctgtacctcttggtctttgaataaagcctgagtaggaaggctagcaaaaaaaaaaaaaaaaaaaaaaaaaaaaaaaaaaaaaaaaaaaaaaaaaaaaaaaaaaaaaaaaaaaaaaaaaaaaaaaagcccagccggctccccaacctctaccgaggagggcacctctgagtccgccacccccgagagcggccctggcacctccaccgagcccagcgagggcagcgcacccggcagccctgccggcagccccacctccacagaggagggaaccagcaccgagcccagcgaaggcagcgccccaggcaccagcaccgagcctagtgagcaggagattaaacggatcaacaagatcagaagaagacttgtgaaagacagcaacaccaagaaggccggcaagacaggccccatgaaaaccctgctggttagagtgatgacacccgatctgagagagcggctggaaaacctgagaaagaagcctgaaaatatcccccagcccatcagcaatacatctagagccaacctgaataagctgctgaccgattacaccgaaatgaagaaggcgatcctgcatgtgtactgggaagagttccagaaggaccctgtgggcctgatgagccgggtggcccagcctgccagcaagaagatcgatcagaacaagctgaaacctgagatggacgagaagggcaacctgaccaccgccggctttgcctgctctcagtgtggccagcccctgttcgtgtacaagctggagcaggtgtctgagaagggcaaggcttacaccaactacttcggacggtgcaatgtggccgagcacgaaaagctgatcctgctggcccagctgaagcccgagaaggatagcgacgaagccgtgacatatagcctgggaaagtttgggcagagggccctggatttctacagcattcatgtgaccaaggagtccacccaccccgtgaagcccctggcccagatcgccggaaacagatacgcctccggacctgtgggaaaggccctgagcgacgcatgtatgggcacaatcgcctccttcctgtctaagtaccaggacatcatcatcgaacaccagaaggtggtgaagggcaaccagaagagactggagagcctgcgggagctggccggcaaggaaaacctggaataccctagcgtgaccctgccacctcagcctcacaccaaggagggcgttgatgcctacaacgaagtgatcgcccgggtgcgaatgtgggtgaacctgaacctgtggcagaagctgaagctaagcagagatgatgccaagcctctgctgagactgaagggattcccttcctttcctctggtcgagagacaggccaacgaagtggactggtgggacatggtgtgtaacgtgaagaagctgatcaacgagaaaaaggaggatggcaaggtgttttggcagaatctggctggctacaagagacaggaagccctgagaccatacctgagcagcgaggaagatcggaagaagggaaagaaattcgctcggtaccagctgggcgacctgctgctgcacctggaaaagaagcacggcgaggactggggaaaggtgtacgacgaggcctgggagcggattgacaagaaagtggaaggcctgagcaagcacatcaagctggaagaggaacggagaagcgaggacgcccagagcaaggccgccctgaccgactggctgcgggctaaggccagcttcgtgatcgagggcctgaaggaggccgacaaggacgagttctgcagatgcgagctgaagctgcagaagtggtacggggacctgcggggaaagcccttcgccatcgaagccgagaacagcatcctggacatcagcggcttcagcaagcagtacaactgtgccttcatctggcagaaggacggcgtgaagaagctgaacctgtacctgatcatcaactacttcaagggcggcaagctgcggttcaagaagatcaaacctgaagccttcgaagccaacagattctacaccgtgatcaacaaaaagagcggcgagatcgtgcccatggaggtgaacttcaacttcgacgaccccaacctgatcatcctgcctctggcctttggcaagagacagggcagagaattcatctggaacgacctgctgtccctggaaaccggcagcctgaagctggccaacggaagagtgatcgagaagacactgtacaacagaagaacccggcaggatgagcctgccctgttcgtggccctgaccttcgagcggcgggaggtcctggactcctccaatatcaaaccaatgaacctgatcggcgtggcaagaggcgaaaacatccccgccgtgatcgccctgaccgaccccgagggctgcccactgagccggtttaaggatagcctgggaaacccaacccacatcctgagaatcggcgagagctataaggagaagcagcggaccatccaggccaagaaggaggtggagcagcggagagccggcggctacagccggaagtacgccagcaaagccaagaatctggcagacgatatggtgagaaacaccgctagagatctgctgtactacgccgtgacccaggatgccatgctgatcttcgccaacctgagccggggcttcggccggcagggcaagcggaccttcatggccgagagacagtacacacggatggaggactggctgaccgccaagctggcctacgagggcctgagcaagacctacctgtccaagacactggcccagtacacctccaagacatgcagcaactgtgggtttaccatcaccagcgccgactacgacagggtgctggagaagctgaagaagacagcaacaggctggatgaccacaattaacggcaaggagctgaaggtggagggccagattacctactacaacagatacaagagacagaacgtagtcaaggacctgtccgtcgagctggatagactgagcgaagaatctgtgaacaacgacatctcctcctggacaaagggcagaagcggagaagctctgagcctcctgaagaaaagattctcccatagacccgtgcaggagaagttcgtgtgcctgaactgcggcttcgagacacacgcagccgagcaagccgccctgaacatcgccagatcctggctgttcctgcggagccaggagtacaagaaataccagacaaacaagacaaccggcaacaccgataagagagccttcgtcgagacctggcagtccttttaccggaagaagcttaaggaggtgtggaaacctgccgtgcggtctggcggatctggcggaggctccaccagccccaagaaaaagagaaaagtctaagctgccttctgcggggcttgccttctggccatgcccttcttctctcccttgcacctgtacctcttggtctttgaataaagcctgagtaggaaggctagcaaaaaaaaaaaaaaaaaaaaaaaaaaaaaaaaaaaaaaaaaaaaaaaaaaaaaaaaaaaaaaaaaaaaaaaaaaaaaaaa

SEQ ID NO: 10429 - RNA, 8787 nt, synthetic construct
  source 1..8787: mol_type = other RNA
aggaaataagagagaaaagaagagtaagaagaaatataagagccaccatggcccctaagaagaagcgtaaagtgagccggatgaaccacgaccaggagttcgacccccctaaggtgtaccctcccgtccccgccgagaagagaaagcccatccgggtcctgagcctgttcgatggcatcgccaccggtctgctggtgctgaaggacctgggcatccaggtggataggtacattgcctccgaggtgtgcgaggactccatcaccgtgggaatggtgcgtcatcagggcaagatcatgtacgtgggcgacgtgcggagcgtgacacagaagcatatccaggagtggggccctttcgacctggtgatcggcggcagcccttgcaatgacctgagcatcgtgaacccagcccggaagggcctgtacgagggaaccggcagactgttcttcgagttttacagactgctgcacgacgcccggcctaaggaaggcgacgaccggcccttcttttggctgttcgagaatgtggtggccatgggagtcagcgacaagcgggatattagccggttcctggagagcaaccccgtgatgatcgatgccaaggaagtgagcgccgcccaccgggccagatacttctggggcaatctgcctggcatgaacagacccctggccagcaccgtgaacgacaagctggagctgcaggagtgcctggagcacggccggatcgccaagttcagcaaggtgagaaccatcaccacccgaagcaacagcatcaaacaaggcaaggaccagcactttcctgtgttcatgaacgagaaggaggacatcctgtggtgtaccgagatggagagagtgttcgggttcccagtccactacacagatgtcagcaacatgtctagactggccagacagagactgctgggaagaagctggtccgtccctgtgatcagacacctgttcgcccctctgaaggagtacttcgcctgcgtgagcagcggcaacagcaacgccaacagccggggccccagcttctctagcggcctggtgccactgtccctgagagggagccacatgggccccatggagatctacaaaaccgtgagcgcctggaagcggcagcctgtgcgcgtgctgagcctgtttcggaatatcgataaagtcctgaaaagcctgggattcctggagagcggctctggctccggcggtggcaccctgaagtacgtggaggatgtgacaaacgtggtcagacgggatgtggagaagtggggccccttcgatctggtgtacggcagcacccaacccctgggcagctcttgtgaccggtgccctggctggtacatgtttcagttccaccggatcctgcagtacgccctgccgagacaggagtcccagcggccattcttttggattttcatggacaacttgctgctgaccgaggatgaccaggaaactaccactcggttcctgcagaccgaagccgtgaccctgcaggacgtgagaggccgggactaccagaacgccatgcgggtgtggtccaacatccctggactgaaaagcaagcacgcacctctgacccctaaagaagaggagtacctgcaggcccaggtgcggagcagaagcaagctggacgcccctaaggtggatctgctggtgaagaattgcctcctgcccctgagagagtacttcaagtatttcagccagaatagtctgcccctgggaggcagcggcggcggcctgctggagagcgtgaccttcggcgacgtggccgtggtgttcagcagggacgagtggctgcacctggacgccgcccagaggagcctgtacagggaggtgatgctggagaactacagcgccctggtgagcctgggcatccccctgagcatccccaagctgatctgccagctgcagcagggcgaggacccctgcatggtggagagggagatcccccaggacgtgtgcctgggcttcaagacctggggcggcccaagcagcggcgcccctcctcccagcggcggcaggcggcccaagcagcggcgcccctcctcccagcggcggcagcccagccggctccccaacctctaccgaggagggcacctctgagtccgccacccccgagagcggccctggcacctccaccgagcccagcgagggcagcgcacccggcagccctgccggcagccccacctccacagaggagggaaccagcaccgagcccagcgaaggcagcgccccaggcaccagcaccgagcctagtgagcaggagattaaacggatcaacaagatcagaagaagacttgtgaaagacagcaacaccaagaaggccggcaagacaggccccatgaaaaccctgctggttagagtgatgacacccgatctgagagagcggctggaaaacctgagaaagaagcctgaaaatatcccccagcccatcagcaatacatctagagccaacctgaataagctgctgaccgattacaccgaaatgaagaaggcgatcctgcatgtgtactgggaagagttccagaaggaccctgtgggcctgatgagccgggtggcccagcctgccagcaagaagatcgatcagaacaagctgaaacctgagatggacgagaagggcaacctgaccaccgccggctttgcctgctctcagtgtggccagcccctgttcgtgtacaagctggagcaggtgtctgagaagggcaaggcttacaccaactacttcggacggtgcaatgtggccgagcacgaaaagctgatcctgctggcccagctgaagcccgagaaggatagcgacgaagccgtgacatatagcctgggaaagtttgggcagagggccctggatttctacagcattcatgtgaccaaggagtccacccaccccgtgaagcccctggcccagatcgccggaaacagatacgcctccggacctgtgggaaaggccctgagcgacgcatgtatgggcacaatcgcctccttcctgtctaagtaccaggacatcatcatcgaacaccagaaggtggtgaagggcaaccagaagagactggagagcctgcgggagctggccggcaaggaaaacctggaataccctagcgtgaccctgccacctcagcctcacaccaaggagggcgttgatgcctacaacgaagtgatcgcccgggtgcgaatgtgggtgaacctgaacctgtggcagaagctgaagctaagcagagatgatgccaagcctctgctgagactgaagggattcccttcctttcctctggtcgagagacaggccaacgaagtggactggtgggacatggtgtgtaacgtgaagaagctgatcaacgagaaaaaggaggatggcaaggtgttttggcagaatctggctggctacaagagacaggaagccctgagaccatacctgagcagcgaggaagatcggaagaagggaaagaaattcgctcggtaccagctgggcgacctgctgctgcacctggaaaagaagcacggcgaggactggggaaaggtgtacgacgaggcctgggagcggattgacaagaaagtggaaggcctgagcaagcacatcaagctggaagaggaacggagaagcgaggacgcccagagcaaggccgccctgaccgactggctgcgggctaaggccagcttcgtgatcgagggcctgaaggaggccgacaaggacgagttctgcagatgcgagctgaagctgcagaagtggtacggggacctgcggggaaagcccttcgccatcgaagccgagaacagcatcctggacatcagcggcttcagcaagcagtacaactgtgccttcatctggcagaaggacggcgtgaagaagctgaacctgtacctgatcatcaactacttcaagggcggcaagctgcggttcaagaagatcaaacctgaagccttcgaagccaacagattctacaccgtgatcaacaaaaagagcggcgagatcgtgcccatggaggtgaacttcaacttcgacgaccccaacctgatcatcctgcctctggcctttggcaagagacagggcagagaattcatctggaacgacctgctgtccctggaaaccggcagcctgaagctggccaacggaagagtgatcgagaagacactgtacaacagaagaacccggcaggatgagcctgccctgttcgtggccctgaccttcgagcggcgggaggtcctggactcctccaatatcaaaccaatgaacctgatcggcgtggcaagaggcgaaaacatccccgccgtgatcgccctgaccgaccccgagggctgcccactgagccggtttaaggatagcctgggaaacccaacccacatcctgagaatcggcgagagctataaggagaagcagcggaccatccaggccaagaaggaggtggagcagcggagagccggcggctacagccggaagtacgccagcaaagccaagaatctggcagacgatatggtgagaaacaccgctagagatctgctgtactacgccgtgacccaggatgccatgctgatcttcgccaacctgagccggggcttcggccggcagggcaagcggaccttcatggccgagagacagtacacacggatggaggactggctgaccgccaagctggcctacgagggcctgagcaagacctacctgtccaagacactggcccagtacacctccaagacatgcagcaactgtgggtttaccatcaccagcgccgactacgacagggtgctggagaagctgaagaagacagcaacaggctggatgaccacaattaacggcaaggagctgaaggtggagggccagattacctactacaacagatacaagagacagaacgtagtcaaggacctgtccgtcgagctggatagactgagcgaagaatctgtgaacaacgacatctcctcctggacaaagggcagaagcggagaagctctgagcctcctgaagaaaagattctcccatagacccgtgcaggagaagttcgtgtgcctgaactgcggcttcgagacacacgcagccgagcaagccgccctgaacatcgccagatcctggctgttcctgcggagccaggagtacaagaaataccagacaaacaagacaaccggcaacaccgataagagagccttcgtcgagacctggcagtccttttaccggaagaagcttaaggaggtgtggaaacctgccgtgcggtctggcggatctggcggaggctccaccagccccaagaaaaagagaaaagtctaagctgccttctgcggggcttgccttctggccatgcccttcttctctcccttgcacctgtacctcttggtctttgaataaagcctgagtaggaaggctagcaaaaaaaaaaaaaaaaaaaaaaaaaaaaaaaaaaaaaaaaaaaaaaaaaaaaaaaaaaaaaaaaaaaaaaaaaaaaaaaagcccagccggctccccaacctctaccgaggagggcacctctgagtccgccacccccgagagcggccctggcacctccaccgagcccagcgagggcagcgcacccggcagccctgccggcagccccacctccacagaggagggaaccagcaccgagcccagcgaaggcagcgccccaggcaccagcaccgagcctagtgagcaggagattaaacggatcaacaagatcagaagaagacttgtgaaagacagcaacaccaagaaggccggcaagacaggccccatgaaaaccctgctggttagagtgatgacacccgatctgagagagcggctggaaaacctgagaaagaagcctgaaaatatcccccagcccatcagcaatacatctagagccaacctgaataagctgctgaccgattacaccgaaatgaagaaggcgatcctgcatgtgtactgggaagagttccagaaggaccctgtgggcctgatgagccgggtggcccagcctgccagcaagaagatcgatcagaacaagctgaaacctgagatggacgagaagggcaacctgaccaccgccggctttgcctgctctcagtgtggccagcccctgttcgtgtacaagctggagcaggtgtctgagaagggcaaggcttacaccaactacttcggacggtgcaatgtggccgagcacgaaaagctgatcctgctggcccagctgaagcccgagaaggatagcgacgaagccgtgacatatagcctgggaaagtttgggcagagggccctggatttctacagcattcatgtgaccaaggagtccacccaccccgtgaagcccctggcccagatcgccggaaacagatacgcctccggacctgtgggaaaggccctgagcgacgcatgtatgggcacaatcgcctccttcctgtctaagtaccaggacatcatcatcgaacaccagaaggtggtgaagggcaaccagaagagactggagagcctgcgggagctggccggcaaggaaaacctggaataccctagcgtgaccctgccacctcagcctcacaccaaggagggcgttgatgcctacaacgaagtgatcgcccgggtgcgaatgtgggtgaacctgaacctgtggcagaagctgaagctaagcagagatgatgccaagcctctgctgagactgaagggattcccttcctttcctctggtcgagagacaggccaacgaagtggactggtgggacatggtgtgtaacgtgaagaagctgatcaacgagaaaaaggaggatggcaaggtgttttggcagaatctggctggctacaagagacaggaagccctgagaccatacctgagcagcgaggaagatcggaagaagggaaagaaattcgctcggtaccagctgggcgacctgctgctgcacctggaaaagaagcacggcgaggactggggaaaggtgtacgacgaggcctgggagcggattgacaagaaagtggaaggcctgagcaagcacatcaagctggaagaggaacggagaagcgaggacgcccagagcaaggccgccctgaccgactggctgcgggctaaggccagcttcgtgatcgagggcctgaaggaggccgacaaggacgagttctgcagatgcgagctgaagctgcagaagtggtacggggacctgcggggaaagcccttcgccatcgaagccgagaacagcatcctggacatcagcggcttcagcaagcagtacaactgtgccttcatctggcagaaggacggcgtgaagaagctgaacctgtacctgatcatcaactacttcaagggcggcaagctgcggttcaagaagatcaaacctgaagccttcgaagccaacagattctacaccgtgatcaacaaaaagagcggcgagatcgtgcccatggaggtgaacttcaacttcgacgaccccaacctgatcatcctgcctctggcctttggcaagagacagggcagagaattcatctggaacgacctgctgtccctggaaaccggcagcctgaagctggccaacggaagagtgatcgagaagacactgtacaacagaagaacccggcaggatgagcctgccctgttcgtggccctgaccttcgagcggcgggaggtcctggactcctccaatatcaaaccaatgaacctgatcggcgtggcaagaggcgaaaacatccccgccgtgatcgccctgaccgaccccgagggctgcccactgagccggtttaaggatagcctgggaaacccaacccacatcctgagaatcggcgagagctataaggagaagcagcggaccatccaggccaagaaggaggtggagcagcggagagccggcggctacagccggaagtacgccagcaaagccaagaatctggcagacgatatggtgagaaacaccgctagagatctgctgtactacgccgtgacccaggatgccatgctgatcttcgccaacctgagccggggcttcggccggcagggcaagcggaccttcatggccgagagacagtacacacggatggaggactggctgaccgccaagctggcctacgagggcctgagcaagacctacctgtccaagacactggcccagtacacctccaagacatgcagcaactgtgggtttaccatcaccagcgccgactacgacagggtgctggagaagctgaagaagacagcaacaggctggatgaccacaattaacggcaaggagctgaaggtggagggccagattacctactacaacagatacaagagacagaacgtagtcaaggacctgtccgtcgagctggatagactgagcgaagaatctgtgaacaacgacatctcctcctggacaaagggcagaagcggagaagctctgagcctcctgaagaaaagattctcccatagacccgtgcaggagaagttcgtgtgcctgaactgcggcttcgagacacacgcagccgagcaagccgccctgaacatcgccagatcctggctgttcctgcggagccaggagtacaagaaataccagacaaacaagacaaccggcaacaccgataagagagccttcgtcgagacctggcagtccttttaccggaagaagcttaaggaggtgtggaaacctgccgtgcggtctggcggatctggcggaggctccaccagccccaagaaaaagagaaaagtctaagctgccttctgcggggcttgccttctggccatgcccttcttctctcccttgcacctgtacctcttggtctttgaataaagcctgagtaggaaggctagcaaaaaaaaaaaaaaaaaaaaaaaaaaaaaaaaaaaaaaaaaaaaaaaaaaaaaaaaaaaaaaaaaaaaaaaaaaaaaaaa

SEQ ID NO: 10430 - RNA, 8787 nt, synthetic construct
  source 1..8787: mol_type = other RNA
aggaaataagagagaaaagaagagtaagaagaaatataagagccaccatggcccctaagaagaagcgtaaagtgagccggatgaaccacgaccaggagttcgacccccctaaggtgtaccctcccgtccccgccgagaagagaaagcccatccgggtcctgagcctgttcgatggcatcgccaccggtctgctggtgctgaaggacctgggcatccaggtggataggtacattgcctccgaggtgtgcgaggactccatcaccgtgggaatggtgcgtcatcagggcaagatcatgtacgtgggcgacgtgcggagcgtgacacagaagcatatccaggagtggggccctttcgacctggtgatcggcggcagcccttgcaatgacctgagcatcgtgaacccagcccggaagggcctgtacgagggaaccggcagactgttcttcgagttttacagactgctgcacgacgcccggcctaaggaaggcgacgaccggcccttcttttggctgttcgagaatgtggtggccatgggagtcagcgacaagcgggatattagccggttcctggagagcaaccccgtgatgatcgatgccaaggaagtgagcgccgcccaccgggccagatacttctggggcaatctgcctggcatgaacagacccctggccagcaccgtgaacgacaagctggagctgcaggagtgcctggagcacggccggatcgccaagttcagcaaggtgagaaccatcaccacccgaagcaacagcatcaaacaaggcaaggaccagcactttcctgtgttcatgaacgagaaggaggacatcctgtggtgtaccgagatggagagagtgttcgggttcccagtccactacacagatgtcagcaacatgtctagactggccagacagagactgctgggaagaagctggtccgtccctgtgatcagacacctgttcgcccctctgaaggagtacttcgcctgcgtgagcagcggcaacagcaacgccaacagccggggccccagcttctctagcggcctggtgccactgtccctgagagggagccacatgggccccatggagatctacaaaaccgtgagcgcctggaagcggcagcctgtgcgcgtgctgagcctgtttcggaatatcgataaagtcctgaaaagcctgggattcctggagagcggctctggctccggcggtggcaccctgaagtacgtggaggatgtgacaaacgtggtcagacgggatgtggagaagtggggccccttcgatctggtgtacggcagcacccaacccctgggcagctcttgtgaccggtgccctggctggtacatgtttcagttccaccggatcctgcagtacgccctgccgagacaggagtcccagcggccattcttttggattttcatggacaacttgctgctgaccgaggatgaccaggaaactaccactcggttcctgcagaccgaagccgtgaccctgcaggacgtgagaggccgggactaccagaacgccatgcgggtgtggtccaacatccctggactgaaaagcaagcacgcacctctgacccctaaagaagaggagtacctgcaggcccaggtgcggagcagaagcaagctggacgcccctaaggtggatctgctggtgaagaattgcctcctgcccctgagagagtacttcaagtatttcagccagaatagtctgcccctgggaggcagcggcggcggcagccagggcagggtgaccttcgaggacgtgaccgtgaacttcaccaagggcgagtggcagaggctgaaccccgagcagaggaacctgtacagggacgtgatgctggagaactacagcaacctggtgagcgtgggcagggaggagaccaccaagcccaacgtgatcctgaggctggagcagggcaaggagccctggctggtggaggaggaggtgctgggcagcggcaggcccgagaagaacggcggcggcccaagcagcggcgcccctcctcccagcggcggcaggcggcccaagcagcggcgcccctcctcccagcggcggcagcccagccggctccccaacctctaccgaggagggcacctctgagtccgccacccccgagagcggccctggcacctccaccgagcccagcgagggcagcgcacccggcagccctgccggcagccccacctccacagaggagggaaccagcaccgagcccagcgaaggcagcgccccaggcaccagcaccgagcctagtgagcaggagattaaacggatcaacaagatcagaagaagacttgtgaaagacagcaacaccaagaaggccggcaagacaggccccatgaaaaccctgctggttagagtgatgacacccgatctgagagagcggctggaaaacctgagaaagaagcctgaaaatatcccccagcccatcagcaatacatctagagccaacctgaataagctgctgaccgattacaccgaaatgaagaaggcgatcctgcatgtgtactgggaagagttccagaaggaccctgtgggcctgatgagccgggtggcccagcctgccagcaagaagatcgatcagaacaagctgaaacctgagatggacgagaagggcaacctgaccaccgccggctttgcctgctctcagtgtggccagcccctgttcgtgtacaagctggagcaggtgtctgagaagggcaaggcttacaccaactacttcggacggtgcaatgtggccgagcacgaaaagctgatcctgctggcccagctgaagcccgagaaggatagcgacgaagccgtgacatatagcctgggaaagtttgggcagagggccctggatttctacagcattcatgtgaccaaggagtccacccaccccgtgaagcccctggcccagatcgccggaaacagatacgcctccggacctgtgggaaaggccctgagcgacgcatgtatgggcacaatcgcctccttcctgtctaagtaccaggacatcatcatcgaacaccagaaggtggtgaagggcaaccagaagagactggagagcctgcgggagctggccggcaaggaaaacctggaataccctagcgtgaccctgccacctcagcctcacaccaaggagggcgttgatgcctacaacgaagtgatcgcccgggtgcgaatgtgggtgaacctgaacctgtggcagaagctgaagctaagcagagatgatgccaagcctctgctgagactgaagggattcccttcctttcctctggtcgagagacaggccaacgaagtggactggtgggacatggtgtgtaacgtgaagaagctgatcaacgagaaaaaggaggatggcaaggtgttttggcagaatctggctggctacaagagacaggaagccctgagaccatacctgagcagcgaggaagatcggaagaagggaaagaaattcgctcggtaccagctgggcgacctgctgctgcacctggaaaagaagcacggcgaggactggggaaaggtgtacgacgaggcctgggagcggattgacaagaaagtggaaggcctgagcaagcacatcaagctggaagaggaacggagaagcgaggacgcccagagcaaggccgccctgaccgactggctgcgggctaaggccagcttcgtgatcgagggcctgaaggaggccgacaaggacgagttctgcagatgcgagctgaagctgcagaagtggtacggggacctgcggggaaagcccttcgccatcgaagccgagaacagcatcctggacatcagcggcttcagcaagcagtacaactgtgccttcatctggcagaaggacggcgtgaagaagctgaacctgtacctgatcatcaactacttcaagggcggcaagctgcggttcaagaagatcaaacctgaagccttcgaagccaacagattctacaccgtgatcaacaaaaagagcggcgagatcgtgcccatggaggtgaacttcaacttcgacgaccccaacctgatcatcctgcctctggcctttggcaagagacagggcagagaattcatctggaacgacctgctgtccctggaaaccggcagcctgaagctggccaacggaagagtgatcgagaagacactgtacaacagaagaacccggcaggatgagcctgccctgttcgtggccctgaccttcgagcggcgggaggtcctggactcctccaatatcaaaccaatgaacctgatcggcgtggcaagaggcgaaaacatccccgccgtgatcgccctgaccgaccccgagggctgcccactgagccggtttaaggatagcctgggaaacccaacccacatcctgagaatcggcgagagctataaggagaagcagcggaccatccaggccaagaaggaggtggagcagcggagagccggcggctacagccggaagtacgccagcaaagccaagaatctggcagacgatatggtgagaaacaccgctagagatctgctgtactacgccgtgacccaggatgccatgctgatcttcgccaacctgagccggggcttcggccggcagggcaagcggaccttcatggccgagagacagtacacacggatggaggactggctgaccgccaagctggcctacgagggcctgagcaagacctacctgtccaagacactggcccagtacacctccaagacatgcagcaactgtgggtttaccatcaccagcgccgactacgacagggtgctggagaagctgaagaagacagcaacaggctggatgaccacaattaacggcaaggagctgaaggtggagggccagattacctactacaacagatacaagagacagaacgtagtcaaggacctgtccgtcgagctggatagactgagcgaagaatctgtgaacaacgacatctcctcctggacaaagggcagaagcggagaagctctgagcctcctgaagaaaagattctcccatagacccgtgcaggagaagttcgtgtgcctgaactgcggcttcgagacacacgcagccgagcaagccgccctgaacatcgccagatcctggctgttcctgcggagccaggagtacaagaaataccagacaaacaagacaaccggcaacaccgataagagagccttcgtcgagacctggcagtccttttaccggaagaagcttaaggaggtgtggaaacctgccgtgcggtctggcggatctggcggaggctccaccagccccaagaaaaagagaaaagtctaagctgccttctgcggggcttgccttctggccatgcccttcttctctcccttgcacctgtacctcttggtctttgaataaagcctgagtaggaaggctagcaaaaaaaaaaaaaaaaaaaaaaaaaaaaaaaaaaaaaaaaaaaaaaaaaaaaaaaaaaaaaaaaaaaaaaaaaaaaaaaagcccagccggctccccaacctctaccgaggagggcacctctgagtccgccacccccgagagcggccctggcacctccaccgagcccagcgagggcagcgcacccggcagccctgccggcagccccacctccacagaggagggaaccagcaccgagcccagcgaaggcagcgccccaggcaccagcaccgagcctagtgagcaggagattaaacggatcaacaagatcagaagaagacttgtgaaagacagcaacaccaagaaggccggcaagacaggccccatgaaaaccctgctggttagagtgatgacacccgatctgagagagcggctggaaaacctgagaaagaagcctgaaaatatcccccagcccatcagcaatacatctagagccaacctgaataagctgctgaccgattacaccgaaatgaagaaggcgatcctgcatgtgtactgggaagagttccagaaggaccctgtgggcctgatgagccgggtggcccagcctgccagcaagaagatcgatcagaacaagctgaaacctgagatggacgagaagggcaacctgaccaccgccggctttgcctgctctcagtgtggccagcccctgttcgtgtacaagctggagcaggtgtctgagaagggcaaggcttacaccaactacttcggacggtgcaatgtggccgagcacgaaaagctgatcctgctggcccagctgaagcccgagaaggatagcgacgaagccgtgacatatagcctgggaaagtttgggcagagggccctggatttctacagcattcatgtgaccaaggagtccacccaccccgtgaagcccctggcccagatcgccggaaacagatacgcctccggacctgtgggaaaggccctgagcgacgcatgtatgggcacaatcgcctccttcctgtctaagtaccaggacatcatcatcgaacaccagaaggtggtgaagggcaaccagaagagactggagagcctgcgggagctggccggcaaggaaaacctggaataccctagcgtgaccctgccacctcagcctcacaccaaggagggcgttgatgcctacaacgaagtgatcgcccgggtgcgaatgtgggtgaacctgaacctgtggcagaagctgaagctaagcagagatgatgccaagcctctgctgagactgaagggattcccttcctttcctctggtcgagagacaggccaacgaagtggactggtgggacatggtgtgtaacgtgaagaagctgatcaacgagaaaaaggaggatggcaaggtgttttggcagaatctggctggctacaagagacaggaagccctgagaccatacctgagcagcgaggaagatcggaagaagggaaagaaattcgctcggtaccagctgggcgacctgctgctgcacctggaaaagaagcacggcgaggactggggaaaggtgtacgacgaggcctgggagcggattgacaagaaagtggaaggcctgagcaagcacatcaagctggaagaggaacggagaagcgaggacgcccagagcaaggccgccctgaccgactggctgcgggctaaggccagcttcgtgatcgagggcctgaaggaggccgacaaggacgagttctgcagatgcgagctgaagctgcagaagtggtacggggacctgcggggaaagcccttcgccatcgaagccgagaacagcatcctggacatcagcggcttcagcaagcagtacaactgtgccttcatctggcagaaggacggcgtgaagaagctgaacctgtacctgatcatcaactacttcaagggcggcaagctgcggttcaagaagatcaaacctgaagccttcgaagccaacagattctacaccgtgatcaacaaaaagagcggcgagatcgtgcccatggaggtgaacttcaacttcgacgaccccaacctgatcatcctgcctctggcctttggcaagagacagggcagagaattcatctggaacgacctgctgtccctggaaaccggcagcctgaagctggccaacggaagagtgatcgagaagacactgtacaacagaagaacccggcaggatgagcctgccctgttcgtggccctgaccttcgagcggcgggaggtcctggactcctccaatatcaaaccaatgaacctgatcggcgtggcaagaggcgaaaacatccccgccgtgatcgccctgaccgaccccgagggctgcccactgagccggtttaaggatagcctgggaaacccaacccacatcctgagaatcggcgagagctataaggagaagcagcggaccatccaggccaagaaggaggtggagcagcggagagccggcggctacagccggaagtacgccagcaaagccaagaatctggcagacgatatggtgagaaacaccgctagagatctgctgtactacgccgtgacccaggatgccatgctgatcttcgccaacctgagccggggcttcggccggcagggcaagcggaccttcatggccgagagacagtacacacggatggaggactggctgaccgccaagctggcctacgagggcctgagcaagacctacctgtccaagacactggcccagtacacctccaagacatgcagcaactgtgggtttaccatcaccagcgccgactacgacagggtgctggagaagctgaagaagacagcaacaggctggatgaccacaattaacggcaaggagctgaaggtggagggccagattacctactacaacagatacaagagacagaacgtagtcaaggacctgtccgtcgagctggatagactgagcgaagaatctgtgaacaacgacatctcctcctggacaaagggcagaagcggagaagctctgagcctcctgaagaaaagattctcccatagacccgtgcaggagaagttcgtgtgcctgaactgcggcttcgagacacacgcagccgagcaagccgccctgaacatcgccagatcctggctgttcctgcggagccaggagtacaagaaataccagacaaacaagacaaccggcaacaccgataagagagccttcgtcgagacctggcagtccttttaccggaagaagcttaaggaggtgtggaaacctgccgtgcggtctggcggatctggcggaggctccaccagccccaagaaaaagagaaaagtctaagctgccttctgcggggcttgccttctggccatgcccttcttctctcccttgcacctgtacctcttggtctttgaataaagcctgagtaggaaggctagcaaaaaaaaaaaaaaaaaaaaaaaaaaaaaaaaaaaaaaaaaaaaaaaaaaaaaaaaaaaaaaaaaaaaaaaaaaaaaaaa

SEQ ID NO: 10431 - RNA, 8787 nt, synthetic construct
  source 1..8787: mol_type = other RNA
aggaaataagagagaaaagaagagtaagaagaaatataagagccaccatggcccctaagaagaagcgtaaagtgagccggatgaaccacgaccaggagttcgacccccctaaggtgtaccctcccgtccccgccgagaagagaaagcccatccgggtcctgagcctgttcgatggcatcgccaccggtctgctggtgctgaaggacctgggcatccaggtggataggtacattgcctccgaggtgtgcgaggactccatcaccgtgggaatggtgcgtcatcagggcaagatcatgtacgtgggcgacgtgcggagcgtgacacagaagcatatccaggagtggggccctttcgacctggtgatcggcggcagcccttgcaatgacctgagcatcgtgaacccagcccggaagggcctgtacgagggaaccggcagactgttcttcgagttttacagactgctgcacgacgcccggcctaaggaaggcgacgaccggcccttcttttggctgttcgagaatgtggtggccatgggagtcagcgacaagcgggatattagccggttcctggagagcaaccccgtgatgatcgatgccaaggaagtgagcgccgcccaccgggccagatacttctggggcaatctgcctggcatgaacagacccctggccagcaccgtgaacgacaagctggagctgcaggagtgcctggagcacggccggatcgccaagttcagcaaggtgagaaccatcaccacccgaagcaacagcatcaaacaaggcaaggaccagcactttcctgtgttcatgaacgagaaggaggacatcctgtggtgtaccgagatggagagagtgttcgggttcccagtccactacacagatgtcagcaacatgtctagactggccagacagagactgctgggaagaagctggtccgtccctgtgatcagacacctgttcgcccctctgaaggagtacttcgcctgcgtgagcagcggcaacagcaacgccaacagccggggccccagcttctctagcggcctggtgccactgtccctgagagggagccacatgggccccatggagatctacaaaaccgtgagcgcctggaagcggcagcctgtgcgcgtgctgagcctgtttcggaatatcgataaagtcctgaaaagcctgggattcctggagagcggctctggctccggcggtggcaccctgaagtacgtggaggatgtgacaaacgtggtcagacgggatgtggagaagtggggccccttcgatctggtgtacggcagcacccaacccctgggcagctcttgtgaccggtgccctggctggtacatgtttcagttccaccggatcctgcagtacgccctgccgagacaggagtcccagcggccattcttttggattttcatggacaacttgctgctgaccgaggatgaccaggaaactaccactcggttcctgcagaccgaagccgtgaccctgcaggacgtgagaggccgggactaccagaacgccatgcgggtgtggtccaacatccctggactgaaaagcaagcacgcacctctgacccctaaagaagaggagtacctgcaggcccaggtgcggagcagaagcaagctggacgcccctaaggtggatctgctggtgaagaattgcctcctgcccctgagagagtacttcaagtatttcagccagaatagtctgcccctgggaggcagcggcggcggcgccctgaggagcgtgatgttcagcgacgtgagcatcgacttcagccccgaggagtgggagtacctggacctggagcagaaggacctgtacagggacgtgatgctggagaactacagcaacctggtgagcctgggctgcttcatcagcaagcccgacgtgatcagcctgctggagcagggcaaggagccctggaaggtggtgaggaagggcaggaggcagtaccccgacctggagaccaagtacggcggcccaagcagcggcgcccctcctcccagcggcggcaggcggcccaagcagcggcgcccctcctcccagcggcggcagcccagccggctccccaacctctaccgaggagggcacctctgagtccgccacccccgagagcggccctggcacctccaccgagcccagcgagggcagcgcacccggcagccctgccggcagccccacctccacagaggagggaaccagcaccgagcccagcgaaggcagcgccccaggcaccagcaccgagcctagtgagcaggagattaaacggatcaacaagatcagaagaagacttgtgaaagacagcaacaccaagaaggccggcaagacaggccccatgaaaaccctgctggttagagtgatgacacccgatctgagagagcggctggaaaacctgagaaagaagcctgaaaatatcccccagcccatcagcaatacatctagagccaacctgaataagctgctgaccgattacaccgaaatgaagaaggcgatcctgcatgtgtactgggaagagttccagaaggaccctgtgggcctgatgagccgggtggcccagcctgccagcaagaagatcgatcagaacaagctgaaacctgagatggacgagaagggcaacctgaccaccgccggctttgcctgctctcagtgtggccagcccctgttcgtgtacaagctggagcaggtgtctgagaagggcaaggcttacaccaactacttcggacggtgcaatgtggccgagcacgaaaagctgatcctgctggcccagctgaagcccgagaaggatagcgacgaagccgtgacatatagcctgggaaagtttgggcagagggccctggatttctacagcattcatgtgaccaaggagtccacccaccccgtgaagcccctggcccagatcgccggaaacagatacgcctccggacctgtgggaaaggccctgagcgacgcatgtatgggcacaatcgcctccttcctgtctaagtaccaggacatcatcatcgaacaccagaaggtggtgaagggcaaccagaagagactggagagcctgcgggagctggccggcaaggaaaacctggaataccctagcgtgaccctgccacctcagcctcacaccaaggagggcgttgatgcctacaacgaagtgatcgcccgggtgcgaatgtgggtgaacctgaacctgtggcagaagctgaagctaagcagagatgatgccaagcctctgctgagactgaagggattcccttcctttcctctggtcgagagacaggccaacgaagtggactggtgggacatggtgtgtaacgtgaagaagctgatcaacgagaaaaaggaggatggcaaggtgttttggcagaatctggctggctacaagagacaggaagccctgagaccatacctgagcagcgaggaagatcggaagaagggaaagaaattcgctcggtaccagctgggcgacctgctgctgcacctggaaaagaagcacggcgaggactggggaaaggtgtacgacgaggcctgggagcggattgacaagaaagtggaaggcctgagcaagcacatcaagctggaagaggaacggagaagcgaggacgcccagagcaaggccgccctgaccgactggctgcgggctaaggccagcttcgtgatcgagggcctgaaggaggccgacaaggacgagttctgcagatgcgagctgaagctgcagaagtggtacggggacctgcggggaaagcccttcgccatcgaagccgagaacagcatcctggacatcagcggcttcagcaagcagtacaactgtgccttcatctggcagaaggacggcgtgaagaagctgaacctgtacctgatcatcaactacttcaagggcggcaagctgcggttcaagaagatcaaacctgaagccttcgaagccaacagattctacaccgtgatcaacaaaaagagcggcgagatcgtgcccatggaggtgaacttcaacttcgacgaccccaacctgatcatcctgcctctggcctttggcaagagacagggcagagaattcatctggaacgacctgctgtccctggaaaccggcagcctgaagctggccaacggaagagtgatcgagaagacactgtacaacagaagaacccggcaggatgagcctgccctgttcgtggccctgaccttcgagcggcgggaggtcctggactcctccaatatcaaaccaatgaacctgatcggcgtggcaagaggcgaaaacatccccgccgtgatcgccctgaccgaccccgagggctgcccactgagccggtttaaggatagcctgggaaacccaacccacatcctgagaatcggcgagagctataaggagaagcagcggaccatccaggccaagaaggaggtggagcagcggagagccggcggctacagccggaagtacgccagcaaagccaagaatctggcagacgatatggtgagaaacaccgctagagatctgctgtactacgccgtgacccaggatgccatgctgatcttcgccaacctgagccggggcttcggccggcagggcaagcggaccttcatggccgagagacagtacacacggatggaggactggctgaccgccaagctggcctacgagggcctgagcaagacctacctgtccaagacactggcccagtacacctccaagacatgcagcaactgtgggtttaccatcaccagcgccgactacgacagggtgctggagaagctgaagaagacagcaacaggctggatgaccacaattaacggcaaggagctgaaggtggagggccagattacctactacaacagatacaagagacagaacgtagtcaaggacctgtccgtcgagctggatagactgagcgaagaatctgtgaacaacgacatctcctcctggacaaagggcagaagcggagaagctctgagcctcctgaagaaaagattctcccatagacccgtgcaggagaagttcgtgtgcctgaactgcggcttcgagacacacgcagccgagcaagccgccctgaacatcgccagatcctggctgttcctgcggagccaggagtacaagaaataccagacaaacaagacaaccggcaacaccgataagagagccttcgtcgagacctggcagtccttttaccggaagaagcttaaggaggtgtggaaacctgccgtgcggtctggcggatctggcggaggctccaccagccccaagaaaaagagaaaagtctaagctgccttctgcggggcttgccttctggccatgcccttcttctctcccttgcacctgtacctcttggtctttgaataaagcctgagtaggaaggctagcaaaaaaaaaaaaaaaaaaaaaaaaaaaaaaaaaaaaaaaaaaaaaaaaaaaaaaaaaaaaaaaaaaaaaaaaaaaaaaaagcccagccggctccccaacctctaccgaggagggcacctctgagtccgccacccccgagagcggccctggcacctccaccgagcccagcgagggcagcgcacccggcagccctgccggcagccccacctccacagaggagggaaccagcaccgagcccagcgaaggcagcgccccaggcaccagcaccgagcctagtgagcaggagattaaacggatcaacaagatcagaagaagacttgtgaaagacagcaacaccaagaaggccggcaagacaggccccatgaaaaccctgctggttagagtgatgacacccgatctgagagagcggctggaaaacctgagaaagaagcctgaaaatatcccccagcccatcagcaatacatctagagccaacctgaataagctgctgaccgattacaccgaaatgaagaaggcgatcctgcatgtgtactgggaagagttccagaaggaccctgtgggcctgatgagccgggtggcccagcctgccagcaagaagatcgatcagaacaagctgaaacctgagatggacgagaagggcaacctgaccaccgccggctttgcctgctctcagtgtggccagcccctgttcgtgtacaagctggagcaggtgtctgagaagggcaaggcttacaccaactacttcggacggtgcaatgtggccgagcacgaaaagctgatcctgctggcccagctgaagcccgagaaggatagcgacgaagccgtgacatatagcctgggaaagtttgggcagagggccctggatttctacagcattcatgtgaccaaggagtccacccaccccgtgaagcccctggcccagatcgccggaaacagatacgcctccggacctgtgggaaaggccctgagcgacgcatgtatgggcacaatcgcctccttcctgtctaagtaccaggacatcatcatcgaacaccagaaggtggtgaagggcaaccagaagagactggagagcctgcgggagctggccggcaaggaaaacctggaataccctagcgtgaccctgccacctcagcctcacaccaaggagggcgttgatgcctacaacgaagtgatcgcccgggtgcgaatgtgggtgaacctgaacctgtggcagaagctgaagctaagcagagatgatgccaagcctctgctgagactgaagggattcccttcctttcctctggtcgagagacaggccaacgaagtggactggtgggacatggtgtgtaacgtgaagaagctgatcaacgagaaaaaggaggatggcaaggtgttttggcagaatctggctggctacaagagacaggaagccctgagaccatacctgagcagcgaggaagatcggaagaagggaaagaaattcgctcggtaccagctgggcgacctgctgctgcacctggaaaagaagcacggcgaggactggggaaaggtgtacgacgaggcctgggagcggattgacaagaaagtggaaggcctgagcaagcacatcaagctggaagaggaacggagaagcgaggacgcccagagcaaggccgccctgaccgactggctgcgggctaaggccagcttcgtgatcgagggcctgaaggaggccgacaaggacgagttctgcagatgcgagctgaagctgcagaagtggtacggggacctgcggggaaagcccttcgccatcgaagccgagaacagcatcctggacatcagcggcttcagcaagcagtacaactgtgccttcatctggcagaaggacggcgtgaagaagctgaacctgtacctgatcatcaactacttcaagggcggcaagctgcggttcaagaagatcaaacctgaagccttcgaagccaacagattctacaccgtgatcaacaaaaagagcggcgagatcgtgcccatggaggtgaacttcaacttcgacgaccccaacctgatcatcctgcctctggcctttggcaagagacagggcagagaattcatctggaacgacctgctgtccctggaaaccggcagcctgaagctggccaacggaagagtgatcgagaagacactgtacaacagaagaacccggcaggatgagcctgccctgttcgtggccctgaccttcgagcggcgggaggtcctggactcctccaatatcaaaccaatgaacctgatcggcgtggcaagaggcgaaaacatccccgccgtgatcgccctgaccgaccccgagggctgcccactgagccggtttaaggatagcctgggaaacccaacccacatcctgagaatcggcgagagctataaggagaagcagcggaccatccaggccaagaaggaggtggagcagcggagagccggcggctacagccggaagtacgccagcaaagccaagaatctggcagacgatatggtgagaaacaccgctagagatctgctgtactacgccgtgacccaggatgccatgctgatcttcgccaacctgagccggggcttcggccggcagggcaagcggaccttcatggccgagagacagtacacacggatggaggactggctgaccgccaagctggcctacgagggcctgagcaagacctacctgtccaagacactggcccagtacacctccaagacatgcagcaactgtgggtttaccatcaccagcgccgactacgacagggtgctggagaagctgaagaagacagcaacaggctggatgaccacaattaacggcaaggagctgaaggtggagggccagattacctactacaacagatacaagagacagaacgtagtcaaggacctgtccgtcgagctggatagactgagcgaagaatctgtgaacaacgacatctcctcctggacaaagggcagaagcggagaagctctgagcctcctgaagaaaagattctcccatagacccgtgcaggagaagttcgtgtgcctgaactgcggcttcgagacacacgcagccgagcaagccgccctgaacatcgccagatcctggctgttcctgcggagccaggagtacaagaaataccagacaaacaagacaaccggcaacaccgataagagagccttcgtcgagacctggcagtccttttaccggaagaagcttaaggaggtgtggaaacctgccgtgcggtctggcggatctggcggaggctccaccagccccaagaaaaagagaaaagtctaagctgccttctgcggggcttgccttctggccatgcccttcttctctcccttgcacctgtacctcttggtctttgaataaagcctgagtaggaaggctagcaaaaaaaaaaaaaaaaaaaaaaaaaaaaaaaaaaaaaaaaaaaaaaaaaaaaaaaaaaaaaaaaaaaaaaaaaaaaaaaa

SEQ ID NO: 10432 - RNA, 8787 nt, synthetic construct
  source 1..8787: mol_type = other RNA
aggaaataagagagaaaagaagagtaagaagaaatataagagccaccatggcccctaagaagaagcgtaaagtgagccggatgaaccacgaccaggagttcgacccccctaaggtgtaccctcccgtccccgccgagaagagaaagcccatccgggtcctgagcctgttcgatggcatcgccaccggtctgctggtgctgaaggacctgggcatccaggtggataggtacattgcctccgaggtgtgcgaggactccatcaccgtgggaatggtgcgtcatcagggcaagatcatgtacgtgggcgacgtgcggagcgtgacacagaagcatatccaggagtggggccctttcgacctggtgatcggcggcagcccttgcaatgacctgagcatcgtgaacccagcccggaagggcctgtacgagggaaccggcagactgttcttcgagttttacagactgctgcacgacgcccggcctaaggaaggcgacgaccggcccttcttttggctgttcgagaatgtggtggccatgggagtcagcgacaagcgggatattagccggttcctggagagcaaccccgtgatgatcgatgccaaggaagtgagcgccgcccaccgggccagatacttctggggcaatctgcctggcatgaacagacccctggccagcaccgtgaacgacaagctggagctgcaggagtgcctggagcacggccggatcgccaagttcagcaaggtgagaaccatcaccacccgaagcaacagcatcaaacaaggcaaggaccagcactttcctgtgttcatgaacgagaaggaggacatcctgtggtgtaccgagatggagagagtgttcgggttcccagtccactacacagatgtcagcaacatgtctagactggccagacagagactgctgggaagaagctggtccgtccctgtgatcagacacctgttcgcccctctgaaggagtacttcgcctgcgtgagcagcggcaacagcaacgccaacagccggggccccagcttctctagcggcctggtgccactgtccctgagagggagccacatgggccccatggagatctacaaaaccgtgagcgcctggaagcggcagcctgtgcgcgtgctgagcctgtttcggaatatcgataaagtcctgaaaagcctgggattcctggagagcggctctggctccggcggtggcaccctgaagtacgtggaggatgtgacaaacgtggtcagacgggatgtggagaagtggggccccttcgatctggtgtacggcagcacccaacccctgggcagctcttgtgaccggtgccctggctggtacatgtttcagttccaccggatcctgcagtacgccctgccgagacaggagtcccagcggccattcttttggattttcatggacaacttgctgctgaccgaggatgaccaggaaactaccactcggttcctgcagaccgaagccgtgaccctgcaggacgtgagaggccgggactaccagaacgccatgcgggtgtggtccaacatccctggactgaaaagcaagcacgcacctctgacccctaaagaagaggagtacctgcaggcccaggtgcggagcagaagcaagctggacgcccctaaggtggatctgctggtgaagaattgcctcctgcccctgagagagtacttcaagtatttcagccagaatagtctgcccctgggaggcagcggcggcggcgagcaggacgccgtgacctacgaggacgtgcacgtgaacttcacccacgaggagtgggccctgctggaccccagccagaagagcctgtacaaggacgtgatgatggagacctactggaacctgacctgcatcggctacaagtgggaggaccacaacatcgaggagcactgccagagctgcaggaggaacggcagcaggtgcgtgatctgccacagcggccacaacccctgcgagcacaagggcggcggcccaagcagcggcgcccctcctcccagcggcggcaggcggcccaagcagcggcgcccctcctcccagcggcggcagcccagccggctccccaacctctaccgaggagggcacctctgagtccgccacccccgagagcggccctggcacctccaccgagcccagcgagggcagcgcacccggcagccctgccggcagccccacctccacagaggagggaaccagcaccgagcccagcgaaggcagcgccccaggcaccagcaccgagcctagtgagcaggagattaaacggatcaacaagatcagaagaagacttgtgaaagacagcaacaccaagaaggccggcaagacaggccccatgaaaaccctgctggttagagtgatgacacccgatctgagagagcggctggaaaacctgagaaagaagcctgaaaatatcccccagcccatcagcaatacatctagagccaacctgaataagctgctgaccgattacaccgaaatgaagaaggcgatcctgcatgtgtactgggaagagttccagaaggaccctgtgggcctgatgagccgggtggcccagcctgccagcaagaagatcgatcagaacaagctgaaacctgagatggacgagaagggcaacctgaccaccgccggctttgcctgctctcagtgtggccagcccctgttcgtgtacaagctggagcaggtgtctgagaagggcaaggcttacaccaactacttcggacggtgcaatgtggccgagcacgaaaagctgatcctgctggcccagctgaagcccgagaaggatagcgacgaagccgtgacatatagcctgggaaagtttgggcagagggccctggatttctacagcattcatgtgaccaaggagtccacccaccccgtgaagcccctggcccagatcgccggaaacagatacgcctccggacctgtgggaaaggccctgagcgacgcatgtatgggcacaatcgcctccttcctgtctaagtaccaggacatcatcatcgaacaccagaaggtggtgaagggcaaccagaagagactggagagcctgcgggagctggccggcaaggaaaacctggaataccctagcgtgaccctgccacctcagcctcacaccaaggagggcgttgatgcctacaacgaagtgatcgcccgggtgcgaatgtgggtgaacctgaacctgtggcagaagctgaagctaagcagagatgatgccaagcctctgctgagactgaagggattcccttcctttcctctggtcgagagacaggccaacgaagtggactggtgggacatggtgtgtaacgtgaagaagctgatcaacgagaaaaaggaggatggcaaggtgttttggcagaatctggctggctacaagagacaggaagccctgagaccatacctgagcagcgaggaagatcggaagaagggaaagaaattcgctcggtaccagctgggcgacctgctgctgcacctggaaaagaagcacggcgaggactggggaaaggtgtacgacgaggcctgggagcggattgacaagaaagtggaaggcctgagcaagcacatcaagctggaagaggaacggagaagcgaggacgcccagagcaaggccgccctgaccgactggctgcgggctaaggccagcttcgtgatcgagggcctgaaggaggccgacaaggacgagttctgcagatgcgagctgaagctgcagaagtggtacggggacctgcggggaaagcccttcgccatcgaagccgagaacagcatcctggacatcagcggcttcagcaagcagtacaactgtgccttcatctggcagaaggacggcgtgaagaagctgaacctgtacctgatcatcaactacttcaagggcggcaagctgcggttcaagaagatcaaacctgaagccttcgaagccaacagattctacaccgtgatcaacaaaaagagcggcgagatcgtgcccatggaggtgaacttcaacttcgacgaccccaacctgatcatcctgcctctggcctttggcaagagacagggcagagaattcatctggaacgacctgctgtccctggaaaccggcagcctgaagctggccaacggaagagtgatcgagaagacactgtacaacagaagaacccggcaggatgagcctgccctgttcgtggccctgaccttcgagcggcgggaggtcctggactcctccaatatcaaaccaatgaacctgatcggcgtggcaagaggcgaaaacatccccgccgtgatcgccctgaccgaccccgagggctgcccactgagccggtttaaggatagcctgggaaacccaacccacatcctgagaatcggcgagagctataaggagaagcagcggaccatccaggccaagaaggaggtggagcagcggagagccggcggctacagccggaagtacgccagcaaagccaagaatctggcagacgatatggtgagaaacaccgctagagatctgctgtactacgccgtgacccaggatgccatgctgatcttcgccaacctgagccggggcttcggccggcagggcaagcggaccttcatggccgagagacagtacacacggatggaggactggctgaccgccaagctggcctacgagggcctgagcaagacctacctgtccaagacactggcccagtacacctccaagacatgcagcaactgtgggtttaccatcaccagcgccgactacgacagggtgctggagaagctgaagaagacagcaacaggctggatgaccacaattaacggcaaggagctgaaggtggagggccagattacctactacaacagatacaagagacagaacgtagtcaaggacctgtccgtcgagctggatagactgagcgaagaatctgtgaacaacgacatctcctcctggacaaagggcagaagcggagaagctctgagcctcctgaagaaaagattctcccatagacccgtgcaggagaagttcgtgtgcctgaactgcggcttcgagacacacgcagccgagcaagccgccctgaacatcgccagatcctggctgttcctgcggagccaggagtacaagaaataccagacaaacaagacaaccggcaacaccgataagagagccttcgtcgagacctggcagtccttttaccggaagaagcttaaggaggtgtggaaacctgccgtgcggtctggcggatctggcggaggctccaccagccccaagaaaaagagaaaagtctaagctgccttctgcggggcttgccttctggccatgcccttcttctctcccttgcacctgtacctcttggtctttgaataaagcctgagtaggaaggctagcaaaaaaaaaaaaaaaaaaaaaaaaaaaaaaaaaaaaaaaaaaaaaaaaaaaaaaaaaaaaaaaaaaaaaaaaaaaaaaaagcccagccggctccccaacctctaccgaggagggcacctctgagtccgccacccccgagagcggccctggcacctccaccgagcccagcgagggcagcgcacccggcagccctgccggcagccccacctccacagaggagggaaccagcaccgagcccagcgaaggcagcgccccaggcaccagcaccgagcctagtgagcaggagattaaacggatcaacaagatcagaagaagacttgtgaaagacagcaacaccaagaaggccggcaagacaggccccatgaaaaccctgctggttagagtgatgacacccgatctgagagagcggctggaaaacctgagaaagaagcctgaaaatatcccccagcccatcagcaatacatctagagccaacctgaataagctgctgaccgattacaccgaaatgaagaaggcgatcctgcatgtgtactgggaagagttccagaaggaccctgtgggcctgatgagccgggtggcccagcctgccagcaagaagatcgatcagaacaagctgaaacctgagatggacgagaagggcaacctgaccaccgccggctttgcctgctctcagtgtggccagcccctgttcgtgtacaagctggagcaggtgtctgagaagggcaaggcttacaccaactacttcggacggtgcaatgtggccgagcacgaaaagctgatcctgctggcccagctgaagcccgagaaggatagcgacgaagccgtgacatatagcctgggaaagtttgggcagagggccctggatttctacagcattcatgtgaccaaggagtccacccaccccgtgaagcccctggcccagatcgccggaaacagatacgcctccggacctgtgggaaaggccctgagcgacgcatgtatgggcacaatcgcctccttcctgtctaagtaccaggacatcatcatcgaacaccagaaggtggtgaagggcaaccagaagagactggagagcctgcgggagctggccggcaaggaaaacctggaataccctagcgtgaccctgccacctcagcctcacaccaaggagggcgttgatgcctacaacgaagtgatcgcccgggtgcgaatgtgggtgaacctgaacctgtggcagaagctgaagctaagcagagatgatgccaagcctctgctgagactgaagggattcccttcctttcctctggtcgagagacaggccaacgaagtggactggtgggacatggtgtgtaacgtgaagaagctgatcaacgagaaaaaggaggatggcaaggtgttttggcagaatctggctggctacaagagacaggaagccctgagaccatacctgagcagcgaggaagatcggaagaagggaaagaaattcgctcggtaccagctgggcgacctgctgctgcacctggaaaagaagcacggcgaggactggggaaaggtgtacgacgaggcctgggagcggattgacaagaaagtggaaggcctgagcaagcacatcaagctggaagaggaacggagaagcgaggacgcccagagcaaggccgccctgaccgactggctgcgggctaaggccagcttcgtgatcgagggcctgaaggaggccgacaaggacgagttctgcagatgcgagctgaagctgcagaagtggtacggggacctgcggggaaagcccttcgccatcgaagccgagaacagcatcctggacatcagcggcttcagcaagcagtacaactgtgccttcatctggcagaaggacggcgtgaagaagctgaacctgtacctgatcatcaactacttcaagggcggcaagctgcggttcaagaagatcaaacctgaagccttcgaagccaacagattctacaccgtgatcaacaaaaagagcggcgagatcgtgcccatggaggtgaacttcaacttcgacgaccccaacctgatcatcctgcctctggcctttggcaagagacagggcagagaattcatctggaacgacctgctgtccctggaaaccggcagcctgaagctggccaacggaagagtgatcgagaagacactgtacaacagaagaacccggcaggatgagcctgccctgttcgtggccctgaccttcgagcggcgggaggtcctggactcctccaatatcaaaccaatgaacctgatcggcgtggcaagaggcgaaaacatccccgccgtgatcgccctgaccgaccccgagggctgcccactgagccggtttaaggatagcctgggaaacccaacccacatcctgagaatcggcgagagctataaggagaagcagcggaccatccaggccaagaaggaggtggagcagcggagagccggcggctacagccggaagtacgccagcaaagccaagaatctggcagacgatatggtgagaaacaccgctagagatctgctgtactacgccgtgacccaggatgccatgctgatcttcgccaacctgagccggggcttcggccggcagggcaagcggaccttcatggccgagagacagtacacacggatggaggactggctgaccgccaagctggcctacgagggcctgagcaagacctacctgtccaagacactggcccagtacacctccaagacatgcagcaactgtgggtttaccatcaccagcgccgactacgacagggtgctggagaagctgaagaagacagcaacaggctggatgaccacaattaacggcaaggagctgaaggtggagggccagattacctactacaacagatacaagagacagaacgtagtcaaggacctgtccgtcgagctggatagactgagcgaagaatctgtgaacaacgacatctcctcctggacaaagggcagaagcggagaagctctgagcctcctgaagaaaagattctcccatagacccgtgcaggagaagttcgtgtgcctgaactgcggcttcgagacacacgcagccgagcaagccgccctgaacatcgccagatcctggctgttcctgcggagccaggagtacaagaaataccagacaaacaagacaaccggcaacaccgataagagagccttcgtcgagacctggcagtccttttaccggaagaagcttaaggaggtgtggaaacctgccgtgcggtctggcggatctggcggaggctccaccagccccaagaaaaagagaaaagtctaagctgccttctgcggggcttgccttctggccatgcccttcttctctcccttgcacctgtacctcttggtctttgaataaagcctgagtaggaaggctagcaaaaaaaaaaaaaaaaaaaaaaaaaaaaaaaaaaaaaaaaaaaaaaaaaaaaaaaaaaaaaaaaaaaaaaaaaaaaaaaa

SEQ ID NO: 10433 - RNA, 8787 nt, synthetic construct
  source 1..8787: mol_type = other RNA
aggaaataagagagaaaagaagagtaagaagaaatataagagccaccatggcccctaagaagaagcgtaaagtgagccggatgaaccacgaccaggagttcgacccccctaaggtgtaccctcccgtccccgccgagaagagaaagcccatccgggtcctgagcctgttcgatggcatcgccaccggtctgctggtgctgaaggacctgggcatccaggtggataggtacattgcctccgaggtgtgcgaggactccatcaccgtgggaatggtgcgtcatcagggcaagatcatgtacgtgggcgacgtgcggagcgtgacacagaagcatatccaggagtggggccctttcgacctggtgatcggcggcagcccttgcaatgacctgagcatcgtgaacccagcccggaagggcctgtacgagggaaccggcagactgttcttcgagttttacagactgctgcacgacgcccggcctaaggaaggcgacgaccggcccttcttttggctgttcgagaatgtggtggccatgggagtcagcgacaagcgggatattagccggttcctggagagcaaccccgtgatgatcgatgccaaggaagtgagcgccgcccaccgggccagatacttctggggcaatctgcctggcatgaacagacccctggccagcaccgtgaacgacaagctggagctgcaggagtgcctggagcacggccggatcgccaagttcagcaaggtgagaaccatcaccacccgaagcaacagcatcaaacaaggcaaggaccagcactttcctgtgttcatgaacgagaaggaggacatcctgtggtgtaccgagatggagagagtgttcgggttcccagtccactacacagatgtcagcaacatgtctagactggccagacagagactgctgggaagaagctggtccgtccctgtgatcagacacctgttcgcccctctgaaggagtacttcgcctgcgtgagcagcggcaacagcaacgccaacagccggggccccagcttctctagcggcctggtgccactgtccctgagagggagccacatgggccccatggagatctacaaaaccgtgagcgcctggaagcggcagcctgtgcgcgtgctgagcctgtttcggaatatcgataaagtcctgaaaagcctgggattcctggagagcggctctggctccggcggtggcaccctgaagtacgtggaggatgtgacaaacgtggtcagacgggatgtggagaagtggggccccttcgatctggtgtacggcagcacccaacccctgggcagctcttgtgaccggtgccctggctggtacatgtttcagttccaccggatcctgcagtacgccctgccgagacaggagtcccagcggccattcttttggattttcatggacaacttgctgctgaccgaggatgaccaggaaactaccactcggttcctgcagaccgaagccgtgaccctgcaggacgtgagaggccgggactaccagaacgccatgcgggtgtggtccaacatccctggactgaaaagcaagcacgcacctctgacccctaaagaagaggagtacctgcaggcccaggtgcggagcagaagcaagctggacgcccctaaggtggatctgctggtgaagaattgcctcctgcccctgagagagtacttcaagtatttcagccagaatagtctgcccctgggaggcagcggcggcggctgcaaggagagcgtgatcttcaaggacgtgtgcgtgaacttcagcctggaggagtgggagtgcctggacctgacccagaggaacctgtacaggtgcgtgatgctggagaactacagcaacctggtgagcgtggtgggcctgagcatccccaagcccgacgtgatcagcctgctggagcagggcaaggagccctggggcgtgttcgacagcgagatgaccaggggcctgaaccaggactgcggcggcggcccaagcagcggcgcccctcctcccagcggcggcaggcggcccaagcagcggcgcccctcctcccagcggcggcagcccagccggctccccaacctctaccgaggagggcacctctgagtccgccacccccgagagcggccctggcacctccaccgagcccagcgagggcagcgcacccggcagccctgccggcagccccacctccacagaggagggaaccagcaccgagcccagcgaaggcagcgccccaggcaccagcaccgagcctagtgagcaggagattaaacggatcaacaagatcagaagaagacttgtgaaagacagcaacaccaagaaggccggcaagacaggccccatgaaaaccctgctggttagagtgatgacacccgatctgagagagcggctggaaaacctgagaaagaagcctgaaaatatcccccagcccatcagcaatacatctagagccaacctgaataagctgctgaccgattacaccgaaatgaagaaggcgatcctgcatgtgtactgggaagagttccagaaggaccctgtgggcctgatgagccgggtggcccagcctgccagcaagaagatcgatcagaacaagctgaaacctgagatggacgagaagggcaacctgaccaccgccggctttgcctgctctcagtgtggccagcccctgttcgtgtacaagctggagcaggtgtctgagaagggcaaggcttacaccaactacttcggacggtgcaatgtggccgagcacgaaaagctgatcctgctggcccagctgaagcccgagaaggatagcgacgaagccgtgacatatagcctgggaaagtttgggcagagggccctggatttctacagcattcatgtgaccaaggagtccacccaccccgtgaagcccctggcccagatcgccggaaacagatacgcctccggacctgtgggaaaggccctgagcgacgcatgtatgggcacaatcgcctccttcctgtctaagtaccaggacatcatcatcgaacaccagaaggtggtgaagggcaaccagaagagactggagagcctgcgggagctggccggcaaggaaaacctggaataccctagcgtgaccctgccacctcagcctcacaccaaggagggcgttgatgcctacaacgaagtgatcgcccgggtgcgaatgtgggtgaacctgaacctgtggcagaagctgaagctaagcagagatgatgccaagcctctgctgagactgaagggattcccttcctttcctctggtcgagagacaggccaacgaagtggactggtgggacatggtgtgtaacgtgaagaagctgatcaacgagaaaaaggaggatggcaaggtgttttggcagaatctggctggctacaagagacaggaagccctgagaccatacctgagcagcgaggaagatcggaagaagggaaagaaattcgctcggtaccagctgggcgacctgctgctgcacctggaaaagaagcacggcgaggactggggaaaggtgtacgacgaggcctgggagcggattgacaagaaagtggaaggcctgagcaagcacatcaagctggaagaggaacggagaagcgaggacgcccagagcaaggccgccctgaccgactggctgcgggctaaggccagcttcgtgatcgagggcctgaaggaggccgacaaggacgagttctgcagatgcgagctgaagctgcagaagtggtacggggacctgcggggaaagcccttcgccatcgaagccgagaacagcatcctggacatcagcggcttcagcaagcagtacaactgtgccttcatctggcagaaggacggcgtgaagaagctgaacctgtacctgatcatcaactacttcaagggcggcaagctgcggttcaagaagatcaaacctgaagccttcgaagccaacagattctacaccgtgatcaacaaaaagagcggcgagatcgtgcccatggaggtgaacttcaacttcgacgaccccaacctgatcatcctgcctctggcctttggcaagagacagggcagagaattcatctggaacgacctgctgtccctggaaaccggcagcctgaagctggccaacggaagagtgatcgagaagacactgtacaacagaagaacccggcaggatgagcctgccctgttcgtggccctgaccttcgagcggcgggaggtcctggactcctccaatatcaaaccaatgaacctgatcggcgtggcaagaggcgaaaacatccccgccgtgatcgccctgaccgaccccgagggctgcccactgagccggtttaaggatagcctgggaaacccaacccacatcctgagaatcggcgagagctataaggagaagcagcggaccatccaggccaagaaggaggtggagcagcggagagccggcggctacagccggaagtacgccagcaaagccaagaatctggcagacgatatggtgagaaacaccgctagagatctgctgtactacgccgtgacccaggatgccatgctgatcttcgccaacctgagccggggcttcggccggcagggcaagcggaccttcatggccgagagacagtacacacggatggaggactggctgaccgccaagctggcctacgagggcctgagcaagacctacctgtccaagacactggcccagtacacctccaagacatgcagcaactgtgggtttaccatcaccagcgccgactacgacagggtgctggagaagctgaagaagacagcaacaggctggatgaccacaattaacggcaaggagctgaaggtggagggccagattacctactacaacagatacaagagacagaacgtagtcaaggacctgtccgtcgagctggatagactgagcgaagaatctgtgaacaacgacatctcctcctggacaaagggcagaagcggagaagctctgagcctcctgaagaaaagattctcccatagacccgtgcaggagaagttcgtgtgcctgaactgcggcttcgagacacacgcagccgagcaagccgccctgaacatcgccagatcctggctgttcctgcggagccaggagtacaagaaataccagacaaacaagacaaccggcaacaccgataagagagccttcgtcgagacctggcagtccttttaccggaagaagcttaaggaggtgtggaaacctgccgtgcggtctggcggatctggcggaggctccaccagccccaagaaaaagagaaaagtctaagctgccttctgcggggcttgccttctggccatgcccttcttctctcccttgcacctgtacctcttggtctttgaataaagcctgagtaggaaggctagcaaaaaaaaaaaaaaaaaaaaaaaaaaaaaaaaaaaaaaaaaaaaaaaaaaaaaaaaaaaaaaaaaaaaaaaaaaaaaaaagcccagccggctccccaacctctaccgaggagggcacctctgagtccgccacccccgagagcggccctggcacctccaccgagcccagcgagggcagcgcacccggcagccctgccggcagccccacctccacagaggagggaaccagcaccgagcccagcgaaggcagcgccccaggcaccagcaccgagcctagtgagcaggagattaaacggatcaacaagatcagaagaagacttgtgaaagacagcaacaccaagaaggccggcaagacaggccccatgaaaaccctgctggttagagtgatgacacccgatctgagagagcggctggaaaacctgagaaagaagcctgaaaatatcccccagcccatcagcaatacatctagagccaacctgaataagctgctgaccgattacaccgaaatgaagaaggcgatcctgcatgtgtactgggaagagttccagaaggaccctgtgggcctgatgagccgggtggcccagcctgccagcaagaagatcgatcagaacaagctgaaacctgagatggacgagaagggcaacctgaccaccgccggctttgcctgctctcagtgtggccagcccctgttcgtgtacaagctggagcaggtgtctgagaagggcaaggcttacaccaactacttcggacggtgcaatgtggccgagcacgaaaagctgatcctgctggcccagctgaagcccgagaaggatagcgacgaagccgtgacatatagcctgggaaagtttgggcagagggccctggatttctacagcattcatgtgaccaaggagtccacccaccccgtgaagcccctggcccagatcgccggaaacagatacgcctccggacctgtgggaaaggccctgagcgacgcatgtatgggcacaatcgcctccttcctgtctaagtaccaggacatcatcatcgaacaccagaaggtggtgaagggcaaccagaagagactggagagcctgcgggagctggccggcaaggaaaacctggaataccctagcgtgaccctgccacctcagcctcacaccaaggagggcgttgatgcctacaacgaagtgatcgcccgggtgcgaatgtgggtgaacctgaacctgtggcagaagctgaagctaagcagagatgatgccaagcctctgctgagactgaagggattcccttcctttcctctggtcgagagacaggccaacgaagtggactggtgggacatggtgtgtaacgtgaagaagctgatcaacgagaaaaaggaggatggcaaggtgttttggcagaatctggctggctacaagagacaggaagccctgagaccatacctgagcagcgaggaagatcggaagaagggaaagaaattcgctcggtaccagctgggcgacctgctgctgcacctggaaaagaagcacggcgaggactggggaaaggtgtacgacgaggcctgggagcggattgacaagaaagtggaaggcctgagcaagcacatcaagctggaagaggaacggagaagcgaggacgcccagagcaaggccgccctgaccgactggctgcgggctaaggccagcttcgtgatcgagggcctgaaggaggccgacaaggacgagttctgcagatgcgagctgaagctgcagaagtggtacggggacctgcggggaaagcccttcgccatcgaagccgagaacagcatcctggacatcagcggcttcagcaagcagtacaactgtgccttcatctggcagaaggacggcgtgaagaagctgaacctgtacctgatcatcaactacttcaagggcggcaagctgcggttcaagaagatcaaacctgaagccttcgaagccaacagattctacaccgtgatcaacaaaaagagcggcgagatcgtgcccatggaggtgaacttcaacttcgacgaccccaacctgatcatcctgcctctggcctttggcaagagacagggcagagaattcatctggaacgacctgctgtccctggaaaccggcagcctgaagctggccaacggaagagtgatcgagaagacactgtacaacagaagaacccggcaggatgagcctgccctgttcgtggccctgaccttcgagcggcgggaggtcctggactcctccaatatcaaaccaatgaacctgatcggcgtggcaagaggcgaaaacatccccgccgtgatcgccctgaccgaccccgagggctgcccactgagccggtttaaggatagcctgggaaacccaacccacatcctgagaatcggcgagagctataaggagaagcagcggaccatccaggccaagaaggaggtggagcagcggagagccggcggctacagccggaagtacgccagcaaagccaagaatctggcagacgatatggtgagaaacaccgctagagatctgctgtactacgccgtgacccaggatgccatgctgatcttcgccaacctgagccggggcttcggccggcagggcaagcggaccttcatggccgagagacagtacacacggatggaggactggctgaccgccaagctggcctacgagggcctgagcaagacctacctgtccaagacactggcccagtacacctccaagacatgcagcaactgtgggtttaccatcaccagcgccgactacgacagggtgctggagaagctgaagaagacagcaacaggctggatgaccacaattaacggcaaggagctgaaggtggagggccagattacctactacaacagatacaagagacagaacgtagtcaaggacctgtccgtcgagctggatagactgagcgaagaatctgtgaacaacgacatctcctcctggacaaagggcagaagcggagaagctctgagcctcctgaagaaaagattctcccatagacccgtgcaggagaagttcgtgtgcctgaactgcggcttcgagacacacgcagccgagcaagccgccctgaacatcgccagatcctggctgttcctgcggagccaggagtacaagaaataccagacaaacaagacaaccggcaacaccgataagagagccttcgtcgagacctggcagtccttttaccggaagaagcttaaggaggtgtggaaacctgccgtgcggtctggcggatctggcggaggctccaccagccccaagaaaaagagaaaagtctaagctgccttctgcggggcttgccttctggccatgcccttcttctctcccttgcacctgtacctcttggtctttgaataaagcctgagtaggaaggctagcaaaaaaaaaaaaaaaaaaaaaaaaaaaaaaaaaaaaaaaaaaaaaaaaaaaaaaaaaaaaaaaaaaaaaaaaaaaaaaaa

SEQ ID NO: 10434 - RNA, 8787 nt, synthetic construct
  source 1..8787: mol_type = other RNA
aggaaataagagagaaaagaagagtaagaagaaatataagagccaccatggcccctaagaagaagcgtaaagtgagccggatgaaccacgaccaggagttcgacccccctaaggtgtaccctcccgtccccgccgagaagagaaagcccatccgggtcctgagcctgttcgatggcatcgccaccggtctgctggtgctgaaggacctgggcatccaggtggataggtacattgcctccgaggtgtgcgaggactccatcaccgtgggaatggtgcgtcatcagggcaagatcatgtacgtgggcgacgtgcggagcgtgacacagaagcatatccaggagtggggccctttcgacctggtgatcggcggcagcccttgcaatgacctgagcatcgtgaacccagcccggaagggcctgtacgagggaaccggcagactgttcttcgagttttacagactgctgcacgacgcccggcctaaggaaggcgacgaccggcccttcttttggctgttcgagaatgtggtggccatgggagtcagcgacaagcgggatattagccggttcctggagagcaaccccgtgatgatcgatgccaaggaagtgagcgccgcccaccgggccagatacttctggggcaatctgcctggcatgaacagacccctggccagcaccgtgaacgacaagctggagctgcaggagtgcctggagcacggccggatcgccaagttcagcaaggtgagaaccatcaccacccgaagcaacagcatcaaacaaggcaaggaccagcactttcctgtgttcatgaacgagaaggaggacatcctgtggtgtaccgagatggagagagtgttcgggttcccagtccactacacagatgtcagcaacatgtctagactggccagacagagactgctgggaagaagctggtccgtccctgtgatcagacacctgttcgcccctctgaaggagtacttcgcctgcgtgagcagcggcaacagcaacgccaacagccggggccccagcttctctagcggcctggtgccactgtccctgagagggagccacatgggccccatggagatctacaaaaccgtgagcgcctggaagcggcagcctgtgcgcgtgctgagcctgtttcggaatatcgataaagtcctgaaaagcctgggattcctggagagcggctctggctccggcggtggcaccctgaagtacgtggaggatgtgacaaacgtggtcagacgggatgtggagaagtggggccccttcgatctggtgtacggcagcacccaacccctgggcagctcttgtgaccggtgccctggctggtacatgtttcagttccaccggatcctgcagtacgccctgccgagacaggagtcccagcggccattcttttggattttcatggacaacttgctgctgaccgaggatgaccaggaaactaccactcggttcctgcagaccgaagccgtgaccctgcaggacgtgagaggccgggactaccagaacgccatgcgggtgtggtccaacatccctggactgaaaagcaagcacgcacctctgacccctaaagaagaggagtacctgcaggcccaggtgcggagcagaagcaagctggacgcccctaaggtggatctgctggtgaagaattgcctcctgcccctgagagagtacttcaagtatttcagccagaatagtctgcccctgggaggcagcggcggcggcggcagggtgaccttcagggacgtggccgtggagttcagcctggccgagtggaagtgcctgaaccccgtgcagagggccctgtacagggaggtgatgctggagaactacaggaacctggagttcgtggacagcagcctgaagagcatgatggagttcagcagccacgagcacagcaacaccggcgagggcttccacaccggcaccctggagaggcacaagagctaccacatcggcgacttctggggcggcccaagcagcggcgcccctcctcccagcggcggcaggcggcccaagcagcggcgcccctcctcccagcggcggcagcccagccggctccccaacctctaccgaggagggcacctctgagtccgccacccccgagagcggccctggcacctccaccgagcccagcgagggcagcgcacccggcagccctgccggcagccccacctccacagaggagggaaccagcaccgagcccagcgaaggcagcgccccaggcaccagcaccgagcctagtgagcaggagattaaacggatcaacaagatcagaagaagacttgtgaaagacagcaacaccaagaaggccggcaagacaggccccatgaaaaccctgctggttagagtgatgacacccgatctgagagagcggctggaaaacctgagaaagaagcctgaaaatatcccccagcccatcagcaatacatctagagccaacctgaataagctgctgaccgattacaccgaaatgaagaaggcgatcctgcatgtgtactgggaagagttccagaaggaccctgtgggcctgatgagccgggtggcccagcctgccagcaagaagatcgatcagaacaagctgaaacctgagatggacgagaagggcaacctgaccaccgccggctttgcctgctctcagtgtggccagcccctgttcgtgtacaagctggagcaggtgtctgagaagggcaaggcttacaccaactacttcggacggtgcaatgtggccgagcacgaaaagctgatcctgctggcccagctgaagcccgagaaggatagcgacgaagccgtgacatatagcctgggaaagtttgggcagagggccctggatttctacagcattcatgtgaccaaggagtccacccaccccgtgaagcccctggcccagatcgccggaaacagatacgcctccggacctgtgggaaaggccctgagcgacgcatgtatgggcacaatcgcctccttcctgtctaagtaccaggacatcatcatcgaacaccagaaggtggtgaagggcaaccagaagagactggagagcctgcgggagctggccggcaaggaaaacctggaataccctagcgtgaccctgccacctcagcctcacaccaaggagggcgttgatgcctacaacgaagtgatcgcccgggtgcgaatgtgggtgaacctgaacctgtggcagaagctgaagctaagcagagatgatgccaagcctctgctgagactgaagggattcccttcctttcctctggtcgagagacaggccaacgaagtggactggtgggacatggtgtgtaacgtgaagaagctgatcaacgagaaaaaggaggatggcaaggtgttttggcagaatctggctggctacaagagacaggaagccctgagaccatacctgagcagcgaggaagatcggaagaagggaaagaaattcgctcggtaccagctgggcgacctgctgctgcacctggaaaagaagcacggcgaggactggggaaaggtgtacgacgaggcctgggagcggattgacaagaaagtggaaggcctgagcaagcacatcaagctggaagaggaacggagaagcgaggacgcccagagcaaggccgccctgaccgactggctgcgggctaaggccagcttcgtgatcgagggcctgaaggaggccgacaaggacgagttctgcagatgcgagctgaagctgcagaagtggtacggggacctgcggggaaagcccttcgccatcgaagccgagaacagcatcctggacatcagcggcttcagcaagcagtacaactgtgccttcatctggcagaaggacggcgtgaagaagctgaacctgtacctgatcatcaactacttcaagggcggcaagctgcggttcaagaagatcaaacctgaagccttcgaagccaacagattctacaccgtgatcaacaaaaagagcggcgagatcgtgcccatggaggtgaacttcaacttcgacgaccccaacctgatcatcctgcctctggcctttggcaagagacagggcagagaattcatctggaacgacctgctgtccctggaaaccggcagcctgaagctggccaacggaagagtgatcgagaagacactgtacaacagaagaacccggcaggatgagcctgccctgttcgtggccctgaccttcgagcggcgggaggtcctggactcctccaatatcaaaccaatgaacctgatcggcgtggcaagaggcgaaaacatccccgccgtgatcgccctgaccgaccccgagggctgcccactgagccggtttaaggatagcctgggaaacccaacccacatcctgagaatcggcgagagctataaggagaagcagcggaccatccaggccaagaaggaggtggagcagcggagagccggcggctacagccggaagtacgccagcaaagccaagaatctggcagacgatatggtgagaaacaccgctagagatctgctgtactacgccgtgacccaggatgccatgctgatcttcgccaacctgagccggggcttcggccggcagggcaagcggaccttcatggccgagagacagtacacacggatggaggactggctgaccgccaagctggcctacgagggcctgagcaagacctacctgtccaagacactggcccagtacacctccaagacatgcagcaactgtgggtttaccatcaccagcgccgactacgacagggtgctggagaagctgaagaagacagcaacaggctggatgaccacaattaacggcaaggagctgaaggtggagggccagattacctactacaacagatacaagagacagaacgtagtcaaggacctgtccgtcgagctggatagactgagcgaagaatctgtgaacaacgacatctcctcctggacaaagggcagaagcggagaagctctgagcctcctgaagaaaagattctcccatagacccgtgcaggagaagttcgtgtgcctgaactgcggcttcgagacacacgcagccgagcaagccgccctgaacatcgccagatcctggctgttcctgcggagccaggagtacaagaaataccagacaaacaagacaaccggcaacaccgataagagagccttcgtcgagacctggcagtccttttaccggaagaagcttaaggaggtgtggaaacctgccgtgcggtctggcggatctggcggaggctccaccagccccaagaaaaagagaaaagtctaagctgccttctgcggggcttgccttctggccatgcccttcttctctcccttgcacctgtacctcttggtctttgaataaagcctgagtaggaaggctagcaaaaaaaaaaaaaaaaaaaaaaaaaaaaaaaaaaaaaaaaaaaaaaaaaaaaaaaaaaaaaaaaaaaaaaaaaaaaaaaagcccagccggctccccaacctctaccgaggagggcacctctgagtccgccacccccgagagcggccctggcacctccaccgagcccagcgagggcagcgcacccggcagccctgccggcagccccacctccacagaggagggaaccagcaccgagcccagcgaaggcagcgccccaggcaccagcaccgagcctagtgagcaggagattaaacggatcaacaagatcagaagaagacttgtgaaagacagcaacaccaagaaggccggcaagacaggccccatgaaaaccctgctggttagagtgatgacacccgatctgagagagcggctggaaaacctgagaaagaagcctgaaaatatcccccagcccatcagcaatacatctagagccaacctgaataagctgctgaccgattacaccgaaatgaagaaggcgatcctgcatgtgtactgggaagagttccagaaggaccctgtgggcctgatgagccgggtggcccagcctgccagcaagaagatcgatcagaacaagctgaaacctgagatggacgagaagggcaacctgaccaccgccggctttgcctgctctcagtgtggccagcccctgttcgtgtacaagctggagcaggtgtctgagaagggcaaggcttacaccaactacttcggacggtgcaatgtggccgagcacgaaaagctgatcctgctggcccagctgaagcccgagaaggatagcgacgaagccgtgacatatagcctgggaaagtttgggcagagggccctggatttctacagcattcatgtgaccaaggagtccacccaccccgtgaagcccctggcccagatcgccggaaacagatacgcctccggacctgtgggaaaggccctgagcgacgcatgtatgggcacaatcgcctccttcctgtctaagtaccaggacatcatcatcgaacaccagaaggtggtgaagggcaaccagaagagactggagagcctgcgggagctggccggcaaggaaaacctggaataccctagcgtgaccctgccacctcagcctcacaccaaggagggcgttgatgcctacaacgaagtgatcgcccgggtgcgaatgtgggtgaacctgaacctgtggcagaagctgaagctaagcagagatgatgccaagcctctgctgagactgaagggattcccttcctttcctctggtcgagagacaggccaacgaagtggactggtgggacatggtgtgtaacgtgaagaagctgatcaacgagaaaaaggaggatggcaaggtgttttggcagaatctggctggctacaagagacaggaagccctgagaccatacctgagcagcgaggaagatcggaagaagggaaagaaattcgctcggtaccagctgggcgacctgctgctgcacctggaaaagaagcacggcgaggactggggaaaggtgtacgacgaggcctgggagcggattgacaagaaagtggaaggcctgagcaagcacatcaagctggaagaggaacggagaagcgaggacgcccagagcaaggccgccctgaccgactggctgcgggctaaggccagcttcgtgatcgagggcctgaaggaggccgacaaggacgagttctgcagatgcgagctgaagctgcagaagtggtacggggacctgcggggaaagcccttcgccatcgaagccgagaacagcatcctggacatcagcggcttcagcaagcagtacaactgtgccttcatctggcagaaggacggcgtgaagaagctgaacctgtacctgatcatcaactacttcaagggcggcaagctgcggttcaagaagatcaaacctgaagccttcgaagccaacagattctacaccgtgatcaacaaaaagagcggcgagatcgtgcccatggaggtgaacttcaacttcgacgaccccaacctgatcatcctgcctctggcctttggcaagagacagggcagagaattcatctggaacgacctgctgtccctggaaaccggcagcctgaagctggccaacggaagagtgatcgagaagacactgtacaacagaagaacccggcaggatgagcctgccctgttcgtggccctgaccttcgagcggcgggaggtcctggactcctccaatatcaaaccaatgaacctgatcggcgtggcaagaggcgaaaacatccccgccgtgatcgccctgaccgaccccgagggctgcccactgagccggtttaaggatagcctgggaaacccaacccacatcctgagaatcggcgagagctataaggagaagcagcggaccatccaggccaagaaggaggtggagcagcggagagccggcggctacagccggaagtacgccagcaaagccaagaatctggcagacgatatggtgagaaacaccgctagagatctgctgtactacgccgtgacccaggatgccatgctgatcttcgccaacctgagccggggcttcggccggcagggcaagcggaccttcatggccgagagacagtacacacggatggaggactggctgaccgccaagctggcctacgagggcctgagcaagacctacctgtccaagacactggcccagtacacctccaagacatgcagcaactgtgggtttaccatcaccagcgccgactacgacagggtgctggagaagctgaagaagacagcaacaggctggatgaccacaattaacggcaaggagctgaaggtggagggccagattacctactacaacagatacaagagacagaacgtagtcaaggacctgtccgtcgagctggatagactgagcgaagaatctgtgaacaacgacatctcctcctggacaaagggcagaagcggagaagctctgagcctcctgaagaaaagattctcccatagacccgtgcaggagaagttcgtgtgcctgaactgcggcttcgagacacacgcagccgagcaagccgccctgaacatcgccagatcctggctgttcctgcggagccaggagtacaagaaataccagacaaacaagacaaccggcaacaccgataagagagccttcgtcgagacctggcagtccttttaccggaagaagcttaaggaggtgtggaaacctgccgtgcggtctggcggatctggcggaggctccaccagccccaagaaaaagagaaaagtctaagctgccttctgcggggcttgccttctggccatgcccttcttctctcccttgcacctgtacctcttggtctttgaataaagcctgagtaggaaggctagcaaaaaaaaaaaaaaaaaaaaaaaaaaaaaaaaaaaaaaaaaaaaaaaaaaaaaaaaaaaaaaaaaaaaaaaaaaaaaaaa

SEQ ID NO: 10435 - RNA, 8787 nt, synthetic construct
  source 1..8787: mol_type = other RNA
aggaaataagagagaaaagaagagtaagaagaaatataagagccaccatggcccctaagaagaagcgtaaagtgagccggatgaaccacgaccaggagttcgacccccctaaggtgtaccctcccgtccccgccgagaagagaaagcccatccgggtcctgagcctgttcgatggcatcgccaccggtctgctggtgctgaaggacctgggcatccaggtggataggtacattgcctccgaggtgtgcgaggactccatcaccgtgggaatggtgcgtcatcagggcaagatcatgtacgtgggcgacgtgcggagcgtgacacagaagcatatccaggagtggggccctttcgacctggtgatcggcggcagcccttgcaatgacctgagcatcgtgaacccagcccggaagggcctgtacgagggaaccggcagactgttcttcgagttttacagactgctgcacgacgcccggcctaaggaaggcgacgaccggcccttcttttggctgttcgagaatgtggtggccatgggagtcagcgacaagcgggatattagccggttcctggagagcaaccccgtgatgatcgatgccaaggaagtgagcgccgcccaccgggccagatacttctggggcaatctgcctggcatgaacagacccctggccagcaccgtgaacgacaagctggagctgcaggagtgcctggagcacggccggatcgccaagttcagcaaggtgagaaccatcaccacccgaagcaacagcatcaaacaaggcaaggaccagcactttcctgtgttcatgaacgagaaggaggacatcctgtggtgtaccgagatggagagagtgttcgggttcccagtccactacacagatgtcagcaacatgtctagactggccagacagagactgctgggaagaagctggtccgtccctgtgatcagacacctgttcgcccctctgaaggagtacttcgcctgcgtgagcagcggcaacagcaacgccaacagccggggccccagcttctctagcggcctggtgccactgtccctgagagggagccacatgggccccatggagatctacaaaaccgtgagcgcctggaagcggcagcctgtgcgcgtgctgagcctgtttcggaatatcgataaagtcctgaaaagcctgggattcctggagagcggctctggctccggcggtggcaccctgaagtacgtggaggatgtgacaaacgtggtcagacgggatgtggagaagtggggccccttcgatctggtgtacggcagcacccaacccctgggcagctcttgtgaccggtgccctggctggtacatgtttcagttccaccggatcctgcagtacgccctgccgagacaggagtcccagcggccattcttttggattttcatggacaacttgctgctgaccgaggatgaccaggaaactaccactcggttcctgcagaccgaagccgtgaccctgcaggacgtgagaggccgggactaccagaacgccatgcgggtgtggtccaacatccctggactgaaaagcaagcacgcacctctgacccctaaagaagaggagtacctgcaggcccaggtgcggagcagaagcaagctggacgcccctaaggtggatctgctggtgaagaattgcctcctgcccctgagagagtacttcaagtatttcagccagaatagtctgcccctgggaggcagcggcggcggcggcaaggagctgctgagcttcgaggacgtggccatgtacttcaccagggaggagtggggccacctgaacctgggccagaaggacctgtacagggacgtgatgctggagaactacaggaacatggtgctgctgggcttccagttccccaagcccgaggtgatctgccagctggagaactgggacgagcagtggatcctggacctgcccagggccggcaacaggaaggccagcggcagcgcctgcggcggcccaagcagcggcgcccctcctcccagcggcggcaggcggcccaagcagcggcgcccctcctcccagcggcggcagcccagccggctccccaacctctaccgaggagggcacctctgagtccgccacccccgagagcggccctggcacctccaccgagcccagcgagggcagcgcacccggcagccctgccggcagccccacctccacagaggagggaaccagcaccgagcccagcgaaggcagcgccccaggcaccagcaccgagcctagtgagcaggagattaaacggatcaacaagatcagaagaagacttgtgaaagacagcaacaccaagaaggccggcaagacaggccccatgaaaaccctgctggttagagtgatgacacccgatctgagagagcggctggaaaacctgagaaagaagcctgaaaatatcccccagcccatcagcaatacatctagagccaacctgaataagctgctgaccgattacaccgaaatgaagaaggcgatcctgcatgtgtactgggaagagttccagaaggaccctgtgggcctgatgagccgggtggcccagcctgccagcaagaagatcgatcagaacaagctgaaacctgagatggacgagaagggcaacctgaccaccgccggctttgcctgctctcagtgtggccagcccctgttcgtgtacaagctggagcaggtgtctgagaagggcaaggcttacaccaactacttcggacggtgcaatgtggccgagcacgaaaagctgatcctgctggcccagctgaagcccgagaaggatagcgacgaagccgtgacatatagcctgggaaagtttgggcagagggccctggatttctacagcattcatgtgaccaaggagtccacccaccccgtgaagcccctggcccagatcgccggaaacagatacgcctccggacctgtgggaaaggccctgagcgacgcatgtatgggcacaatcgcctccttcctgtctaagtaccaggacatcatcatcgaacaccagaaggtggtgaagggcaaccagaagagactggagagcctgcgggagctggccggcaaggaaaacctggaataccctagcgtgaccctgccacctcagcctcacaccaaggagggcgttgatgcctacaacgaagtgatcgcccgggtgcgaatgtgggtgaacctgaacctgtggcagaagctgaagctaagcagagatgatgccaagcctctgctgagactgaagggattcccttcctttcctctggtcgagagacaggccaacgaagtggactggtgggacatggtgtgtaacgtgaagaagctgatcaacgagaaaaaggaggatggcaaggtgttttggcagaatctggctggctacaagagacaggaagccctgagaccatacctgagcagcgaggaagatcggaagaagggaaagaaattcgctcggtaccagctgggcgacctgctgctgcacctggaaaagaagcacggcgaggactggggaaaggtgtacgacgaggcctgggagcggattgacaagaaagtggaaggcctgagcaagcacatcaagctggaagaggaacggagaagcgaggacgcccagagcaaggccgccctgaccgactggctgcgggctaaggccagcttcgtgatcgagggcctgaaggaggccgacaaggacgagttctgcagatgcgagctgaagctgcagaagtggtacggggacctgcggggaaagcccttcgccatcgaagccgagaacagcatcctggacatcagcggcttcagcaagcagtacaactgtgccttcatctggcagaaggacggcgtgaagaagctgaacctgtacctgatcatcaactacttcaagggcggcaagctgcggttcaagaagatcaaacctgaagccttcgaagccaacagattctacaccgtgatcaacaaaaagagcggcgagatcgtgcccatggaggtgaacttcaacttcgacgaccccaacctgatcatcctgcctctggcctttggcaagagacagggcagagaattcatctggaacgacctgctgtccctggaaaccggcagcctgaagctggccaacggaagagtgatcgagaagacactgtacaacagaagaacccggcaggatgagcctgccctgttcgtggccctgaccttcgagcggcgggaggtcctggactcctccaatatcaaaccaatgaacctgatcggcgtggcaagaggcgaaaacatccccgccgtgatcgccctgaccgaccccgagggctgcccactgagccggtttaaggatagcctgggaaacccaacccacatcctgagaatcggcgagagctataaggagaagcagcggaccatccaggccaagaaggaggtggagcagcggagagccggcggctacagccggaagtacgccagcaaagccaagaatctggcagacgatatggtgagaaacaccgctagagatctgctgtactacgccgtgacccaggatgccatgctgatcttcgccaacctgagccggggcttcggccggcagggcaagcggaccttcatggccgagagacagtacacacggatggaggactggctgaccgccaagctggcctacgagggcctgagcaagacctacctgtccaagacactggcccagtacacctccaagacatgcagcaactgtgggtttaccatcaccagcgccgactacgacagggtgctggagaagctgaagaagacagcaacaggctggatgaccacaattaacggcaaggagctgaaggtggagggccagattacctactacaacagatacaagagacagaacgtagtcaaggacctgtccgtcgagctggatagactgagcgaagaatctgtgaacaacgacatctcctcctggacaaagggcagaagcggagaagctctgagcctcctgaagaaaagattctcccatagacccgtgcaggagaagttcgtgtgcctgaactgcggcttcgagacacacgcagccgagcaagccgccctgaacatcgccagatcctggctgttcctgcggagccaggagtacaagaaataccagacaaacaagacaaccggcaacaccgataagagagccttcgtcgagacctggcagtccttttaccggaagaagcttaaggaggtgtggaaacctgccgtgcggtctggcggatctggcggaggctccaccagccccaagaaaaagagaaaagtctaagctgccttctgcggggcttgccttctggccatgcccttcttctctcccttgcacctgtacctcttggtctttgaataaagcctgagtaggaaggctagcaaaaaaaaaaaaaaaaaaaaaaaaaaaaaaaaaaaaaaaaaaaaaaaaaaaaaaaaaaaaaaaaaaaaaaaaaaaaaaaagcccagccggctccccaacctctaccgaggagggcacctctgagtccgccacccccgagagcggccctggcacctccaccgagcccagcgagggcagcgcacccggcagccctgccggcagccccacctccacagaggagggaaccagcaccgagcccagcgaaggcagcgccccaggcaccagcaccgagcctagtgagcaggagattaaacggatcaacaagatcagaagaagacttgtgaaagacagcaacaccaagaaggccggcaagacaggccccatgaaaaccctgctggttagagtgatgacacccgatctgagagagcggctggaaaacctgagaaagaagcctgaaaatatcccccagcccatcagcaatacatctagagccaacctgaataagctgctgaccgattacaccgaaatgaagaaggcgatcctgcatgtgtactgggaagagttccagaaggaccctgtgggcctgatgagccgggtggcccagcctgccagcaagaagatcgatcagaacaagctgaaacctgagatggacgagaagggcaacctgaccaccgccggctttgcctgctctcagtgtggccagcccctgttcgtgtacaagctggagcaggtgtctgagaagggcaaggcttacaccaactacttcggacggtgcaatgtggccgagcacgaaaagctgatcctgctggcccagctgaagcccgagaaggatagcgacgaagccgtgacatatagcctgggaaagtttgggcagagggccctggatttctacagcattcatgtgaccaaggagtccacccaccccgtgaagcccctggcccagatcgccggaaacagatacgcctccggacctgtgggaaaggccctgagcgacgcatgtatgggcacaatcgcctccttcctgtctaagtaccaggacatcatcatcgaacaccagaaggtggtgaagggcaaccagaagagactggagagcctgcgggagctggccggcaaggaaaacctggaataccctagcgtgaccctgccacctcagcctcacaccaaggagggcgttgatgcctacaacgaagtgatcgcccgggtgcgaatgtgggtgaacctgaacctgtggcagaagctgaagctaagcagagatgatgccaagcctctgctgagactgaagggattcccttcctttcctctggtcgagagacaggccaacgaagtggactggtgggacatggtgtgtaacgtgaagaagctgatcaacgagaaaaaggaggatggcaaggtgttttggcagaatctggctggctacaagagacaggaagccctgagaccatacctgagcagcgaggaagatcggaagaagggaaagaaattcgctcggtaccagctgggcgacctgctgctgcacctggaaaagaagcacggcgaggactggggaaaggtgtacgacgaggcctgggagcggattgacaagaaagtggaaggcctgagcaagcacatcaagctggaagaggaacggagaagcgaggacgcccagagcaaggccgccctgaccgactggctgcgggctaaggccagcttcgtgatcgagggcctgaaggaggccgacaaggacgagttctgcagatgcgagctgaagctgcagaagtggtacggggacctgcggggaaagcccttcgccatcgaagccgagaacagcatcctggacatcagcggcttcagcaagcagtacaactgtgccttcatctggcagaaggacggcgtgaagaagctgaacctgtacctgatcatcaactacttcaagggcggcaagctgcggttcaagaagatcaaacctgaagccttcgaagccaacagattctacaccgtgatcaacaaaaagagcggcgagatcgtgcccatggaggtgaacttcaacttcgacgaccccaacctgatcatcctgcctctggcctttggcaagagacagggcagagaattcatctggaacgacctgctgtccctggaaaccggcagcctgaagctggccaacggaagagtgatcgagaagacactgtacaacagaagaacccggcaggatgagcctgccctgttcgtggccctgaccttcgagcggcgggaggtcctggactcctccaatatcaaaccaatgaacctgatcggcgtggcaagaggcgaaaacatccccgccgtgatcgccctgaccgaccccgagggctgcccactgagccggtttaaggatagcctgggaaacccaacccacatcctgagaatcggcgagagctataaggagaagcagcggaccatccaggccaagaaggaggtggagcagcggagagccggcggctacagccggaagtacgccagcaaagccaagaatctggcagacgatatggtgagaaacaccgctagagatctgctgtactacgccgtgacccaggatgccatgctgatcttcgccaacctgagccggggcttcggccggcagggcaagcggaccttcatggccgagagacagtacacacggatggaggactggctgaccgccaagctggcctacgagggcctgagcaagacctacctgtccaagacactggcccagtacacctccaagacatgcagcaactgtgggtttaccatcaccagcgccgactacgacagggtgctggagaagctgaagaagacagcaacaggctggatgaccacaattaacggcaaggagctgaaggtggagggccagattacctactacaacagatacaagagacagaacgtagtcaaggacctgtccgtcgagctggatagactgagcgaagaatctgtgaacaacgacatctcctcctggacaaagggcagaagcggagaagctctgagcctcctgaagaaaagattctcccatagacccgtgcaggagaagttcgtgtgcctgaactgcggcttcgagacacacgcagccgagcaagccgccctgaacatcgccagatcctggctgttcctgcggagccaggagtacaagaaataccagacaaacaagacaaccggcaacaccgataagagagccttcgtcgagacctggcagtccttttaccggaagaagcttaaggaggtgtggaaacctgccgtgcggtctggcggatctggcggaggctccaccagccccaagaaaaagagaaaagtctaagctgccttctgcggggcttgccttctggccatgcccttcttctctcccttgcacctgtacctcttggtctttgaataaagcctgagtaggaaggctagcaaaaaaaaaaaaaaaaaaaaaaaaaaaaaaaaaaaaaaaaaaaaaaaaaaaaaaaaaaaaaaaaaaaaaaaaaaaaaaaa

SEQ ID NO: 10436 - RNA, 8787 nt, synthetic construct
  source 1..8787: mol_type = other RNA
aggaaataagagagaaaagaagagtaagaagaaatataagagccaccatggcccctaagaagaagcgtaaagtgagccggatgaaccacgaccaggagttcgacccccctaaggtgtaccctcccgtccccgccgagaagagaaagcccatccgggtcctgagcctgttcgatggcatcgccaccggtctgctggtgctgaaggacctgggcatccaggtggataggtacattgcctccgaggtgtgcgaggactccatcaccgtgggaatggtgcgtcatcagggcaagatcatgtacgtgggcgacgtgcggagcgtgacacagaagcatatccaggagtggggccctttcgacctggtgatcggcggcagcccttgcaatgacctgagcatcgtgaacccagcccggaagggcctgtacgagggaaccggcagactgttcttcgagttttacagactgctgcacgacgcccggcctaaggaaggcgacgaccggcccttcttttggctgttcgagaatgtggtggccatgggagtcagcgacaagcgggatattagccggttcctggagagcaaccccgtgatgatcgatgccaaggaagtgagcgccgcccaccgggccagatacttctggggcaatctgcctggcatgaacagacccctggccagcaccgtgaacgacaagctggagctgcaggagtgcctggagcacggccggatcgccaagttcagcaaggtgagaaccatcaccacccgaagcaacagcatcaaacaaggcaaggaccagcactttcctgtgttcatgaacgagaaggaggacatcctgtggtgtaccgagatggagagagtgttcgggttcccagtccactacacagatgtcagcaacatgtctagactggccagacagagactgctgggaagaagctggtccgtccctgtgatcagacacctgttcgcccctctgaaggagtacttcgcctgcgtgagcagcggcaacagcaacgccaacagccggggccccagcttctctagcggcctggtgccactgtccctgagagggagccacatgggccccatggagatctacaaaaccgtgagcgcctggaagcggcagcctgtgcgcgtgctgagcctgtttcggaatatcgataaagtcctgaaaagcctgggattcctggagagcggctctggctccggcggtggcaccctgaagtacgtggaggatgtgacaaacgtggtcagacgggatgtggagaagtggggccccttcgatctggtgtacggcagcacccaacccctgggcagctcttgtgaccggtgccctggctggtacatgtttcagttccaccggatcctgcagtacgccctgccgagacaggagtcccagcggccattcttttggattttcatggacaacttgctgctgaccgaggatgaccaggaaactaccactcggttcctgcagaccgaagccgtgaccctgcaggacgtgagaggccgggactaccagaacgccatgcgggtgtggtccaacatccctggactgaaaagcaagcacgcacctctgacccctaaagaagaggagtacctgcaggcccaggtgcggagcagaagcaagctggacgcccctaaggtggatctgctggtgaagaattgcctcctgcccctgagagagtacttcaagtatttcagccagaatagtctgcccctgggaggcagcggcggcggccccctggagagcgtgaccttcgaggacgtggccgtggacttcacccaggaggagtggagcctgctggacaagagccagaagaacctgttcaggaacgtgatgctggagaccgtgacccacctggtgagcgtgggctaccagatcagcaagagcgacgtgatcttccagctggagcagggcaaggagctgtggcccgaggccgccggcggcctgcagggccagagccccgacgaggtgacccccggcggcccaagcagcggcgcccctcctcccagcggcggcaggcggcccaagcagcggcgcccctcctcccagcggcggcagcccagccggctccccaacctctaccgaggagggcacctctgagtccgccacccccgagagcggccctggcacctccaccgagcccagcgagggcagcgcacccggcagccctgccggcagccccacctccacagaggagggaaccagcaccgagcccagcgaaggcagcgccccaggcaccagcaccgagcctagtgagcaggagattaaacggatcaacaagatcagaagaagacttgtgaaagacagcaacaccaagaaggccggcaagacaggccccatgaaaaccctgctggttagagtgatgacacccgatctgagagagcggctggaaaacctgagaaagaagcctgaaaatatcccccagcccatcagcaatacatctagagccaacctgaataagctgctgaccgattacaccgaaatgaagaaggcgatcctgcatgtgtactgggaagagttccagaaggaccctgtgggcctgatgagccgggtggcccagcctgccagcaagaagatcgatcagaacaagctgaaacctgagatggacgagaagggcaacctgaccaccgccggctttgcctgctctcagtgtggccagcccctgttcgtgtacaagctggagcaggtgtctgagaagggcaaggcttacaccaactacttcggacggtgcaatgtggccgagcacgaaaagctgatcctgctggcccagctgaagcccgagaaggatagcgacgaagccgtgacatatagcctgggaaagtttgggcagagggccctggatttctacagcattcatgtgaccaaggagtccacccaccccgtgaagcccctggcccagatcgccggaaacagatacgcctccggacctgtgggaaaggccctgagcgacgcatgtatgggcacaatcgcctccttcctgtctaagtaccaggacatcatcatcgaacaccagaaggtggtgaagggcaaccagaagagactggagagcctgcgggagctggccggcaaggaaaacctggaataccctagcgtgaccctgccacctcagcctcacaccaaggagggcgttgatgcctacaacgaagtgatcgcccgggtgcgaatgtgggtgaacctgaacctgtggcagaagctgaagctaagcagagatgatgccaagcctctgctgagactgaagggattcccttcctttcctctggtcgagagacaggccaacgaagtggactggtgggacatggtgtgtaacgtgaagaagctgatcaacgagaaaaaggaggatggcaaggtgttttggcagaatctggctggctacaagagacaggaagccctgagaccatacctgagcagcgaggaagatcggaagaagggaaagaaattcgctcggtaccagctgggcgacctgctgctgcacctggaaaagaagcacggcgaggactggggaaaggtgtacgacgaggcctgggagcggattgacaagaaagtggaaggcctgagcaagcacatcaagctggaagaggaacggagaagcgaggacgcccagagcaaggccgccctgaccgactggctgcgggctaaggccagcttcgtgatcgagggcctgaaggaggccgacaaggacgagttctgcagatgcgagctgaagctgcagaagtggtacggggacctgcggggaaagcccttcgccatcgaagccgagaacagcatcctggacatcagcggcttcagcaagcagtacaactgtgccttcatctggcagaaggacggcgtgaagaagctgaacctgtacctgatcatcaactacttcaagggcggcaagctgcggttcaagaagatcaaacctgaagccttcgaagccaacagattctacaccgtgatcaacaaaaagagcggcgagatcgtgcccatggaggtgaacttcaacttcgacgaccccaacctgatcatcctgcctctggcctttggcaagagacagggcagagaattcatctggaacgacctgctgtccctggaaaccggcagcctgaagctggccaacggaagagtgatcgagaagacactgtacaacagaagaacccggcaggatgagcctgccctgttcgtggccctgaccttcgagcggcgggaggtcctggactcctccaatatcaaaccaatgaacctgatcggcgtggcaagaggcgaaaacatccccgccgtgatcgccctgaccgaccccgagggctgcccactgagccggtttaaggatagcctgggaaacccaacccacatcctgagaatcggcgagagctataaggagaagcagcggaccatccaggccaagaaggaggtggagcagcggagagccggcggctacagccggaagtacgccagcaaagccaagaatctggcagacgatatggtgagaaacaccgctagagatctgctgtactacgccgtgacccaggatgccatgctgatcttcgccaacctgagccggggcttcggccggcagggcaagcggaccttcatggccgagagacagtacacacggatggaggactggctgaccgccaagctggcctacgagggcctgagcaagacctacctgtccaagacactggcccagtacacctccaagacatgcagcaactgtgggtttaccatcaccagcgccgactacgacagggtgctggagaagctgaagaagacagcaacaggctggatgaccacaattaacggcaaggagctgaaggtggagggccagattacctactacaacagatacaagagacagaacgtagtcaaggacctgtccgtcgagctggatagactgagcgaagaatctgtgaacaacgacatctcctcctggacaaagggcagaagcggagaagctctgagcctcctgaagaaaagattctcccatagacccgtgcaggagaagttcgtgtgcctgaactgcggcttcgagacacacgcagccgagcaagccgccctgaacatcgccagatcctggctgttcctgcggagccaggagtacaagaaataccagacaaacaagacaaccggcaacaccgataagagagccttcgtcgagacctggcagtccttttaccggaagaagcttaaggaggtgtggaaacctgccgtgcggtctggcggatctggcggaggctccaccagccccaagaaaaagagaaaagtctaagctgccttctgcggggcttgccttctggccatgcccttcttctctcccttgcacctgtacctcttggtctttgaataaagcctgagtaggaaggctagcaaaaaaaaaaaaaaaaaaaaaaaaaaaaaaaaaaaaaaaaaaaaaaaaaaaaaaaaaaaaaaaaaaaaaaaaaaaaaaaagcccagccggctccccaacctctaccgaggagggcacctctgagtccgccacccccgagagcggccctggcacctccaccgagcccagcgagggcagcgcacccggcagccctgccggcagccccacctccacagaggagggaaccagcaccgagcccagcgaaggcagcgccccaggcaccagcaccgagcctagtgagcaggagattaaacggatcaacaagatcagaagaagacttgtgaaagacagcaacaccaagaaggccggcaagacaggccccatgaaaaccctgctggttagagtgatgacacccgatctgagagagcggctggaaaacctgagaaagaagcctgaaaatatcccccagcccatcagcaatacatctagagccaacctgaataagctgctgaccgattacaccgaaatgaagaaggcgatcctgcatgtgtactgggaagagttccagaaggaccctgtgggcctgatgagccgggtggcccagcctgccagcaagaagatcgatcagaacaagctgaaacctgagatggacgagaagggcaacctgaccaccgccggctttgcctgctctcagtgtggccagcccctgttcgtgtacaagctggagcaggtgtctgagaagggcaaggcttacaccaactacttcggacggtgcaatgtggccgagcacgaaaagctgatcctgctggcccagctgaagcccgagaaggatagcgacgaagccgtgacatatagcctgggaaagtttgggcagagggccctggatttctacagcattcatgtgaccaaggagtccacccaccccgtgaagcccctggcccagatcgccggaaacagatacgcctccggacctgtgggaaaggccctgagcgacgcatgtatgggcacaatcgcctccttcctgtctaagtaccaggacatcatcatcgaacaccagaaggtggtgaagggcaaccagaagagactggagagcctgcgggagctggccggcaaggaaaacctggaataccctagcgtgaccctgccacctcagcctcacaccaaggagggcgttgatgcctacaacgaagtgatcgcccgggtgcgaatgtgggtgaacctgaacctgtggcagaagctgaagctaagcagagatgatgccaagcctctgctgagactgaagggattcccttcctttcctctggtcgagagacaggccaacgaagtggactggtgggacatggtgtgtaacgtgaagaagctgatcaacgagaaaaaggaggatggcaaggtgttttggcagaatctggctggctacaagagacaggaagccctgagaccatacctgagcagcgaggaagatcggaagaagggaaagaaattcgctcggtaccagctgggcgacctgctgctgcacctggaaaagaagcacggcgaggactggggaaaggtgtacgacgaggcctgggagcggattgacaagaaagtggaaggcctgagcaagcacatcaagctggaagaggaacggagaagcgaggacgcccagagcaaggccgccctgaccgactggctgcgggctaaggccagcttcgtgatcgagggcctgaaggaggccgacaaggacgagttctgcagatgcgagctgaagctgcagaagtggtacggggacctgcggggaaagcccttcgccatcgaagccgagaacagcatcctggacatcagcggcttcagcaagcagtacaactgtgccttcatctggcagaaggacggcgtgaagaagctgaacctgtacctgatcatcaactacttcaagggcggcaagctgcggttcaagaagatcaaacctgaagccttcgaagccaacagattctacaccgtgatcaacaaaaagagcggcgagatcgtgcccatggaggtgaacttcaacttcgacgaccccaacctgatcatcctgcctctggcctttggcaagagacagggcagagaattcatctggaacgacctgctgtccctggaaaccggcagcctgaagctggccaacggaagagtgatcgagaagacactgtacaacagaagaacccggcaggatgagcctgccctgttcgtggccctgaccttcgagcggcgggaggtcctggactcctccaatatcaaaccaatgaacctgatcggcgtggcaagaggcgaaaacatccccgccgtgatcgccctgaccgaccccgagggctgcccactgagccggtttaaggatagcctgggaaacccaacccacatcctgagaatcggcgagagctataaggagaagcagcggaccatccaggccaagaaggaggtggagcagcggagagccggcggctacagccggaagtacgccagcaaagccaagaatctggcagacgatatggtgagaaacaccgctagagatctgctgtactacgccgtgacccaggatgccatgctgatcttcgccaacctgagccggggcttcggccggcagggcaagcggaccttcatggccgagagacagtacacacggatggaggactggctgaccgccaagctggcctacgagggcctgagcaagacctacctgtccaagacactggcccagtacacctccaagacatgcagcaactgtgggtttaccatcaccagcgccgactacgacagggtgctggagaagctgaagaagacagcaacaggctggatgaccacaattaacggcaaggagctgaaggtggagggccagattacctactacaacagatacaagagacagaacgtagtcaaggacctgtccgtcgagctggatagactgagcgaagaatctgtgaacaacgacatctcctcctggacaaagggcagaagcggagaagctctgagcctcctgaagaaaagattctcccatagacccgtgcaggagaagttcgtgtgcctgaactgcggcttcgagacacacgcagccgagcaagccgccctgaacatcgccagatcctggctgttcctgcggagccaggagtacaagaaataccagacaaacaagacaaccggcaacaccgataagagagccttcgtcgagacctggcagtccttttaccggaagaagcttaaggaggtgtggaaacctgccgtgcggtctggcggatctggcggaggctccaccagccccaagaaaaagagaaaagtctaagctgccttctgcggggcttgccttctggccatgcccttcttctctcccttgcacctgtacctcttggtctttgaataaagcctgagtaggaaggctagcaaaaaaaaaaaaaaaaaaaaaaaaaaaaaaaaaaaaaaaaaaaaaaaaaaaaaaaaaaaaaaaaaaaaaaaaaaaaaaaa

SEQ ID NO: 10437 - RNA, 8787 nt, synthetic construct
  source 1..8787: mol_type = other RNA
aggaaataagagagaaaagaagagtaagaagaaatataagagccaccatggcccctaagaagaagcgtaaagtgagccggatgaaccacgaccaggagttcgacccccctaaggtgtaccctcccgtccccgccgagaagagaaagcccatccgggtcctgagcctgttcgatggcatcgccaccggtctgctggtgctgaaggacctgggcatccaggtggataggtacattgcctccgaggtgtgcgaggactccatcaccgtgggaatggtgcgtcatcagggcaagatcatgtacgtgggcgacgtgcggagcgtgacacagaagcatatccaggagtggggccctttcgacctggtgatcggcggcagcccttgcaatgacctgagcatcgtgaacccagcccggaagggcctgtacgagggaaccggcagactgttcttcgagttttacagactgctgcacgacgcccggcctaaggaaggcgacgaccggcccttcttttggctgttcgagaatgtggtggccatgggagtcagcgacaagcgggatattagccggttcctggagagcaaccccgtgatgatcgatgccaaggaagtgagcgccgcccaccgggccagatacttctggggcaatctgcctggcatgaacagacccctggccagcaccgtgaacgacaagctggagctgcaggagtgcctggagcacggccggatcgccaagttcagcaaggtgagaaccatcaccacccgaagcaacagcatcaaacaaggcaaggaccagcactttcctgtgttcatgaacgagaaggaggacatcctgtggtgtaccgagatggagagagtgttcgggttcccagtccactacacagatgtcagcaacatgtctagactggccagacagagactgctgggaagaagctggtccgtccctgtgatcagacacctgttcgcccctctgaaggagtacttcgcctgcgtgagcagcggcaacagcaacgccaacagccggggccccagcttctctagcggcctggtgccactgtccctgagagggagccacatgggccccatggagatctacaaaaccgtgagcgcctggaagcggcagcctgtgcgcgtgctgagcctgtttcggaatatcgataaagtcctgaaaagcctgggattcctggagagcggctctggctccggcggtggcaccctgaagtacgtggaggatgtgacaaacgtggtcagacgggatgtggagaagtggggccccttcgatctggtgtacggcagcacccaacccctgggcagctcttgtgaccggtgccctggctggtacatgtttcagttccaccggatcctgcagtacgccctgccgagacaggagtcccagcggccattcttttggattttcatggacaacttgctgctgaccgaggatgaccaggaaactaccactcggttcctgcagaccgaagccgtgaccctgcaggacgtgagaggccgggactaccagaacgccatgcgggtgtggtccaacatccctggactgaaaagcaagcacgcacctctgacccctaaagaagaggagtacctgcaggcccaggtgcggagcagaagcaagctggacgcccctaaggtggatctgctggtgaagaattgcctcctgcccctgagagagtacttcaagtatttcagccagaatagtctgcccctgggaggcagcggcggcggcatggcccagggcctggtgaccttcagggacgtggccatcgagttcagcctggaggagtggaagtgcctggagcccgcccagagggacctgtacagggaggtgaccctggagaacttcggccacctggccagcctgggcctgagcatcagcaagcccgacgtggtgagcctgctggagcagggcaaggagccctggatgatcgccaacgacgtgaccggcccctggtaccccgacctggagagcggcggcccaagcagcggcgcccctcctcccagcggcggcaggcggcccaagcagcggcgcccctcctcccagcggcggcagcccagccggctccccaacctctaccgaggagggcacctctgagtccgccacccccgagagcggccctggcacctccaccgagcccagcgagggcagcgcacccggcagccctgccggcagccccacctccacagaggagggaaccagcaccgagcccagcgaaggcagcgccccaggcaccagcaccgagcctagtgagcaggagattaaacggatcaacaagatcagaagaagacttgtgaaagacagcaacaccaagaaggccggcaagacaggccccatgaaaaccctgctggttagagtgatgacacccgatctgagagagcggctggaaaacctgagaaagaagcctgaaaatatcccccagcccatcagcaatacatctagagccaacctgaataagctgctgaccgattacaccgaaatgaagaaggcgatcctgcatgtgtactgggaagagttccagaaggaccctgtgggcctgatgagccgggtggcccagcctgccagcaagaagatcgatcagaacaagctgaaacctgagatggacgagaagggcaacctgaccaccgccggctttgcctgctctcagtgtggccagcccctgttcgtgtacaagctggagcaggtgtctgagaagggcaaggcttacaccaactacttcggacggtgcaatgtggccgagcacgaaaagctgatcctgctggcccagctgaagcccgagaaggatagcgacgaagccgtgacatatagcctgggaaagtttgggcagagggccctggatttctacagcattcatgtgaccaaggagtccacccaccccgtgaagcccctggcccagatcgccggaaacagatacgcctccggacctgtgggaaaggccctgagcgacgcatgtatgggcacaatcgcctccttcctgtctaagtaccaggacatcatcatcgaacaccagaaggtggtgaagggcaaccagaagagactggagagcctgcgggagctggccggcaaggaaaacctggaataccctagcgtgaccctgccacctcagcctcacaccaaggagggcgttgatgcctacaacgaagtgatcgcccgggtgcgaatgtgggtgaacctgaacctgtggcagaagctgaagctaagcagagatgatgccaagcctctgctgagactgaagggattcccttcctttcctctggtcgagagacaggccaacgaagtggactggtgggacatggtgtgtaacgtgaagaagctgatcaacgagaaaaaggaggatggcaaggtgttttggcagaatctggctggctacaagagacaggaagccctgagaccatacctgagcagcgaggaagatcggaagaagggaaagaaattcgctcggtaccagctgggcgacctgctgctgcacctggaaaagaagcacggcgaggactggggaaaggtgtacgacgaggcctgggagcggattgacaagaaagtggaaggcctgagcaagcacatcaagctggaagaggaacggagaagcgaggacgcccagagcaaggccgccctgaccgactggctgcgggctaaggccagcttcgtgatcgagggcctgaaggaggccgacaaggacgagttctgcagatgcgagctgaagctgcagaagtggtacggggacctgcggggaaagcccttcgccatcgaagccgagaacagcatcctggacatcagcggcttcagcaagcagtacaactgtgccttcatctggcagaaggacggcgtgaagaagctgaacctgtacctgatcatcaactacttcaagggcggcaagctgcggttcaagaagatcaaacctgaagccttcgaagccaacagattctacaccgtgatcaacaaaaagagcggcgagatcgtgcccatggaggtgaacttcaacttcgacgaccccaacctgatcatcctgcctctggcctttggcaagagacagggcagagaattcatctggaacgacctgctgtccctggaaaccggcagcctgaagctggccaacggaagagtgatcgagaagacactgtacaacagaagaacccggcaggatgagcctgccctgttcgtggccctgaccttcgagcggcgggaggtcctggactcctccaatatcaaaccaatgaacctgatcggcgtggcaagaggcgaaaacatccccgccgtgatcgccctgaccgaccccgagggctgcccactgagccggtttaaggatagcctgggaaacccaacccacatcctgagaatcggcgagagctataaggagaagcagcggaccatccaggccaagaaggaggtggagcagcggagagccggcggctacagccggaagtacgccagcaaagccaagaatctggcagacgatatggtgagaaacaccgctagagatctgctgtactacgccgtgacccaggatgccatgctgatcttcgccaacctgagccggggcttcggccggcagggcaagcggaccttcatggccgagagacagtacacacggatggaggactggctgaccgccaagctggcctacgagggcctgagcaagacctacctgtccaagacactggcccagtacacctccaagacatgcagcaactgtgggtttaccatcaccagcgccgactacgacagggtgctggagaagctgaagaagacagcaacaggctggatgaccacaattaacggcaaggagctgaaggtggagggccagattacctactacaacagatacaagagacagaacgtagtcaaggacctgtccgtcgagctggatagactgagcgaagaatctgtgaacaacgacatctcctcctggacaaagggcagaagcggagaagctctgagcctcctgaagaaaagattctcccatagacccgtgcaggagaagttcgtgtgcctgaactgcggcttcgagacacacgcagccgagcaagccgccctgaacatcgccagatcctggctgttcctgcggagccaggagtacaagaaataccagacaaacaagacaaccggcaacaccgataagagagccttcgtcgagacctggcagtccttttaccggaagaagcttaaggaggtgtggaaacctgccgtgcggtctggcggatctggcggaggctccaccagccccaagaaaaagagaaaagtctaagctgccttctgcggggcttgccttctggccatgcccttcttctctcccttgcacctgtacctcttggtctttgaataaagcctgagtaggaaggctagcaaaaaaaaaaaaaaaaaaaaaaaaaaaaaaaaaaaaaaaaaaaaaaaaaaaaaaaaaaaaaaaaaaaaaaaaaaaaaaaagcccagccggctccccaacctctaccgaggagggcacctctgagtccgccacccccgagagcggccctggcacctccaccgagcccagcgagggcagcgcacccggcagccctgccggcagccccacctccacagaggagggaaccagcaccgagcccagcgaaggcagcgccccaggcaccagcaccgagcctagtgagcaggagattaaacggatcaacaagatcagaagaagacttgtgaaagacagcaacaccaagaaggccggcaagacaggccccatgaaaaccctgctggttagagtgatgacacccgatctgagagagcggctggaaaacctgagaaagaagcctgaaaatatcccccagcccatcagcaatacatctagagccaacctgaataagctgctgaccgattacaccgaaatgaagaaggcgatcctgcatgtgtactgggaagagttccagaaggaccctgtgggcctgatgagccgggtggcccagcctgccagcaagaagatcgatcagaacaagctgaaacctgagatggacgagaagggcaacctgaccaccgccggctttgcctgctctcagtgtggccagcccctgttcgtgtacaagctggagcaggtgtctgagaagggcaaggcttacaccaactacttcggacggtgcaatgtggccgagcacgaaaagctgatcctgctggcccagctgaagcccgagaaggatagcgacgaagccgtgacatatagcctgggaaagtttgggcagagggccctggatttctacagcattcatgtgaccaaggagtccacccaccccgtgaagcccctggcccagatcgccggaaacagatacgcctccggacctgtgggaaaggccctgagcgacgcatgtatgggcacaatcgcctccttcctgtctaagtaccaggacatcatcatcgaacaccagaaggtggtgaagggcaaccagaagagactggagagcctgcgggagctggccggcaaggaaaacctggaataccctagcgtgaccctgccacctcagcctcacaccaaggagggcgttgatgcctacaacgaagtgatcgcccgggtgcgaatgtgggtgaacctgaacctgtggcagaagctgaagctaagcagagatgatgccaagcctctgctgagactgaagggattcccttcctttcctctggtcgagagacaggccaacgaagtggactggtgggacatggtgtgtaacgtgaagaagctgatcaacgagaaaaaggaggatggcaaggtgttttggcagaatctggctggctacaagagacaggaagccctgagaccatacctgagcagcgaggaagatcggaagaagggaaagaaattcgctcggtaccagctgggcgacctgctgctgcacctggaaaagaagcacggcgaggactggggaaaggtgtacgacgaggcctgggagcggattgacaagaaagtggaaggcctgagcaagcacatcaagctggaagaggaacggagaagcgaggacgcccagagcaaggccgccctgaccgactggctgcgggctaaggccagcttcgtgatcgagggcctgaaggaggccgacaaggacgagttctgcagatgcgagctgaagctgcagaagtggtacggggacctgcggggaaagcccttcgccatcgaagccgagaacagcatcctggacatcagcggcttcagcaagcagtacaactgtgccttcatctggcagaaggacggcgtgaagaagctgaacctgtacctgatcatcaactacttcaagggcggcaagctgcggttcaagaagatcaaacctgaagccttcgaagccaacagattctacaccgtgatcaacaaaaagagcggcgagatcgtgcccatggaggtgaacttcaacttcgacgaccccaacctgatcatcctgcctctggcctttggcaagagacagggcagagaattcatctggaacgacctgctgtccctggaaaccggcagcctgaagctggccaacggaagagtgatcgagaagacactgtacaacagaagaacccggcaggatgagcctgccctgttcgtggccctgaccttcgagcggcgggaggtcctggactcctccaatatcaaaccaatgaacctgatcggcgtggcaagaggcgaaaacatccccgccgtgatcgccctgaccgaccccgagggctgcccactgagccggtttaaggatagcctgggaaacccaacccacatcctgagaatcggcgagagctataaggagaagcagcggaccatccaggccaagaaggaggtggagcagcggagagccggcggctacagccggaagtacgccagcaaagccaagaatctggcagacgatatggtgagaaacaccgctagagatctgctgtactacgccgtgacccaggatgccatgctgatcttcgccaacctgagccggggcttcggccggcagggcaagcggaccttcatggccgagagacagtacacacggatggaggactggctgaccgccaagctggcctacgagggcctgagcaagacctacctgtccaagacactggcccagtacacctccaagacatgcagcaactgtgggtttaccatcaccagcgccgactacgacagggtgctggagaagctgaagaagacagcaacaggctggatgaccacaattaacggcaaggagctgaaggtggagggccagattacctactacaacagatacaagagacagaacgtagtcaaggacctgtccgtcgagctggatagactgagcgaagaatctgtgaacaacgacatctcctcctggacaaagggcagaagcggagaagctctgagcctcctgaagaaaagattctcccatagacccgtgcaggagaagttcgtgtgcctgaactgcggcttcgagacacacgcagccgagcaagccgccctgaacatcgccagatcctggctgttcctgcggagccaggagtacaagaaataccagacaaacaagacaaccggcaacaccgataagagagccttcgtcgagacctggcagtccttttaccggaagaagcttaaggaggtgtggaaacctgccgtgcggtctggcggatctggcggaggctccaccagccccaagaaaaagagaaaagtctaagctgccttctgcggggcttgccttctggccatgcccttcttctctcccttgcacctgtacctcttggtctttgaataaagcctgagtaggaaggctagcaaaaaaaaaaaaaaaaaaaaaaaaaaaaaaaaaaaaaaaaaaaaaaaaaaaaaaaaaaaaaaaaaaaaaaaaaaaaaaaa

SEQ ID NO: 10438 - RNA, 8787 nt, synthetic construct
  source 1..8787: mol_type = other RNA
aggaaataagagagaaaagaagagtaagaagaaatataagagccaccatggcccctaagaagaagcgtaaagtgagccggatgaaccacgaccaggagttcgacccccctaaggtgtaccctcccgtccccgccgagaagagaaagcccatccgggtcctgagcctgttcgatggcatcgccaccggtctgctggtgctgaaggacctgggcatccaggtggataggtacattgcctccgaggtgtgcgaggactccatcaccgtgggaatggtgcgtcatcagggcaagatcatgtacgtgggcgacgtgcggagcgtgacacagaagcatatccaggagtggggccctttcgacctggtgatcggcggcagcccttgcaatgacctgagcatcgtgaacccagcccggaagggcctgtacgagggaaccggcagactgttcttcgagttttacagactgctgcacgacgcccggcctaaggaaggcgacgaccggcccttcttttggctgttcgagaatgtggtggccatgggagtcagcgacaagcgggatattagccggttcctggagagcaaccccgtgatgatcgatgccaaggaagtgagcgccgcccaccgggccagatacttctggggcaatctgcctggcatgaacagacccctggccagcaccgtgaacgacaagctggagctgcaggagtgcctggagcacggccggatcgccaagttcagcaaggtgagaaccatcaccacccgaagcaacagcatcaaacaaggcaaggaccagcactttcctgtgttcatgaacgagaaggaggacatcctgtggtgtaccgagatggagagagtgttcgggttcccagtccactacacagatgtcagcaacatgtctagactggccagacagagactgctgggaagaagctggtccgtccctgtgatcagacacctgttcgcccctctgaaggagtacttcgcctgcgtgagcagcggcaacagcaacgccaacagccggggccccagcttctctagcggcctggtgccactgtccctgagagggagccacatgggccccatggagatctacaaaaccgtgagcgcctggaagcggcagcctgtgcgcgtgctgagcctgtttcggaatatcgataaagtcctgaaaagcctgggattcctggagagcggctctggctccggcggtggcaccctgaagtacgtggaggatgtgacaaacgtggtcagacgggatgtggagaagtggggccccttcgatctggtgtacggcagcacccaacccctgggcagctcttgtgaccggtgccctggctggtacatgtttcagttccaccggatcctgcagtacgccctgccgagacaggagtcccagcggccattcttttggattttcatggacaacttgctgctgaccgaggatgaccaggaaactaccactcggttcctgcagaccgaagccgtgaccctgcaggacgtgagaggccgggactaccagaacgccatgcgggtgtggtccaacatccctggactgaaaagcaagcacgcacctctgacccctaaagaagaggagtacctgcaggcccaggtgcggagcagaagcaagctggacgcccctaaggtggatctgctggtgaagaattgcctcctgcccctgagagagtacttcaagtatttcagccagaatagtctgcccctgggaggcagcggcggcggcgcccagaaggtgctgaccttcagggacgtggccatcgagttcagcctggaggagtggaagttcctggaccccgcccagcagaacctgtacagggacgtgatgctggagaactacaggaacctgttcagcatcggcctgaccgtgagcaagcccggcctgatcacctgcctggagcagaggaaggccccctggaacctgaagaggagggaggccgtggacggccacatcttcttcgccgagtacggcggcccaagcagcggcgcccctcctcccagcggcggcaggcggcccaagcagcggcgcccctcctcccagcggcggcagcccagccggctccccaacctctaccgaggagggcacctctgagtccgccacccccgagagcggccctggcacctccaccgagcccagcgagggcagcgcacccggcagccctgccggcagccccacctccacagaggagggaaccagcaccgagcccagcgaaggcagcgccccaggcaccagcaccgagcctagtgagcaggagattaaacggatcaacaagatcagaagaagacttgtgaaagacagcaacaccaagaaggccggcaagacaggccccatgaaaaccctgctggttagagtgatgacacccgatctgagagagcggctggaaaacctgagaaagaagcctgaaaatatcccccagcccatcagcaatacatctagagccaacctgaataagctgctgaccgattacaccgaaatgaagaaggcgatcctgcatgtgtactgggaagagttccagaaggaccctgtgggcctgatgagccgggtggcccagcctgccagcaagaagatcgatcagaacaagctgaaacctgagatggacgagaagggcaacctgaccaccgccggctttgcctgctctcagtgtggccagcccctgttcgtgtacaagctggagcaggtgtctgagaagggcaaggcttacaccaactacttcggacggtgcaatgtggccgagcacgaaaagctgatcctgctggcccagctgaagcccgagaaggatagcgacgaagccgtgacatatagcctgggaaagtttgggcagagggccctggatttctacagcattcatgtgaccaaggagtccacccaccccgtgaagcccctggcccagatcgccggaaacagatacgcctccggacctgtgggaaaggccctgagcgacgcatgtatgggcacaatcgcctccttcctgtctaagtaccaggacatcatcatcgaacaccagaaggtggtgaagggcaaccagaagagactggagagcctgcgggagctggccggcaaggaaaacctggaataccctagcgtgaccctgccacctcagcctcacaccaaggagggcgttgatgcctacaacgaagtgatcgcccgggtgcgaatgtgggtgaacctgaacctgtggcagaagctgaagctaagcagagatgatgccaagcctctgctgagactgaagggattcccttcctttcctctggtcgagagacaggccaacgaagtggactggtgggacatggtgtgtaacgtgaagaagctgatcaacgagaaaaaggaggatggcaaggtgttttggcagaatctggctggctacaagagacaggaagccctgagaccatacctgagcagcgaggaagatcggaagaagggaaagaaattcgctcggtaccagctgggcgacctgctgctgcacctggaaaagaagcacggcgaggactggggaaaggtgtacgacgaggcctgggagcggattgacaagaaagtggaaggcctgagcaagcacatcaagctggaagaggaacggagaagcgaggacgcccagagcaaggccgccctgaccgactggctgcgggctaaggccagcttcgtgatcgagggcctgaaggaggccgacaaggacgagttctgcagatgcgagctgaagctgcagaagtggtacggggacctgcggggaaagcccttcgccatcgaagccgagaacagcatcctggacatcagcggcttcagcaagcagtacaactgtgccttcatctggcagaaggacggcgtgaagaagctgaacctgtacctgatcatcaactacttcaagggcggcaagctgcggttcaagaagatcaaacctgaagccttcgaagccaacagattctacaccgtgatcaacaaaaagagcggcgagatcgtgcccatggaggtgaacttcaacttcgacgaccccaacctgatcatcctgcctctggcctttggcaagagacagggcagagaattcatctggaacgacctgctgtccctggaaaccggcagcctgaagctggccaacggaagagtgatcgagaagacactgtacaacagaagaacccggcaggatgagcctgccctgttcgtggccctgaccttcgagcggcgggaggtcctggactcctccaatatcaaaccaatgaacctgatcggcgtggcaagaggcgaaaacatccccgccgtgatcgccctgaccgaccccgagggctgcccactgagccggtttaaggatagcctgggaaacccaacccacatcctgagaatcggcgagagctataaggagaagcagcggaccatccaggccaagaaggaggtggagcagcggagagccggcggctacagccggaagtacgccagcaaagccaagaatctggcagacgatatggtgagaaacaccgctagagatctgctgtactacgccgtgacccaggatgccatgctgatcttcgccaacctgagccggggcttcggccggcagggcaagcggaccttcatggccgagagacagtacacacggatggaggactggctgaccgccaagctggcctacgagggcctgagcaagacctacctgtccaagacactggcccagtacacctccaagacatgcagcaactgtgggtttaccatcaccagcgccgactacgacagggtgctggagaagctgaagaagacagcaacaggctggatgaccacaattaacggcaaggagctgaaggtggagggccagattacctactacaacagatacaagagacagaacgtagtcaaggacctgtccgtcgagctggatagactgagcgaagaatctgtgaacaacgacatctcctcctggacaaagggcagaagcggagaagctctgagcctcctgaagaaaagattctcccatagacccgtgcaggagaagttcgtgtgcctgaactgcggcttcgagacacacgcagccgagcaagccgccctgaacatcgccagatcctggctgttcctgcggagccaggagtacaagaaataccagacaaacaagacaaccggcaacaccgataagagagccttcgtcgagacctggcagtccttttaccggaagaagcttaaggaggtgtggaaacctgccgtgcggtctggcggatctggcggaggctccaccagccccaagaaaaagagaaaagtctaagctgccttctgcggggcttgccttctggccatgcccttcttctctcccttgcacctgtacctcttggtctttgaataaagcctgagtaggaaggctagcaaaaaaaaaaaaaaaaaaaaaaaaaaaaaaaaaaaaaaaaaaaaaaaaaaaaaaaaaaaaaaaaaaaaaaaaaaaaaaaagcccagccggctccccaacctctaccgaggagggcacctctgagtccgccacccccgagagcggccctggcacctccaccgagcccagcgagggcagcgcacccggcagccctgccggcagccccacctccacagaggagggaaccagcaccgagcccagcgaaggcagcgccccaggcaccagcaccgagcctagtgagcaggagattaaacggatcaacaagatcagaagaagacttgtgaaagacagcaacaccaagaaggccggcaagacaggccccatgaaaaccctgctggttagagtgatgacacccgatctgagagagcggctggaaaacctgagaaagaagcctgaaaatatcccccagcccatcagcaatacatctagagccaacctgaataagctgctgaccgattacaccgaaatgaagaaggcgatcctgcatgtgtactgggaagagttccagaaggaccctgtgggcctgatgagccgggtggcccagcctgccagcaagaagatcgatcagaacaagctgaaacctgagatggacgagaagggcaacctgaccaccgccggctttgcctgctctcagtgtggccagcccctgttcgtgtacaagctggagcaggtgtctgagaagggcaaggcttacaccaactacttcggacggtgcaatgtggccgagcacgaaaagctgatcctgctggcccagctgaagcccgagaaggatagcgacgaagccgtgacatatagcctgggaaagtttgggcagagggccctggatttctacagcattcatgtgaccaaggagtccacccaccccgtgaagcccctggcccagatcgccggaaacagatacgcctccggacctgtgggaaaggccctgagcgacgcatgtatgggcacaatcgcctccttcctgtctaagtaccaggacatcatcatcgaacaccagaaggtggtgaagggcaaccagaagagactggagagcctgcgggagctggccggcaaggaaaacctggaataccctagcgtgaccctgccacctcagcctcacaccaaggagggcgttgatgcctacaacgaagtgatcgcccgggtgcgaatgtgggtgaacctgaacctgtggcagaagctgaagctaagcagagatgatgccaagcctctgctgagactgaagggattcccttcctttcctctggtcgagagacaggccaacgaagtggactggtgggacatggtgtgtaacgtgaagaagctgatcaacgagaaaaaggaggatggcaaggtgttttggcagaatctggctggctacaagagacaggaagccctgagaccatacctgagcagcgaggaagatcggaagaagggaaagaaattcgctcggtaccagctgggcgacctgctgctgcacctggaaaagaagcacggcgaggactggggaaaggtgtacgacgaggcctgggagcggattgacaagaaagtggaaggcctgagcaagcacatcaagctggaagaggaacggagaagcgaggacgcccagagcaaggccgccctgaccgactggctgcgggctaaggccagcttcgtgatcgagggcctgaaggaggccgacaaggacgagttctgcagatgcgagctgaagctgcagaagtggtacggggacctgcggggaaagcccttcgccatcgaagccgagaacagcatcctggacatcagcggcttcagcaagcagtacaactgtgccttcatctggcagaaggacggcgtgaagaagctgaacctgtacctgatcatcaactacttcaagggcggcaagctgcggttcaagaagatcaaacctgaagccttcgaagccaacagattctacaccgtgatcaacaaaaagagcggcgagatcgtgcccatggaggtgaacttcaacttcgacgaccccaacctgatcatcctgcctctggcctttggcaagagacagggcagagaattcatctggaacgacctgctgtccctggaaaccggcagcctgaagctggccaacggaagagtgatcgagaagacactgtacaacagaagaacccggcaggatgagcctgccctgttcgtggccctgaccttcgagcggcgggaggtcctggactcctccaatatcaaaccaatgaacctgatcggcgtggcaagaggcgaaaacatccccgccgtgatcgccctgaccgaccccgagggctgcccactgagccggtttaaggatagcctgggaaacccaacccacatcctgagaatcggcgagagctataaggagaagcagcggaccatccaggccaagaaggaggtggagcagcggagagccggcggctacagccggaagtacgccagcaaagccaagaatctggcagacgatatggtgagaaacaccgctagagatctgctgtactacgccgtgacccaggatgccatgctgatcttcgccaacctgagccggggcttcggccggcagggcaagcggaccttcatggccgagagacagtacacacggatggaggactggctgaccgccaagctggcctacgagggcctgagcaagacctacctgtccaagacactggcccagtacacctccaagacatgcagcaactgtgggtttaccatcaccagcgccgactacgacagggtgctggagaagctgaagaagacagcaacaggctggatgaccacaattaacggcaaggagctgaaggtggagggccagattacctactacaacagatacaagagacagaacgtagtcaaggacctgtccgtcgagctggatagactgagcgaagaatctgtgaacaacgacatctcctcctggacaaagggcagaagcggagaagctctgagcctcctgaagaaaagattctcccatagacccgtgcaggagaagttcgtgtgcctgaactgcggcttcgagacacacgcagccgagcaagccgccctgaacatcgccagatcctggctgttcctgcggagccaggagtacaagaaataccagacaaacaagacaaccggcaacaccgataagagagccttcgtcgagacctggcagtccttttaccggaagaagcttaaggaggtgtggaaacctgccgtgcggtctggcggatctggcggaggctccaccagccccaagaaaaagagaaaagtctaagctgccttctgcggggcttgccttctggccatgcccttcttctctcccttgcacctgtacctcttggtctttgaataaagcctgagtaggaaggctagcaaaaaaaaaaaaaaaaaaaaaaaaaaaaaaaaaaaaaaaaaaaaaaaaaaaaaaaaaaaaaaaaaaaaaaaaaaaaaaaa

SEQ ID NO: 10439 - RNA, 8787 nt, synthetic construct
  source 1..8787: mol_type = other RNA
aggaaataagagagaaaagaagagtaagaagaaatataagagccaccatggcccctaagaagaagcgtaaagtgagccggatgaaccacgaccaggagttcgacccccctaaggtgtaccctcccgtccccgccgagaagagaaagcccatccgggtcctgagcctgttcgatggcatcgccaccggtctgctggtgctgaaggacctgggcatccaggtggataggtacattgcctccgaggtgtgcgaggactccatcaccgtgggaatggtgcgtcatcagggcaagatcatgtacgtgggcgacgtgcggagcgtgacacagaagcatatccaggagtggggccctttcgacctggtgatcggcggcagcccttgcaatgacctgagcatcgtgaacccagcccggaagggcctgtacgagggaaccggcagactgttcttcgagttttacagactgctgcacgacgcccggcctaaggaaggcgacgaccggcccttcttttggctgttcgagaatgtggtggccatgggagtcagcgacaagcgggatattagccggttcctggagagcaaccccgtgatgatcgatgccaaggaagtgagcgccgcccaccgggccagatacttctggggcaatctgcctggcatgaacagacccctggccagcaccgtgaacgacaagctggagctgcaggagtgcctggagcacggccggatcgccaagttcagcaaggtgagaaccatcaccacccgaagcaacagcatcaaacaaggcaaggaccagcactttcctgtgttcatgaacgagaaggaggacatcctgtggtgtaccgagatggagagagtgttcgggttcccagtccactacacagatgtcagcaacatgtctagactggccagacagagactgctgggaagaagctggtccgtccctgtgatcagacacctgttcgcccctctgaaggagtacttcgcctgcgtgagcagcggcaacagcaacgccaacagccggggccccagcttctctagcggcctggtgccactgtccctgagagggagccacatgggccccatggagatctacaaaaccgtgagcgcctggaagcggcagcctgtgcgcgtgctgagcctgtttcggaatatcgataaagtcctgaaaagcctgggattcctggagagcggctctggctccggcggtggcaccctgaagtacgtggaggatgtgacaaacgtggtcagacgggatgtggagaagtggggccccttcgatctggtgtacggcagcacccaacccctgggcagctcttgtgaccggtgccctggctggtacatgtttcagttccaccggatcctgcagtacgccctgccgagacaggagtcccagcggccattcttttggattttcatggacaacttgctgctgaccgaggatgaccaggaaactaccactcggttcctgcagaccgaagccgtgaccctgcaggacgtgagaggccgggactaccagaacgccatgcgggtgtggtccaacatccctggactgaaaagcaagcacgcacctctgacccctaaagaagaggagtacctgcaggcccaggtgcggagcagaagcaagctggacgcccctaaggtggatctgctggtgaagaattgcctcctgcccctgagagagtacttcaagtatttcagccagaatagtctgcccctgggaggcagcggcggcggcaccatgaccaccgtgagcagcaccgccaggccccaggagagcgtggccttcgacgacgtggccgtgtacttcaccaagaaggagtgggccatcatggtgcccgaccagagggccctgtacagggacgtgatgctggagaactacgaggccgtggccttcgtggtgccccccaccagcaagcccgccctgatcagccacctggagcagggcaaggagccctgcttcacccagccccagggcgtgggcggcccaagcagcggcgcccctcctcccagcggcggcaggcggcccaagcagcggcgcccctcctcccagcggcggcagcccagccggctccccaacctctaccgaggagggcacctctgagtccgccacccccgagagcggccctggcacctccaccgagcccagcgagggcagcgcacccggcagccctgccggcagccccacctccacagaggagggaaccagcaccgagcccagcgaaggcagcgccccaggcaccagcaccgagcctagtgagcaggagattaaacggatcaacaagatcagaagaagacttgtgaaagacagcaacaccaagaaggccggcaagacaggccccatgaaaaccctgctggttagagtgatgacacccgatctgagagagcggctggaaaacctgagaaagaagcctgaaaatatcccccagcccatcagcaatacatctagagccaacctgaataagctgctgaccgattacaccgaaatgaagaaggcgatcctgcatgtgtactgggaagagttccagaaggaccctgtgggcctgatgagccgggtggcccagcctgccagcaagaagatcgatcagaacaagctgaaacctgagatggacgagaagggcaacctgaccaccgccggctttgcctgctctcagtgtggccagcccctgttcgtgtacaagctggagcaggtgtctgagaagggcaaggcttacaccaactacttcggacggtgcaatgtggccgagcacgaaaagctgatcctgctggcccagctgaagcccgagaaggatagcgacgaagccgtgacatatagcctgggaaagtttgggcagagggccctggatttctacagcattcatgtgaccaaggagtccacccaccccgtgaagcccctggcccagatcgccggaaacagatacgcctccggacctgtgggaaaggccctgagcgacgcatgtatgggcacaatcgcctccttcctgtctaagtaccaggacatcatcatcgaacaccagaaggtggtgaagggcaaccagaagagactggagagcctgcgggagctggccggcaaggaaaacctggaataccctagcgtgaccctgccacctcagcctcacaccaaggagggcgttgatgcctacaacgaagtgatcgcccgggtgcgaatgtgggtgaacctgaacctgtggcagaagctgaagctaagcagagatgatgccaagcctctgctgagactgaagggattcccttcctttcctctggtcgagagacaggccaacgaagtggactggtgggacatggtgtgtaacgtgaagaagctgatcaacgagaaaaaggaggatggcaaggtgttttggcagaatctggctggctacaagagacaggaagccctgagaccatacctgagcagcgaggaagatcggaagaagggaaagaaattcgctcggtaccagctgggcgacctgctgctgcacctggaaaagaagcacggcgaggactggggaaaggtgtacgacgaggcctgggagcggattgacaagaaagtggaaggcctgagcaagcacatcaagctggaagaggaacggagaagcgaggacgcccagagcaaggccgccctgaccgactggctgcgggctaaggccagcttcgtgatcgagggcctgaaggaggccgacaaggacgagttctgcagatgcgagctgaagctgcagaagtggtacggggacctgcggggaaagcccttcgccatcgaagccgagaacagcatcctggacatcagcggcttcagcaagcagtacaactgtgccttcatctggcagaaggacggcgtgaagaagctgaacctgtacctgatcatcaactacttcaagggcggcaagctgcggttcaagaagatcaaacctgaagccttcgaagccaacagattctacaccgtgatcaacaaaaagagcggcgagatcgtgcccatggaggtgaacttcaacttcgacgaccccaacctgatcatcctgcctctggcctttggcaagagacagggcagagaattcatctggaacgacctgctgtccctggaaaccggcagcctgaagctggccaacggaagagtgatcgagaagacactgtacaacagaagaacccggcaggatgagcctgccctgttcgtggccctgaccttcgagcggcgggaggtcctggactcctccaatatcaaaccaatgaacctgatcggcgtggcaagaggcgaaaacatccccgccgtgatcgccctgaccgaccccgagggctgcccactgagccggtttaaggatagcctgggaaacccaacccacatcctgagaatcggcgagagctataaggagaagcagcggaccatccaggccaagaaggaggtggagcagcggagagccggcggctacagccggaagtacgccagcaaagccaagaatctggcagacgatatggtgagaaacaccgctagagatctgctgtactacgccgtgacccaggatgccatgctgatcttcgccaacctgagccggggcttcggccggcagggcaagcggaccttcatggccgagagacagtacacacggatggaggactggctgaccgccaagctggcctacgagggcctgagcaagacctacctgtccaagacactggcccagtacacctccaagacatgcagcaactgtgggtttaccatcaccagcgccgactacgacagggtgctggagaagctgaagaagacagcaacaggctggatgaccacaattaacggcaaggagctgaaggtggagggccagattacctactacaacagatacaagagacagaacgtagtcaaggacctgtccgtcgagctggatagactgagcgaagaatctgtgaacaacgacatctcctcctggacaaagggcagaagcggagaagctctgagcctcctgaagaaaagattctcccatagacccgtgcaggagaagttcgtgtgcctgaactgcggcttcgagacacacgcagccgagcaagccgccctgaacatcgccagatcctggctgttcctgcggagccaggagtacaagaaataccagacaaacaagacaaccggcaacaccgataagagagccttcgtcgagacctggcagtccttttaccggaagaagcttaaggaggtgtggaaacctgccgtgcggtctggcggatctggcggaggctccaccagccccaagaaaaagagaaaagtctaagctgccttctgcggggcttgccttctggccatgcccttcttctctcccttgcacctgtacctcttggtctttgaataaagcctgagtaggaaggctagcaaaaaaaaaaaaaaaaaaaaaaaaaaaaaaaaaaaaaaaaaaaaaaaaaaaaaaaaaaaaaaaaaaaaaaaaaaaaaaaagcccagccggctccccaacctctaccgaggagggcacctctgagtccgccacccccgagagcggccctggcacctccaccgagcccagcgagggcagcgcacccggcagccctgccggcagccccacctccacagaggagggaaccagcaccgagcccagcgaaggcagcgccccaggcaccagcaccgagcctagtgagcaggagattaaacggatcaacaagatcagaagaagacttgtgaaagacagcaacaccaagaaggccggcaagacaggccccatgaaaaccctgctggttagagtgatgacacccgatctgagagagcggctggaaaacctgagaaagaagcctgaaaatatcccccagcccatcagcaatacatctagagccaacctgaataagctgctgaccgattacaccgaaatgaagaaggcgatcctgcatgtgtactgggaagagttccagaaggaccctgtgggcctgatgagccgggtggcccagcctgccagcaagaagatcgatcagaacaagctgaaacctgagatggacgagaagggcaacctgaccaccgccggctttgcctgctctcagtgtggccagcccctgttcgtgtacaagctggagcaggtgtctgagaagggcaaggcttacaccaactacttcggacggtgcaatgtggccgagcacgaaaagctgatcctgctggcccagctgaagcccgagaaggatagcgacgaagccgtgacatatagcctgggaaagtttgggcagagggccctggatttctacagcattcatgtgaccaaggagtccacccaccccgtgaagcccctggcccagatcgccggaaacagatacgcctccggacctgtgggaaaggccctgagcgacgcatgtatgggcacaatcgcctccttcctgtctaagtaccaggacatcatcatcgaacaccagaaggtggtgaagggcaaccagaagagactggagagcctgcgggagctggccggcaaggaaaacctggaataccctagcgtgaccctgccacctcagcctcacaccaaggagggcgttgatgcctacaacgaagtgatcgcccgggtgcgaatgtgggtgaacctgaacctgtggcagaagctgaagctaagcagagatgatgccaagcctctgctgagactgaagggattcccttcctttcctctggtcgagagacaggccaacgaagtggactggtgggacatggtgtgtaacgtgaagaagctgatcaacgagaaaaaggaggatggcaaggtgttttggcagaatctggctggctacaagagacaggaagccctgagaccatacctgagcagcgaggaagatcggaagaagggaaagaaattcgctcggtaccagctgggcgacctgctgctgcacctggaaaagaagcacggcgaggactggggaaaggtgtacgacgaggcctgggagcggattgacaagaaagtggaaggcctgagcaagcacatcaagctggaagaggaacggagaagcgaggacgcccagagcaaggccgccctgaccgactggctgcgggctaaggccagcttcgtgatcgagggcctgaaggaggccgacaaggacgagttctgcagatgcgagctgaagctgcagaagtggtacggggacctgcggggaaagcccttcgccatcgaagccgagaacagcatcctggacatcagcggcttcagcaagcagtacaactgtgccttcatctggcagaaggacggcgtgaagaagctgaacctgtacctgatcatcaactacttcaagggcggcaagctgcggttcaagaagatcaaacctgaagccttcgaagccaacagattctacaccgtgatcaacaaaaagagcggcgagatcgtgcccatggaggtgaacttcaacttcgacgaccccaacctgatcatcctgcctctggcctttggcaagagacagggcagagaattcatctggaacgacctgctgtccctggaaaccggcagcctgaagctggccaacggaagagtgatcgagaagacactgtacaacagaagaacccggcaggatgagcctgccctgttcgtggccctgaccttcgagcggcgggaggtcctggactcctccaatatcaaaccaatgaacctgatcggcgtggcaagaggcgaaaacatccccgccgtgatcgccctgaccgaccccgagggctgcccactgagccggtttaaggatagcctgggaaacccaacccacatcctgagaatcggcgagagctataaggagaagcagcggaccatccaggccaagaaggaggtggagcagcggagagccggcggctacagccggaagtacgccagcaaagccaagaatctggcagacgatatggtgagaaacaccgctagagatctgctgtactacgccgtgacccaggatgccatgctgatcttcgccaacctgagccggggcttcggccggcagggcaagcggaccttcatggccgagagacagtacacacggatggaggactggctgaccgccaagctggcctacgagggcctgagcaagacctacctgtccaagacactggcccagtacacctccaagacatgcagcaactgtgggtttaccatcaccagcgccgactacgacagggtgctggagaagctgaagaagacagcaacaggctggatgaccacaattaacggcaaggagctgaaggtggagggccagattacctactacaacagatacaagagacagaacgtagtcaaggacctgtccgtcgagctggatagactgagcgaagaatctgtgaacaacgacatctcctcctggacaaagggcagaagcggagaagctctgagcctcctgaagaaaagattctcccatagacccgtgcaggagaagttcgtgtgcctgaactgcggcttcgagacacacgcagccgagcaagccgccctgaacatcgccagatcctggctgttcctgcggagccaggagtacaagaaataccagacaaacaagacaaccggcaacaccgataagagagccttcgtcgagacctggcagtccttttaccggaagaagcttaaggaggtgtggaaacctgccgtgcggtctggcggatctggcggaggctccaccagccccaagaaaaagagaaaagtctaagctgccttctgcggggcttgccttctggccatgcccttcttctctcccttgcacctgtacctcttggtctttgaataaagcctgagtaggaaggctagcaaaaaaaaaaaaaaaaaaaaaaaaaaaaaaaaaaaaaaaaaaaaaaaaaaaaaaaaaaaaaaaaaaaaaaaaaaaaaaaa

SEQ ID NO: 10440 - RNA, 8787 nt, synthetic construct
  source 1..8787: mol_type = other RNA
aggaaataagagagaaaagaagagtaagaagaaatataagagccaccatggcccctaagaagaagcgtaaagtgagccggatgaaccacgaccaggagttcgacccccctaaggtgtaccctcccgtccccgccgagaagagaaagcccatccgggtcctgagcctgttcgatggcatcgccaccggtctgctggtgctgaaggacctgggcatccaggtggataggtacattgcctccgaggtgtgcgaggactccatcaccgtgggaatggtgcgtcatcagggcaagatcatgtacgtgggcgacgtgcggagcgtgacacagaagcatatccaggagtggggccctttcgacctggtgatcggcggcagcccttgcaatgacctgagcatcgtgaacccagcccggaagggcctgtacgagggaaccggcagactgttcttcgagttttacagactgctgcacgacgcccggcctaaggaaggcgacgaccggcccttcttttggctgttcgagaatgtggtggccatgggagtcagcgacaagcgggatattagccggttcctggagagcaaccccgtgatgatcgatgccaaggaagtgagcgccgcccaccgggccagatacttctggggcaatctgcctggcatgaacagacccctggccagcaccgtgaacgacaagctggagctgcaggagtgcctggagcacggccggatcgccaagttcagcaaggtgagaaccatcaccacccgaagcaacagcatcaaacaaggcaaggaccagcactttcctgtgttcatgaacgagaaggaggacatcctgtggtgtaccgagatggagagagtgttcgggttcccagtccactacacagatgtcagcaacatgtctagactggccagacagagactgctgggaagaagctggtccgtccctgtgatcagacacctgttcgcccctctgaaggagtacttcgcctgcgtgagcagcggcaacagcaacgccaacagccggggccccagcttctctagcggcctggtgccactgtccctgagagggagccacatgggccccatggagatctacaaaaccgtgagcgcctggaagcggcagcctgtgcgcgtgctgagcctgtttcggaatatcgataaagtcctgaaaagcctgggattcctggagagcggctctggctccggcggtggcaccctgaagtacgtggaggatgtgacaaacgtggtcagacgggatgtggagaagtggggccccttcgatctggtgtacggcagcacccaacccctgggcagctcttgtgaccggtgccctggctggtacatgtttcagttccaccggatcctgcagtacgccctgccgagacaggagtcccagcggccattcttttggattttcatggacaacttgctgctgaccgaggatgaccaggaaactaccactcggttcctgcagaccgaagccgtgaccctgcaggacgtgagaggccgggactaccagaacgccatgcgggtgtggtccaacatccctggactgaaaagcaagcacgcacctctgacccctaaagaagaggagtacctgcaggcccaggtgcggagcagaagcaagctggacgcccctaaggtggatctgctggtgaagaattgcctcctgcccctgagagagtacttcaagtatttcagccagaatagtctgcccctgggaggcagcggcggcggcatgagccaggtgaccttcagcgacgtggccatcgacttcagccacgaggagtgggcctgcctggacagcgcccagagggacctgtacaaggacgtgatggtgcagaactacgagaacctggtgagcgtgggcctgagcgtgaccaagccctacgtgatcatgctgctggaggacggcaaggagccctggatgatggagaagaagctgagcaaggactgggagagcaggtgggagaacaaggagggcggcccaagcagcggcgcccctcctcccagcggcggcaggcggcccaagcagcggcgcccctcctcccagcggcggcagcccagccggctccccaacctctaccgaggagggcacctctgagtccgccacccccgagagcggccctggcacctccaccgagcccagcgagggcagcgcacccggcagccctgccggcagccccacctccacagaggagggaaccagcaccgagcccagcgaaggcagcgccccaggcaccagcaccgagcctagtgagcaggagattaaacggatcaacaagatcagaagaagacttgtgaaagacagcaacaccaagaaggccggcaagacaggccccatgaaaaccctgctggttagagtgatgacacccgatctgagagagcggctggaaaacctgagaaagaagcctgaaaatatcccccagcccatcagcaatacatctagagccaacctgaataagctgctgaccgattacaccgaaatgaagaaggcgatcctgcatgtgtactgggaagagttccagaaggaccctgtgggcctgatgagccgggtggcccagcctgccagcaagaagatcgatcagaacaagctgaaacctgagatggacgagaagggcaacctgaccaccgccggctttgcctgctctcagtgtggccagcccctgttcgtgtacaagctggagcaggtgtctgagaagggcaaggcttacaccaactacttcggacggtgcaatgtggccgagcacgaaaagctgatcctgctggcccagctgaagcccgagaaggatagcgacgaagccgtgacatatagcctgggaaagtttgggcagagggccctggatttctacagcattcatgtgaccaaggagtccacccaccccgtgaagcccctggcccagatcgccggaaacagatacgcctccggacctgtgggaaaggccctgagcgacgcatgtatgggcacaatcgcctccttcctgtctaagtaccaggacatcatcatcgaacaccagaaggtggtgaagggcaaccagaagagactggagagcctgcgggagctggccggcaaggaaaacctggaataccctagcgtgaccctgccacctcagcctcacaccaaggagggcgttgatgcctacaacgaagtgatcgcccgggtgcgaatgtgggtgaacctgaacctgtggcagaagctgaagctaagcagagatgatgccaagcctctgctgagactgaagggattcccttcctttcctctggtcgagagacaggccaacgaagtggactggtgggacatggtgtgtaacgtgaagaagctgatcaacgagaaaaaggaggatggcaaggtgttttggcagaatctggctggctacaagagacaggaagccctgagaccatacctgagcagcgaggaagatcggaagaagggaaagaaattcgctcggtaccagctgggcgacctgctgctgcacctggaaaagaagcacggcgaggactggggaaaggtgtacgacgaggcctgggagcggattgacaagaaagtggaaggcctgagcaagcacatcaagctggaagaggaacggagaagcgaggacgcccagagcaaggccgccctgaccgactggctgcgggctaaggccagcttcgtgatcgagggcctgaaggaggccgacaaggacgagttctgcagatgcgagctgaagctgcagaagtggtacggggacctgcggggaaagcccttcgccatcgaagccgagaacagcatcctggacatcagcggcttcagcaagcagtacaactgtgccttcatctggcagaaggacggcgtgaagaagctgaacctgtacctgatcatcaactacttcaagggcggcaagctgcggttcaagaagatcaaacctgaagccttcgaagccaacagattctacaccgtgatcaacaaaaagagcggcgagatcgtgcccatggaggtgaacttcaacttcgacgaccccaacctgatcatcctgcctctggcctttggcaagagacagggcagagaattcatctggaacgacctgctgtccctggaaaccggcagcctgaagctggccaacggaagagtgatcgagaagacactgtacaacagaagaacccggcaggatgagcctgccctgttcgtggccctgaccttcgagcggcgggaggtcctggactcctccaatatcaaaccaatgaacctgatcggcgtggcaagaggcgaaaacatccccgccgtgatcgccctgaccgaccccgagggctgcccactgagccggtttaaggatagcctgggaaacccaacccacatcctgagaatcggcgagagctataaggagaagcagcggaccatccaggccaagaaggaggtggagcagcggagagccggcggctacagccggaagtacgccagcaaagccaagaatctggcagacgatatggtgagaaacaccgctagagatctgctgtactacgccgtgacccaggatgccatgctgatcttcgccaacctgagccggggcttcggccggcagggcaagcggaccttcatggccgagagacagtacacacggatggaggactggctgaccgccaagctggcctacgagggcctgagcaagacctacctgtccaagacactggcccagtacacctccaagacatgcagcaactgtgggtttaccatcaccagcgccgactacgacagggtgctggagaagctgaagaagacagcaacaggctggatgaccacaattaacggcaaggagctgaaggtggagggccagattacctactacaacagatacaagagacagaacgtagtcaaggacctgtccgtcgagctggatagactgagcgaagaatctgtgaacaacgacatctcctcctggacaaagggcagaagcggagaagctctgagcctcctgaagaaaagattctcccatagacccgtgcaggagaagttcgtgtgcctgaactgcggcttcgagacacacgcagccgagcaagccgccctgaacatcgccagatcctggctgttcctgcggagccaggagtacaagaaataccagacaaacaagacaaccggcaacaccgataagagagccttcgtcgagacctggcagtccttttaccggaagaagcttaaggaggtgtggaaacctgccgtgcggtctggcggatctggcggaggctccaccagccccaagaaaaagagaaaagtctaagctgccttctgcggggcttgccttctggccatgcccttcttctctcccttgcacctgtacctcttggtctttgaataaagcctgagtaggaaggctagcaaaaaaaaaaaaaaaaaaaaaaaaaaaaaaaaaaaaaaaaaaaaaaaaaaaaaaaaaaaaaaaaaaaaaaaaaaaaaaaagcccagccggctccccaacctctaccgaggagggcacctctgagtccgccacccccgagagcggccctggcacctccaccgagcccagcgagggcagcgcacccggcagccctgccggcagccccacctccacagaggagggaaccagcaccgagcccagcgaaggcagcgccccaggcaccagcaccgagcctagtgagcaggagattaaacggatcaacaagatcagaagaagacttgtgaaagacagcaacaccaagaaggccggcaagacaggccccatgaaaaccctgctggttagagtgatgacacccgatctgagagagcggctggaaaacctgagaaagaagcctgaaaatatcccccagcccatcagcaatacatctagagccaacctgaataagctgctgaccgattacaccgaaatgaagaaggcgatcctgcatgtgtactgggaagagttccagaaggaccctgtgggcctgatgagccgggtggcccagcctgccagcaagaagatcgatcagaacaagctgaaacctgagatggacgagaagggcaacctgaccaccgccggctttgcctgctctcagtgtggccagcccctgttcgtgtacaagctggagcaggtgtctgagaagggcaaggcttacaccaactacttcggacggtgcaatgtggccgagcacgaaaagctgatcctgctggcccagctgaagcccgagaaggatagcgacgaagccgtgacatatagcctgggaaagtttgggcagagggccctggatttctacagcattcatgtgaccaaggagtccacccaccccgtgaagcccctggcccagatcgccggaaacagatacgcctccggacctgtgggaaaggccctgagcgacgcatgtatgggcacaatcgcctccttcctgtctaagtaccaggacatcatcatcgaacaccagaaggtggtgaagggcaaccagaagagactggagagcctgcgggagctggccggcaaggaaaacctggaataccctagcgtgaccctgccacctcagcctcacaccaaggagggcgttgatgcctacaacgaagtgatcgcccgggtgcgaatgtgggtgaacctgaacctgtggcagaagctgaagctaagcagagatgatgccaagcctctgctgagactgaagggattcccttcctttcctctggtcgagagacaggccaacgaagtggactggtgggacatggtgtgtaacgtgaagaagctgatcaacgagaaaaaggaggatggcaaggtgttttggcagaatctggctggctacaagagacaggaagccctgagaccatacctgagcagcgaggaagatcggaagaagggaaagaaattcgctcggtaccagctgggcgacctgctgctgcacctggaaaagaagcacggcgaggactggggaaaggtgtacgacgaggcctgggagcggattgacaagaaagtggaaggcctgagcaagcacatcaagctggaagaggaacggagaagcgaggacgcccagagcaaggccgccctgaccgactggctgcgggctaaggccagcttcgtgatcgagggcctgaaggaggccgacaaggacgagttctgcagatgcgagctgaagctgcagaagtggtacggggacctgcggggaaagcccttcgccatcgaagccgagaacagcatcctggacatcagcggcttcagcaagcagtacaactgtgccttcatctggcagaaggacggcgtgaagaagctgaacctgtacctgatcatcaactacttcaagggcggcaagctgcggttcaagaagatcaaacctgaagccttcgaagccaacagattctacaccgtgatcaacaaaaagagcggcgagatcgtgcccatggaggtgaacttcaacttcgacgaccccaacctgatcatcctgcctctggcctttggcaagagacagggcagagaattcatctggaacgacctgctgtccctggaaaccggcagcctgaagctggccaacggaagagtgatcgagaagacactgtacaacagaagaacccggcaggatgagcctgccctgttcgtggccctgaccttcgagcggcgggaggtcctggactcctccaatatcaaaccaatgaacctgatcggcgtggcaagaggcgaaaacatccccgccgtgatcgccctgaccgaccccgagggctgcccactgagccggtttaaggatagcctgggaaacccaacccacatcctgagaatcggcgagagctataaggagaagcagcggaccatccaggccaagaaggaggtggagcagcggagagccggcggctacagccggaagtacgccagcaaagccaagaatctggcagacgatatggtgagaaacaccgctagagatctgctgtactacgccgtgacccaggatgccatgctgatcttcgccaacctgagccggggcttcggccggcagggcaagcggaccttcatggccgagagacagtacacacggatggaggactggctgaccgccaagctggcctacgagggcctgagcaagacctacctgtccaagacactggcccagtacacctccaagacatgcagcaactgtgggtttaccatcaccagcgccgactacgacagggtgctggagaagctgaagaagacagcaacaggctggatgaccacaattaacggcaaggagctgaaggtggagggccagattacctactacaacagatacaagagacagaacgtagtcaaggacctgtccgtcgagctggatagactgagcgaagaatctgtgaacaacgacatctcctcctggacaaagggcagaagcggagaagctctgagcctcctgaagaaaagattctcccatagacccgtgcaggagaagttcgtgtgcctgaactgcggcttcgagacacacgcagccgagcaagccgccctgaacatcgccagatcctggctgttcctgcggagccaggagtacaagaaataccagacaaacaagacaaccggcaacaccgataagagagccttcgtcgagacctggcagtccttttaccggaagaagcttaaggaggtgtggaaacctgccgtgcggtctggcggatctggcggaggctccaccagccccaagaaaaagagaaaagtctaagctgccttctgcggggcttgccttctggccatgcccttcttctctcccttgcacctgtacctcttggtctttgaataaagcctgagtaggaaggctagcaaaaaaaaaaaaaaaaaaaaaaaaaaaaaaaaaaaaaaaaaaaaaaaaaaaaaaaaaaaaaaaaaaaaaaaaaaaaaaaa

SEQ ID NO: 10441 - RNA, 8787 nt, synthetic construct
  source 1..8787: mol_type = other RNA
aggaaataagagagaaaagaagagtaagaagaaatataagagccaccatggcccctaagaagaagcgtaaagtgagccggatgaaccacgaccaggagttcgacccccctaaggtgtaccctcccgtccccgccgagaagagaaagcccatccgggtcctgagcctgttcgatggcatcgccaccggtctgctggtgctgaaggacctgggcatccaggtggataggtacattgcctccgaggtgtgcgaggactccatcaccgtgggaatggtgcgtcatcagggcaagatcatgtacgtgggcgacgtgcggagcgtgacacagaagcatatccaggagtggggccctttcgacctggtgatcggcggcagcccttgcaatgacctgagcatcgtgaacccagcccggaagggcctgtacgagggaaccggcagactgttcttcgagttttacagactgctgcacgacgcccggcctaaggaaggcgacgaccggcccttcttttggctgttcgagaatgtggtggccatgggagtcagcgacaagcgggatattagccggttcctggagagcaaccccgtgatgatcgatgccaaggaagtgagcgccgcccaccgggccagatacttctggggcaatctgcctggcatgaacagacccctggccagcaccgtgaacgacaagctggagctgcaggagtgcctggagcacggccggatcgccaagttcagcaaggtgagaaccatcaccacccgaagcaacagcatcaaacaaggcaaggaccagcactttcctgtgttcatgaacgagaaggaggacatcctgtggtgtaccgagatggagagagtgttcgggttcccagtccactacacagatgtcagcaacatgtctagactggccagacagagactgctgggaagaagctggtccgtccctgtgatcagacacctgttcgcccctctgaaggagtacttcgcctgcgtgagcagcggcaacagcaacgccaacagccggggccccagcttctctagcggcctggtgccactgtccctgagagggagccacatgggccccatggagatctacaaaaccgtgagcgcctggaagcggcagcctgtgcgcgtgctgagcctgtttcggaatatcgataaagtcctgaaaagcctgggattcctggagagcggctctggctccggcggtggcaccctgaagtacgtggaggatgtgacaaacgtggtcagacgggatgtggagaagtggggccccttcgatctggtgtacggcagcacccaacccctgggcagctcttgtgaccggtgccctggctggtacatgtttcagttccaccggatcctgcagtacgccctgccgagacaggagtcccagcggccattcttttggattttcatggacaacttgctgctgaccgaggatgaccaggaaactaccactcggttcctgcagaccgaagccgtgaccctgcaggacgtgagaggccgggactaccagaacgccatgcgggtgtggtccaacatccctggactgaaaagcaagcacgcacctctgacccctaaagaagaggagtacctgcaggcccaggtgcggagcagaagcaagctggacgcccctaaggtggatctgctggtgaagaattgcctcctgcccctgagagagtacttcaagtatttcagccagaatagtctgcccctgggaggcagcggcggcggcgcccagatgagggtgaccttcgaggacatcgccgtgagcttcagccccgaggagtgggagtacctggaccagggccagaaggagctgtacagggaggtgatgaaggagaactacgagatcctgatcagcctgggctgccccaacctgacccccgagatcatcagcaggatcgagaggggcgaggagccctacatcaggggcgagcccggcagcgaggagagggagaccggcaagagcagctgcggcggcccaagcagcggcgcccctcctcccagcggcggcaggcggcccaagcagcggcgcccctcctcccagcggcggcagcccagccggctccccaacctctaccgaggagggcacctctgagtccgccacccccgagagcggccctggcacctccaccgagcccagcgagggcagcgcacccggcagccctgccggcagccccacctccacagaggagggaaccagcaccgagcccagcgaaggcagcgccccaggcaccagcaccgagcctagtgagcaggagattaaacggatcaacaagatcagaagaagacttgtgaaagacagcaacaccaagaaggccggcaagacaggccccatgaaaaccctgctggttagagtgatgacacccgatctgagagagcggctggaaaacctgagaaagaagcctgaaaatatcccccagcccatcagcaatacatctagagccaacctgaataagctgctgaccgattacaccgaaatgaagaaggcgatcctgcatgtgtactgggaagagttccagaaggaccctgtgggcctgatgagccgggtggcccagcctgccagcaagaagatcgatcagaacaagctgaaacctgagatggacgagaagggcaacctgaccaccgccggctttgcctgctctcagtgtggccagcccctgttcgtgtacaagctggagcaggtgtctgagaagggcaaggcttacaccaactacttcggacggtgcaatgtggccgagcacgaaaagctgatcctgctggcccagctgaagcccgagaaggatagcgacgaagccgtgacatatagcctgggaaagtttgggcagagggccctggatttctacagcattcatgtgaccaaggagtccacccaccccgtgaagcccctggcccagatcgccggaaacagatacgcctccggacctgtgggaaaggccctgagcgacgcatgtatgggcacaatcgcctccttcctgtctaagtaccaggacatcatcatcgaacaccagaaggtggtgaagggcaaccagaagagactggagagcctgcgggagctggccggcaaggaaaacctggaataccctagcgtgaccctgccacctcagcctcacaccaaggagggcgttgatgcctacaacgaagtgatcgcccgggtgcgaatgtgggtgaacctgaacctgtggcagaagctgaagctaagcagagatgatgccaagcctctgctgagactgaagggattcccttcctttcctctggtcgagagacaggccaacgaagtggactggtgggacatggtgtgtaacgtgaagaagctgatcaacgagaaaaaggaggatggcaaggtgttttggcagaatctggctggctacaagagacaggaagccctgagaccatacctgagcagcgaggaagatcggaagaagggaaagaaattcgctcggtaccagctgggcgacctgctgctgcacctggaaaagaagcacggcgaggactggggaaaggtgtacgacgaggcctgggagcggattgacaagaaagtggaaggcctgagcaagcacatcaagctggaagaggaacggagaagcgaggacgcccagagcaaggccgccctgaccgactggctgcgggctaaggccagcttcgtgatcgagggcctgaaggaggccgacaaggacgagttctgcagatgcgagctgaagctgcagaagtggtacggggacctgcggggaaagcccttcgccatcgaagccgagaacagcatcctggacatcagcggcttcagcaagcagtacaactgtgccttcatctggcagaaggacggcgtgaagaagctgaacctgtacctgatcatcaactacttcaagggcggcaagctgcggttcaagaagatcaaacctgaagccttcgaagccaacagattctacaccgtgatcaacaaaaagagcggcgagatcgtgcccatggaggtgaacttcaacttcgacgaccccaacctgatcatcctgcctctggcctttggcaagagacagggcagagaattcatctggaacgacctgctgtccctggaaaccggcagcctgaagctggccaacggaagagtgatcgagaagacactgtacaacagaagaacccggcaggatgagcctgccctgttcgtggccctgaccttcgagcggcgggaggtcctggactcctccaatatcaaaccaatgaacctgatcggcgtggcaagaggcgaaaacatccccgccgtgatcgccctgaccgaccccgagggctgcccactgagccggtttaaggatagcctgggaaacccaacccacatcctgagaatcggcgagagctataaggagaagcagcggaccatccaggccaagaaggaggtggagcagcggagagccggcggctacagccggaagtacgccagcaaagccaagaatctggcagacgatatggtgagaaacaccgctagagatctgctgtactacgccgtgacccaggatgccatgctgatcttcgccaacctgagccggggcttcggccggcagggcaagcggaccttcatggccgagagacagtacacacggatggaggactggctgaccgccaagctggcctacgagggcctgagcaagacctacctgtccaagacactggcccagtacacctccaagacatgcagcaactgtgggtttaccatcaccagcgccgactacgacagggtgctggagaagctgaagaagacagcaacaggctggatgaccacaattaacggcaaggagctgaaggtggagggccagattacctactacaacagatacaagagacagaacgtagtcaaggacctgtccgtcgagctggatagactgagcgaagaatctgtgaacaacgacatctcctcctggacaaagggcagaagcggagaagctctgagcctcctgaagaaaagattctcccatagacccgtgcaggagaagttcgtgtgcctgaactgcggcttcgagacacacgcagccgagcaagccgccctgaacatcgccagatcctggctgttcctgcggagccaggagtacaagaaataccagacaaacaagacaaccggcaacaccgataagagagccttcgtcgagacctggcagtccttttaccggaagaagcttaaggaggtgtggaaacctgccgtgcggtctggcggatctggcggaggctccaccagccccaagaaaaagagaaaagtctaagctgccttctgcggggcttgccttctggccatgcccttcttctctcccttgcacctgtacctcttggtctttgaataaagcctgagtaggaaggctagcaaaaaaaaaaaaaaaaaaaaaaaaaaaaaaaaaaaaaaaaaaaaaaaaaaaaaaaaaaaaaaaaaaaaaaaaaaaaaaaagcccagccggctccccaacctctaccgaggagggcacctctgagtccgccacccccgagagcggccctggcacctccaccgagcccagcgagggcagcgcacccggcagccctgccggcagccccacctccacagaggagggaaccagcaccgagcccagcgaaggcagcgccccaggcaccagcaccgagcctagtgagcaggagattaaacggatcaacaagatcagaagaagacttgtgaaagacagcaacaccaagaaggccggcaagacaggccccatgaaaaccctgctggttagagtgatgacacccgatctgagagagcggctggaaaacctgagaaagaagcctgaaaatatcccccagcccatcagcaatacatctagagccaacctgaataagctgctgaccgattacaccgaaatgaagaaggcgatcctgcatgtgtactgggaagagttccagaaggaccctgtgggcctgatgagccgggtggcccagcctgccagcaagaagatcgatcagaacaagctgaaacctgagatggacgagaagggcaacctgaccaccgccggctttgcctgctctcagtgtggccagcccctgttcgtgtacaagctggagcaggtgtctgagaagggcaaggcttacaccaactacttcggacggtgcaatgtggccgagcacgaaaagctgatcctgctggcccagctgaagcccgagaaggatagcgacgaagccgtgacatatagcctgggaaagtttgggcagagggccctggatttctacagcattcatgtgaccaaggagtccacccaccccgtgaagcccctggcccagatcgccggaaacagatacgcctccggacctgtgggaaaggccctgagcgacgcatgtatgggcacaatcgcctccttcctgtctaagtaccaggacatcatcatcgaacaccagaaggtggtgaagggcaaccagaagagactggagagcctgcgggagctggccggcaaggaaaacctggaataccctagcgtgaccctgccacctcagcctcacaccaaggagggcgttgatgcctacaacgaagtgatcgcccgggtgcgaatgtgggtgaacctgaacctgtggcagaagctgaagctaagcagagatgatgccaagcctctgctgagactgaagggattcccttcctttcctctggtcgagagacaggccaacgaagtggactggtgggacatggtgtgtaacgtgaagaagctgatcaacgagaaaaaggaggatggcaaggtgttttggcagaatctggctggctacaagagacaggaagccctgagaccatacctgagcagcgaggaagatcggaagaagggaaagaaattcgctcggtaccagctgggcgacctgctgctgcacctggaaaagaagcacggcgaggactggggaaaggtgtacgacgaggcctgggagcggattgacaagaaagtggaaggcctgagcaagcacatcaagctggaagaggaacggagaagcgaggacgcccagagcaaggccgccctgaccgactggctgcgggctaaggccagcttcgtgatcgagggcctgaaggaggccgacaaggacgagttctgcagatgcgagctgaagctgcagaagtggtacggggacctgcggggaaagcccttcgccatcgaagccgagaacagcatcctggacatcagcggcttcagcaagcagtacaactgtgccttcatctggcagaaggacggcgtgaagaagctgaacctgtacctgatcatcaactacttcaagggcggcaagctgcggttcaagaagatcaaacctgaagccttcgaagccaacagattctacaccgtgatcaacaaaaagagcggcgagatcgtgcccatggaggtgaacttcaacttcgacgaccccaacctgatcatcctgcctctggcctttggcaagagacagggcagagaattcatctggaacgacctgctgtccctggaaaccggcagcctgaagctggccaacggaagagtgatcgagaagacactgtacaacagaagaacccggcaggatgagcctgccctgttcgtggccctgaccttcgagcggcgggaggtcctggactcctccaatatcaaaccaatgaacctgatcggcgtggcaagaggcgaaaacatccccgccgtgatcgccctgaccgaccccgagggctgcccactgagccggtttaaggatagcctgggaaacccaacccacatcctgagaatcggcgagagctataaggagaagcagcggaccatccaggccaagaaggaggtggagcagcggagagccggcggctacagccggaagtacgccagcaaagccaagaatctggcagacgatatggtgagaaacaccgctagagatctgctgtactacgccgtgacccaggatgccatgctgatcttcgccaacctgagccggggcttcggccggcagggcaagcggaccttcatggccgagagacagtacacacggatggaggactggctgaccgccaagctggcctacgagggcctgagcaagacctacctgtccaagacactggcccagtacacctccaagacatgcagcaactgtgggtttaccatcaccagcgccgactacgacagggtgctggagaagctgaagaagacagcaacaggctggatgaccacaattaacggcaaggagctgaaggtggagggccagattacctactacaacagatacaagagacagaacgtagtcaaggacctgtccgtcgagctggatagactgagcgaagaatctgtgaacaacgacatctcctcctggacaaagggcagaagcggagaagctctgagcctcctgaagaaaagattctcccatagacccgtgcaggagaagttcgtgtgcctgaactgcggcttcgagacacacgcagccgagcaagccgccctgaacatcgccagatcctggctgttcctgcggagccaggagtacaagaaataccagacaaacaagacaaccggcaacaccgataagagagccttcgtcgagacctggcagtccttttaccggaagaagcttaaggaggtgtggaaacctgccgtgcggtctggcggatctggcggaggctccaccagccccaagaaaaagagaaaagtctaagctgccttctgcggggcttgccttctggccatgcccttcttctctcccttgcacctgtacctcttggtctttgaataaagcctgagtaggaaggctagcaaaaaaaaaaaaaaaaaaaaaaaaaaaaaaaaaaaaaaaaaaaaaaaaaaaaaaaaaaaaaaaaaaaaaaaaaaaaaaaa

SEQ ID NO: 10442 - RNA, 8787 nt, synthetic construct
  source 1..8787: mol_type = other RNA
aggaaataagagagaaaagaagagtaagaagaaatataagagccaccatggcccctaagaagaagcgtaaagtgagccggatgaaccacgaccaggagttcgacccccctaaggtgtaccctcccgtccccgccgagaagagaaagcccatccgggtcctgagcctgttcgatggcatcgccaccggtctgctggtgctgaaggacctgggcatccaggtggataggtacattgcctccgaggtgtgcgaggactccatcaccgtgggaatggtgcgtcatcagggcaagatcatgtacgtgggcgacgtgcggagcgtgacacagaagcatatccaggagtggggccctttcgacctggtgatcggcggcagcccttgcaatgacctgagcatcgtgaacccagcccggaagggcctgtacgagggaaccggcagactgttcttcgagttttacagactgctgcacgacgcccggcctaaggaaggcgacgaccggcccttcttttggctgttcgagaatgtggtggccatgggagtcagcgacaagcgggatattagccggttcctggagagcaaccccgtgatgatcgatgccaaggaagtgagcgccgcccaccgggccagatacttctggggcaatctgcctggcatgaacagacccctggccagcaccgtgaacgacaagctggagctgcaggagtgcctggagcacggccggatcgccaagttcagcaaggtgagaaccatcaccacccgaagcaacagcatcaaacaaggcaaggaccagcactttcctgtgttcatgaacgagaaggaggacatcctgtggtgtaccgagatggagagagtgttcgggttcccagtccactacacagatgtcagcaacatgtctagactggccagacagagactgctgggaagaagctggtccgtccctgtgatcagacacctgttcgcccctctgaaggagtacttcgcctgcgtgagcagcggcaacagcaacgccaacagccggggccccagcttctctagcggcctggtgccactgtccctgagagggagccacatgggccccatggagatctacaaaaccgtgagcgcctggaagcggcagcctgtgcgcgtgctgagcctgtttcggaatatcgataaagtcctgaaaagcctgggattcctggagagcggctctggctccggcggtggcaccctgaagtacgtggaggatgtgacaaacgtggtcagacgggatgtggagaagtggggccccttcgatctggtgtacggcagcacccaacccctgggcagctcttgtgaccggtgccctggctggtacatgtttcagttccaccggatcctgcagtacgccctgccgagacaggagtcccagcggccattcttttggattttcatggacaacttgctgctgaccgaggatgaccaggaaactaccactcggttcctgcagaccgaagccgtgaccctgcaggacgtgagaggccgggactaccagaacgccatgcgggtgtggtccaacatccctggactgaaaagcaagcacgcacctctgacccctaaagaagaggagtacctgcaggcccaggtgcggagcagaagcaagctggacgcccctaaggtggatctgctggtgaagaattgcctcctgcccctgagagagtacttcaagtatttcagccagaatagtctgcccctgggaggcagcggcggcggcatggacagcgtggccttcgaggacgtggccgtgaccttcacccaggaggagtgggccctgctggaccccagccagaagaccctgtacagggacgtgatgcaggagaccttcaggaacctggccagcgtgggcaagaagtggaaggcccagaacatgtacgtggagtacgagaacctgaagaggaacctgaggaccttcgtgggcgagaggctgttcgagagcaaggagggccaccagcacggcggcggcccaagcagcggcgcccctcctcccagcggcggcaggcggcccaagcagcggcgcccctcctcccagcggcggcagcccagccggctccccaacctctaccgaggagggcacctctgagtccgccacccccgagagcggccctggcacctccaccgagcccagcgagggcagcgcacccggcagccctgccggcagccccacctccacagaggagggaaccagcaccgagcccagcgaaggcagcgccccaggcaccagcaccgagcctagtgagcaggagattaaacggatcaacaagatcagaagaagacttgtgaaagacagcaacaccaagaaggccggcaagacaggccccatgaaaaccctgctggttagagtgatgacacccgatctgagagagcggctggaaaacctgagaaagaagcctgaaaatatcccccagcccatcagcaatacatctagagccaacctgaataagctgctgaccgattacaccgaaatgaagaaggcgatcctgcatgtgtactgggaagagttccagaaggaccctgtgggcctgatgagccgggtggcccagcctgccagcaagaagatcgatcagaacaagctgaaacctgagatggacgagaagggcaacctgaccaccgccggctttgcctgctctcagtgtggccagcccctgttcgtgtacaagctggagcaggtgtctgagaagggcaaggcttacaccaactacttcggacggtgcaatgtggccgagcacgaaaagctgatcctgctggcccagctgaagcccgagaaggatagcgacgaagccgtgacatatagcctgggaaagtttgggcagagggccctggatttctacagcattcatgtgaccaaggagtccacccaccccgtgaagcccctggcccagatcgccggaaacagatacgcctccggacctgtgggaaaggccctgagcgacgcatgtatgggcacaatcgcctccttcctgtctaagtaccaggacatcatcatcgaacaccagaaggtggtgaagggcaaccagaagagactggagagcctgcgggagctggccggcaaggaaaacctggaataccctagcgtgaccctgccacctcagcctcacaccaaggagggcgttgatgcctacaacgaagtgatcgcccgggtgcgaatgtgggtgaacctgaacctgtggcagaagctgaagctaagcagagatgatgccaagcctctgctgagactgaagggattcccttcctttcctctggtcgagagacaggccaacgaagtggactggtgggacatggtgtgtaacgtgaagaagctgatcaacgagaaaaaggaggatggcaaggtgttttggcagaatctggctggctacaagagacaggaagccctgagaccatacctgagcagcgaggaagatcggaagaagggaaagaaattcgctcggtaccagctgggcgacctgctgctgcacctggaaaagaagcacggcgaggactggggaaaggtgtacgacgaggcctgggagcggattgacaagaaagtggaaggcctgagcaagcacatcaagctggaagaggaacggagaagcgaggacgcccagagcaaggccgccctgaccgactggctgcgggctaaggccagcttcgtgatcgagggcctgaaggaggccgacaaggacgagttctgcagatgcgagctgaagctgcagaagtggtacggggacctgcggggaaagcccttcgccatcgaagccgagaacagcatcctggacatcagcggcttcagcaagcagtacaactgtgccttcatctggcagaaggacggcgtgaagaagctgaacctgtacctgatcatcaactacttcaagggcggcaagctgcggttcaagaagatcaaacctgaagccttcgaagccaacagattctacaccgtgatcaacaaaaagagcggcgagatcgtgcccatggaggtgaacttcaacttcgacgaccccaacctgatcatcctgcctctggcctttggcaagagacagggcagagaattcatctggaacgacctgctgtccctggaaaccggcagcctgaagctggccaacggaagagtgatcgagaagacactgtacaacagaagaacccggcaggatgagcctgccctgttcgtggccctgaccttcgagcggcgggaggtcctggactcctccaatatcaaaccaatgaacctgatcggcgtggcaagaggcgaaaacatccccgccgtgatcgccctgaccgaccccgagggctgcccactgagccggtttaaggatagcctgggaaacccaacccacatcctgagaatcggcgagagctataaggagaagcagcggaccatccaggccaagaaggaggtggagcagcggagagccggcggctacagccggaagtacgccagcaaagccaagaatctggcagacgatatggtgagaaacaccgctagagatctgctgtactacgccgtgacccaggatgccatgctgatcttcgccaacctgagccggggcttcggccggcagggcaagcggaccttcatggccgagagacagtacacacggatggaggactggctgaccgccaagctggcctacgagggcctgagcaagacctacctgtccaagacactggcccagtacacctccaagacatgcagcaactgtgggtttaccatcaccagcgccgactacgacagggtgctggagaagctgaagaagacagcaacaggctggatgaccacaattaacggcaaggagctgaaggtggagggccagattacctactacaacagatacaagagacagaacgtagtcaaggacctgtccgtcgagctggatagactgagcgaagaatctgtgaacaacgacatctcctcctggacaaagggcagaagcggagaagctctgagcctcctgaagaaaagattctcccatagacccgtgcaggagaagttcgtgtgcctgaactgcggcttcgagacacacgcagccgagcaagccgccctgaacatcgccagatcctggctgttcctgcggagccaggagtacaagaaataccagacaaacaagacaaccggcaacaccgataagagagccttcgtcgagacctggcagtccttttaccggaagaagcttaaggaggtgtggaaacctgccgtgcggtctggcggatctggcggaggctccaccagccccaagaaaaagagaaaagtctaagctgccttctgcggggcttgccttctggccatgcccttcttctctcccttgcacctgtacctcttggtctttgaataaagcctgagtaggaaggctagcaaaaaaaaaaaaaaaaaaaaaaaaaaaaaaaaaaaaaaaaaaaaaaaaaaaaaaaaaaaaaaaaaaaaaaaaaaaaaaaagcccagccggctccccaacctctaccgaggagggcacctctgagtccgccacccccgagagcggccctggcacctccaccgagcccagcgagggcagcgcacccggcagccctgccggcagccccacctccacagaggagggaaccagcaccgagcccagcgaaggcagcgccccaggcaccagcaccgagcctagtgagcaggagattaaacggatcaacaagatcagaagaagacttgtgaaagacagcaacaccaagaaggccggcaagacaggccccatgaaaaccctgctggttagagtgatgacacccgatctgagagagcggctggaaaacctgagaaagaagcctgaaaatatcccccagcccatcagcaatacatctagagccaacctgaataagctgctgaccgattacaccgaaatgaagaaggcgatcctgcatgtgtactgggaagagttccagaaggaccctgtgggcctgatgagccgggtggcccagcctgccagcaagaagatcgatcagaacaagctgaaacctgagatggacgagaagggcaacctgaccaccgccggctttgcctgctctcagtgtggccagcccctgttcgtgtacaagctggagcaggtgtctgagaagggcaaggcttacaccaactacttcggacggtgcaatgtggccgagcacgaaaagctgatcctgctggcccagctgaagcccgagaaggatagcgacgaagccgtgacatatagcctgggaaagtttgggcagagggccctggatttctacagcattcatgtgaccaaggagtccacccaccccgtgaagcccctggcccagatcgccggaaacagatacgcctccggacctgtgggaaaggccctgagcgacgcatgtatgggcacaatcgcctccttcctgtctaagtaccaggacatcatcatcgaacaccagaaggtggtgaagggcaaccagaagagactggagagcctgcgggagctggccggcaaggaaaacctggaataccctagcgtgaccctgccacctcagcctcacaccaaggagggcgttgatgcctacaacgaagtgatcgcccgggtgcgaatgtgggtgaacctgaacctgtggcagaagctgaagctaagcagagatgatgccaagcctctgctgagactgaagggattcccttcctttcctctggtcgagagacaggccaacgaagtggactggtgggacatggtgtgtaacgtgaagaagctgatcaacgagaaaaaggaggatggcaaggtgttttggcagaatctggctggctacaagagacaggaagccctgagaccatacctgagcagcgaggaagatcggaagaagggaaagaaattcgctcggtaccagctgggcgacctgctgctgcacctggaaaagaagcacggcgaggactggggaaaggtgtacgacgaggcctgggagcggattgacaagaaagtggaaggcctgagcaagcacatcaagctggaagaggaacggagaagcgaggacgcccagagcaaggccgccctgaccgactggctgcgggctaaggccagcttcgtgatcgagggcctgaaggaggccgacaaggacgagttctgcagatgcgagctgaagctgcagaagtggtacggggacctgcggggaaagcccttcgccatcgaagccgagaacagcatcctggacatcagcggcttcagcaagcagtacaactgtgccttcatctggcagaaggacggcgtgaagaagctgaacctgtacctgatcatcaactacttcaagggcggcaagctgcggttcaagaagatcaaacctgaagccttcgaagccaacagattctacaccgtgatcaacaaaaagagcggcgagatcgtgcccatggaggtgaacttcaacttcgacgaccccaacctgatcatcctgcctctggcctttggcaagagacagggcagagaattcatctggaacgacctgctgtccctggaaaccggcagcctgaagctggccaacggaagagtgatcgagaagacactgtacaacagaagaacccggcaggatgagcctgccctgttcgtggccctgaccttcgagcggcgggaggtcctggactcctccaatatcaaaccaatgaacctgatcggcgtggcaagaggcgaaaacatccccgccgtgatcgccctgaccgaccccgagggctgcccactgagccggtttaaggatagcctgggaaacccaacccacatcctgagaatcggcgagagctataaggagaagcagcggaccatccaggccaagaaggaggtggagcagcggagagccggcggctacagccggaagtacgccagcaaagccaagaatctggcagacgatatggtgagaaacaccgctagagatctgctgtactacgccgtgacccaggatgccatgctgatcttcgccaacctgagccggggcttcggccggcagggcaagcggaccttcatggccgagagacagtacacacggatggaggactggctgaccgccaagctggcctacgagggcctgagcaagacctacctgtccaagacactggcccagtacacctccaagacatgcagcaactgtgggtttaccatcaccagcgccgactacgacagggtgctggagaagctgaagaagacagcaacaggctggatgaccacaattaacggcaaggagctgaaggtggagggccagattacctactacaacagatacaagagacagaacgtagtcaaggacctgtccgtcgagctggatagactgagcgaagaatctgtgaacaacgacatctcctcctggacaaagggcagaagcggagaagctctgagcctcctgaagaaaagattctcccatagacccgtgcaggagaagttcgtgtgcctgaactgcggcttcgagacacacgcagccgagcaagccgccctgaacatcgccagatcctggctgttcctgcggagccaggagtacaagaaataccagacaaacaagacaaccggcaacaccgataagagagccttcgtcgagacctggcagtccttttaccggaagaagcttaaggaggtgtggaaacctgccgtgcggtctggcggatctggcggaggctccaccagccccaagaaaaagagaaaagtctaagctgccttctgcggggcttgccttctggccatgcccttcttctctcccttgcacctgtacctcttggtctttgaataaagcctgagtaggaaggctagcaaaaaaaaaaaaaaaaaaaaaaaaaaaaaaaaaaaaaaaaaaaaaaaaaaaaaaaaaaaaaaaaaaaaaaaaaaaaaaaa

SEQ ID NO: 10443 - RNA, 8787 nt, synthetic construct
  source 1..8787: mol_type = other RNA
aggaaataagagagaaaagaagagtaagaagaaatataagagccaccatggcccctaagaagaagcgtaaagtgagccggatgaaccacgaccaggagttcgacccccctaaggtgtaccctcccgtccccgccgagaagagaaagcccatccgggtcctgagcctgttcgatggcatcgccaccggtctgctggtgctgaaggacctgggcatccaggtggataggtacattgcctccgaggtgtgcgaggactccatcaccgtgggaatggtgcgtcatcagggcaagatcatgtacgtgggcgacgtgcggagcgtgacacagaagcatatccaggagtggggccctttcgacctggtgatcggcggcagcccttgcaatgacctgagcatcgtgaacccagcccggaagggcctgtacgagggaaccggcagactgttcttcgagttttacagactgctgcacgacgcccggcctaaggaaggcgacgaccggcccttcttttggctgttcgagaatgtggtggccatgggagtcagcgacaagcgggatattagccggttcctggagagcaaccccgtgatgatcgatgccaaggaagtgagcgccgcccaccgggccagatacttctggggcaatctgcctggcatgaacagacccctggccagcaccgtgaacgacaagctggagctgcaggagtgcctggagcacggccggatcgccaagttcagcaaggtgagaaccatcaccacccgaagcaacagcatcaaacaaggcaaggaccagcactttcctgtgttcatgaacgagaaggaggacatcctgtggtgtaccgagatggagagagtgttcgggttcccagtccactacacagatgtcagcaacatgtctagactggccagacagagactgctgggaagaagctggtccgtccctgtgatcagacacctgttcgcccctctgaaggagtacttcgcctgcgtgagcagcggcaacagcaacgccaacagccggggccccagcttctctagcggcctggtgccactgtccctgagagggagccacatgggccccatggagatctacaaaaccgtgagcgcctggaagcggcagcctgtgcgcgtgctgagcctgtttcggaatatcgataaagtcctgaaaagcctgggattcctggagagcggctctggctccggcggtggcaccctgaagtacgtggaggatgtgacaaacgtggtcagacgggatgtggagaagtggggccccttcgatctggtgtacggcagcacccaacccctgggcagctcttgtgaccggtgccctggctggtacatgtttcagttccaccggatcctgcagtacgccctgccgagacaggagtcccagcggccattcttttggattttcatggacaacttgctgctgaccgaggatgaccaggaaactaccactcggttcctgcagaccgaagccgtgaccctgcaggacgtgagaggccgggactaccagaacgccatgcgggtgtggtccaacatccctggactgaaaagcaagcacgcacctctgacccctaaagaagaggagtacctgcaggcccaggtgcggagcagaagcaagctggacgcccctaaggtggatctgctggtgaagaattgcctcctgcccctgagagagtacttcaagtatttcagccagaatagtctgcccctgggaggcagcggcggcggcttccagatgcccgtgaccttcgaggaggtggccgtgtacttcacccagggccagggcgccctgctggaccccgcccagagggccctgtacagggacgtgatgcaggagaactacaagatggtgaccagcctgggcttccccctgcccaagcccgagctgatcagcaggctggagcagggcgaggagccctgggtgcccgacctgcaggcctgcgaggagagggagagcctgagcggcaaccacggcggcccaagcagcggcgcccctcctcccagcggcggcaggcggcccaagcagcggcgcccctcctcccagcggcggcagcccagccggctccccaacctctaccgaggagggcacctctgagtccgccacccccgagagcggccctggcacctccaccgagcccagcgagggcagcgcacccggcagccctgccggcagccccacctccacagaggagggaaccagcaccgagcccagcgaaggcagcgccccaggcaccagcaccgagcctagtgagcaggagattaaacggatcaacaagatcagaagaagacttgtgaaagacagcaacaccaagaaggccggcaagacaggccccatgaaaaccctgctggttagagtgatgacacccgatctgagagagcggctggaaaacctgagaaagaagcctgaaaatatcccccagcccatcagcaatacatctagagccaacctgaataagctgctgaccgattacaccgaaatgaagaaggcgatcctgcatgtgtactgggaagagttccagaaggaccctgtgggcctgatgagccgggtggcccagcctgccagcaagaagatcgatcagaacaagctgaaacctgagatggacgagaagggcaacctgaccaccgccggctttgcctgctctcagtgtggccagcccctgttcgtgtacaagctggagcaggtgtctgagaagggcaaggcttacaccaactacttcggacggtgcaatgtggccgagcacgaaaagctgatcctgctggcccagctgaagcccgagaaggatagcgacgaagccgtgacatatagcctgggaaagtttgggcagagggccctggatttctacagcattcatgtgaccaaggagtccacccaccccgtgaagcccctggcccagatcgccggaaacagatacgcctccggacctgtgggaaaggccctgagcgacgcatgtatgggcacaatcgcctccttcctgtctaagtaccaggacatcatcatcgaacaccagaaggtggtgaagggcaaccagaagagactggagagcctgcgggagctggccggcaaggaaaacctggaataccctagcgtgaccctgccacctcagcctcacaccaaggagggcgttgatgcctacaacgaagtgatcgcccgggtgcgaatgtgggtgaacctgaacctgtggcagaagctgaagctaagcagagatgatgccaagcctctgctgagactgaagggattcccttcctttcctctggtcgagagacaggccaacgaagtggactggtgggacatggtgtgtaacgtgaagaagctgatcaacgagaaaaaggaggatggcaaggtgttttggcagaatctggctggctacaagagacaggaagccctgagaccatacctgagcagcgaggaagatcggaagaagggaaagaaattcgctcggtaccagctgggcgacctgctgctgcacctggaaaagaagcacggcgaggactggggaaaggtgtacgacgaggcctgggagcggattgacaagaaagtggaaggcctgagcaagcacatcaagctggaagaggaacggagaagcgaggacgcccagagcaaggccgccctgaccgactggctgcgggctaaggccagcttcgtgatcgagggcctgaaggaggccgacaaggacgagttctgcagatgcgagctgaagctgcagaagtggtacggggacctgcggggaaagcccttcgccatcgaagccgagaacagcatcctggacatcagcggcttcagcaagcagtacaactgtgccttcatctggcagaaggacggcgtgaagaagctgaacctgtacctgatcatcaactacttcaagggcggcaagctgcggttcaagaagatcaaacctgaagccttcgaagccaacagattctacaccgtgatcaacaaaaagagcggcgagatcgtgcccatggaggtgaacttcaacttcgacgaccccaacctgatcatcctgcctctggcctttggcaagagacagggcagagaattcatctggaacgacctgctgtccctggaaaccggcagcctgaagctggccaacggaagagtgatcgagaagacactgtacaacagaagaacccggcaggatgagcctgccctgttcgtggccctgaccttcgagcggcgggaggtcctggactcctccaatatcaaaccaatgaacctgatcggcgtggcaagaggcgaaaacatccccgccgtgatcgccctgaccgaccccgagggctgcccactgagccggtttaaggatagcctgggaaacccaacccacatcctgagaatcggcgagagctataaggagaagcagcggaccatccaggccaagaaggaggtggagcagcggagagccggcggctacagccggaagtacgccagcaaagccaagaatctggcagacgatatggtgagaaacaccgctagagatctgctgtactacgccgtgacccaggatgccatgctgatcttcgccaacctgagccggggcttcggccggcagggcaagcggaccttcatggccgagagacagtacacacggatggaggactggctgaccgccaagctggcctacgagggcctgagcaagacctacctgtccaagacactggcccagtacacctccaagacatgcagcaactgtgggtttaccatcaccagcgccgactacgacagggtgctggagaagctgaagaagacagcaacaggctggatgaccacaattaacggcaaggagctgaaggtggagggccagattacctactacaacagatacaagagacagaacgtagtcaaggacctgtccgtcgagctggatagactgagcgaagaatctgtgaacaacgacatctcctcctggacaaagggcagaagcggagaagctctgagcctcctgaagaaaagattctcccatagacccgtgcaggagaagttcgtgtgcctgaactgcggcttcgagacacacgcagccgagcaagccgccctgaacatcgccagatcctggctgttcctgcggagccaggagtacaagaaataccagacaaacaagacaaccggcaacaccgataagagagccttcgtcgagacctggcagtccttttaccggaagaagcttaaggaggtgtggaaacctgccgtgcggtctggcggatctggcggaggctccaccagccccaagaaaaagagaaaagtctaagctgccttctgcggggcttgccttctggccatgcccttcttctctcccttgcacctgtacctcttggtctttgaataaagcctgagtaggaaggctagcaaaaaaaaaaaaaaaaaaaaaaaaaaaaaaaaaaaaaaaaaaaaaaaaaaaaaaaaaaaaaaaaaaaaaaaaaaaaaaaagcccagccggctccccaacctctaccgaggagggcacctctgagtccgccacccccgagagcggccctggcacctccaccgagcccagcgagggcagcgcacccggcagccctgccggcagccccacctccacagaggagggaaccagcaccgagcccagcgaaggcagcgccccaggcaccagcaccgagcctagtgagcaggagattaaacggatcaacaagatcagaagaagacttgtgaaagacagcaacaccaagaaggccggcaagacaggccccatgaaaaccctgctggttagagtgatgacacccgatctgagagagcggctggaaaacctgagaaagaagcctgaaaatatcccccagcccatcagcaatacatctagagccaacctgaataagctgctgaccgattacaccgaaatgaagaaggcgatcctgcatgtgtactgggaagagttccagaaggaccctgtgggcctgatgagccgggtggcccagcctgccagcaagaagatcgatcagaacaagctgaaacctgagatggacgagaagggcaacctgaccaccgccggctttgcctgctctcagtgtggccagcccctgttcgtgtacaagctggagcaggtgtctgagaagggcaaggcttacaccaactacttcggacggtgcaatgtggccgagcacgaaaagctgatcctgctggcccagctgaagcccgagaaggatagcgacgaagccgtgacatatagcctgggaaagtttgggcagagggccctggatttctacagcattcatgtgaccaaggagtccacccaccccgtgaagcccctggcccagatcgccggaaacagatacgcctccggacctgtgggaaaggccctgagcgacgcatgtatgggcacaatcgcctccttcctgtctaagtaccaggacatcatcatcgaacaccagaaggtggtgaagggcaaccagaagagactggagagcctgcgggagctggccggcaaggaaaacctggaataccctagcgtgaccctgccacctcagcctcacaccaaggagggcgttgatgcctacaacgaagtgatcgcccgggtgcgaatgtgggtgaacctgaacctgtggcagaagctgaagctaagcagagatgatgccaagcctctgctgagactgaagggattcccttcctttcctctggtcgagagacaggccaacgaagtggactggtgggacatggtgtgtaacgtgaagaagctgatcaacgagaaaaaggaggatggcaaggtgttttggcagaatctggctggctacaagagacaggaagccctgagaccatacctgagcagcgaggaagatcggaagaagggaaagaaattcgctcggtaccagctgggcgacctgctgctgcacctggaaaagaagcacggcgaggactggggaaaggtgtacgacgaggcctgggagcggattgacaagaaagtggaaggcctgagcaagcacatcaagctggaagaggaacggagaagcgaggacgcccagagcaaggccgccctgaccgactggctgcgggctaaggccagcttcgtgatcgagggcctgaaggaggccgacaaggacgagttctgcagatgcgagctgaagctgcagaagtggtacggggacctgcggggaaagcccttcgccatcgaagccgagaacagcatcctggacatcagcggcttcagcaagcagtacaactgtgccttcatctggcagaaggacggcgtgaagaagctgaacctgtacctgatcatcaactacttcaagggcggcaagctgcggttcaagaagatcaaacctgaagccttcgaagccaacagattctacaccgtgatcaacaaaaagagcggcgagatcgtgcccatggaggtgaacttcaacttcgacgaccccaacctgatcatcctgcctctggcctttggcaagagacagggcagagaattcatctggaacgacctgctgtccctggaaaccggcagcctgaagctggccaacggaagagtgatcgagaagacactgtacaacagaagaacccggcaggatgagcctgccctgttcgtggccctgaccttcgagcggcgggaggtcctggactcctccaatatcaaaccaatgaacctgatcggcgtggcaagaggcgaaaacatccccgccgtgatcgccctgaccgaccccgagggctgcccactgagccggtttaaggatagcctgggaaacccaacccacatcctgagaatcggcgagagctataaggagaagcagcggaccatccaggccaagaaggaggtggagcagcggagagccggcggctacagccggaagtacgccagcaaagccaagaatctggcagacgatatggtgagaaacaccgctagagatctgctgtactacgccgtgacccaggatgccatgctgatcttcgccaacctgagccggggcttcggccggcagggcaagcggaccttcatggccgagagacagtacacacggatggaggactggctgaccgccaagctggcctacgagggcctgagcaagacctacctgtccaagacactggcccagtacacctccaagacatgcagcaactgtgggtttaccatcaccagcgccgactacgacagggtgctggagaagctgaagaagacagcaacaggctggatgaccacaattaacggcaaggagctgaaggtggagggccagattacctactacaacagatacaagagacagaacgtagtcaaggacctgtccgtcgagctggatagactgagcgaagaatctgtgaacaacgacatctcctcctggacaaagggcagaagcggagaagctctgagcctcctgaagaaaagattctcccatagacccgtgcaggagaagttcgtgtgcctgaactgcggcttcgagacacacgcagccgagcaagccgccctgaacatcgccagatcctggctgttcctgcggagccaggagtacaagaaataccagacaaacaagacaaccggcaacaccgataagagagccttcgtcgagacctggcagtccttttaccggaagaagcttaaggaggtgtggaaacctgccgtgcggtctggcggatctggcggaggctccaccagccccaagaaaaagagaaaagtctaagctgccttctgcggggcttgccttctggccatgcccttcttctctcccttgcacctgtacctcttggtctttgaataaagcctgagtaggaaggctagcaaaaaaaaaaaaaaaaaaaaaaaaaaaaaaaaaaaaaaaaaaaaaaaaaaaaaaaaaaaaaaaaaaaaaaaaaaaaaaaa

SEQ ID NO: 10444 - RNA, 8787 nt, synthetic construct
  source 1..8787: mol_type = other RNA
aggaaataagagagaaaagaagagtaagaagaaatataagagccaccatggcccctaagaagaagcgtaaagtgagccggatgaaccacgaccaggagttcgacccccctaaggtgtaccctcccgtccccgccgagaagagaaagcccatccgggtcctgagcctgttcgatggcatcgccaccggtctgctggtgctgaaggacctgggcatccaggtggataggtacattgcctccgaggtgtgcgaggactccatcaccgtgggaatggtgcgtcatcagggcaagatcatgtacgtgggcgacgtgcggagcgtgacacagaagcatatccaggagtggggccctttcgacctggtgatcggcggcagcccttgcaatgacctgagcatcgtgaacccagcccggaagggcctgtacgagggaaccggcagactgttcttcgagttttacagactgctgcacgacgcccggcctaaggaaggcgacgaccggcccttcttttggctgttcgagaatgtggtggccatgggagtcagcgacaagcgggatattagccggttcctggagagcaaccccgtgatgatcgatgccaaggaagtgagcgccgcccaccgggccagatacttctggggcaatctgcctggcatgaacagacccctggccagcaccgtgaacgacaagctggagctgcaggagtgcctggagcacggccggatcgccaagttcagcaaggtgagaaccatcaccacccgaagcaacagcatcaaacaaggcaaggaccagcactttcctgtgttcatgaacgagaaggaggacatcctgtggtgtaccgagatggagagagtgttcgggttcccagtccactacacagatgtcagcaacatgtctagactggccagacagagactgctgggaagaagctggtccgtccctgtgatcagacacctgttcgcccctctgaaggagtacttcgcctgcgtgagcagcggcaacagcaacgccaacagccggggccccagcttctctagcggcctggtgccactgtccctgagagggagccacatgggccccatggagatctacaaaaccgtgagcgcctggaagcggcagcctgtgcgcgtgctgagcctgtttcggaatatcgataaagtcctgaaaagcctgggattcctggagagcggctctggctccggcggtggcaccctgaagtacgtggaggatgtgacaaacgtggtcagacgggatgtggagaagtggggccccttcgatctggtgtacggcagcacccaacccctgggcagctcttgtgaccggtgccctggctggtacatgtttcagttccaccggatcctgcagtacgccctgccgagacaggagtcccagcggccattcttttggattttcatggacaacttgctgctgaccgaggatgaccaggaaactaccactcggttcctgcagaccgaagccgtgaccctgcaggacgtgagaggccgggactaccagaacgccatgcgggtgtggtccaacatccctggactgaaaagcaagcacgcacctctgacccctaaagaagaggagtacctgcaggcccaggtgcggagcagaagcaagctggacgcccctaaggtggatctgctggtgaagaattgcctcctgcccctgagagagtacttcaagtatttcagccagaatagtctgcccctgggaggcagcggcggcggcatggccaccgccctgaccgaccccgcccaggtgagcgtgaccttcgacgacgtggccgtgaccttcacccaggaggagtggggccagctggacctggcccagaggaccctgtaccaggaggtgatgctggagaactgcggcctgctggtgagcctgggctgccccgtgcccaggcccgagctgatctaccacctggagcacggccaggagccctggaccaggaaggaggacctgagccaggacggcggcccaagcagcggcgcccctcctcccagcggcggcaggcggcccaagcagcggcgcccctcctcccagcggcggcagcccagccggctccccaacctctaccgaggagggcacctctgagtccgccacccccgagagcggccctggcacctccaccgagcccagcgagggcagcgcacccggcagccctgccggcagccccacctccacagaggagggaaccagcaccgagcccagcgaaggcagcgccccaggcaccagcaccgagcctagtgagcaggagattaaacggatcaacaagatcagaagaagacttgtgaaagacagcaacaccaagaaggccggcaagacaggccccatgaaaaccctgctggttagagtgatgacacccgatctgagagagcggctggaaaacctgagaaagaagcctgaaaatatcccccagcccatcagcaatacatctagagccaacctgaataagctgctgaccgattacaccgaaatgaagaaggcgatcctgcatgtgtactgggaagagttccagaaggaccctgtgggcctgatgagccgggtggcccagcctgccagcaagaagatcgatcagaacaagctgaaacctgagatggacgagaagggcaacctgaccaccgccggctttgcctgctctcagtgtggccagcccctgttcgtgtacaagctggagcaggtgtctgagaagggcaaggcttacaccaactacttcggacggtgcaatgtggccgagcacgaaaagctgatcctgctggcccagctgaagcccgagaaggatagcgacgaagccgtgacatatagcctgggaaagtttgggcagagggccctggatttctacagcattcatgtgaccaaggagtccacccaccccgtgaagcccctggcccagatcgccggaaacagatacgcctccggacctgtgggaaaggccctgagcgacgcatgtatgggcacaatcgcctccttcctgtctaagtaccaggacatcatcatcgaacaccagaaggtggtgaagggcaaccagaagagactggagagcctgcgggagctggccggcaaggaaaacctggaataccctagcgtgaccctgccacctcagcctcacaccaaggagggcgttgatgcctacaacgaagtgatcgcccgggtgcgaatgtgggtgaacctgaacctgtggcagaagctgaagctaagcagagatgatgccaagcctctgctgagactgaagggattcccttcctttcctctggtcgagagacaggccaacgaagtggactggtgggacatggtgtgtaacgtgaagaagctgatcaacgagaaaaaggaggatggcaaggtgttttggcagaatctggctggctacaagagacaggaagccctgagaccatacctgagcagcgaggaagatcggaagaagggaaagaaattcgctcggtaccagctgggcgacctgctgctgcacctggaaaagaagcacggcgaggactggggaaaggtgtacgacgaggcctgggagcggattgacaagaaagtggaaggcctgagcaagcacatcaagctggaagaggaacggagaagcgaggacgcccagagcaaggccgccctgaccgactggctgcgggctaaggccagcttcgtgatcgagggcctgaaggaggccgacaaggacgagttctgcagatgcgagctgaagctgcagaagtggtacggggacctgcggggaaagcccttcgccatcgaagccgagaacagcatcctggacatcagcggcttcagcaagcagtacaactgtgccttcatctggcagaaggacggcgtgaagaagctgaacctgtacctgatcatcaactacttcaagggcggcaagctgcggttcaagaagatcaaacctgaagccttcgaagccaacagattctacaccgtgatcaacaaaaagagcggcgagatcgtgcccatggaggtgaacttcaacttcgacgaccccaacctgatcatcctgcctctggcctttggcaagagacagggcagagaattcatctggaacgacctgctgtccctggaaaccggcagcctgaagctggccaacggaagagtgatcgagaagacactgtacaacagaagaacccggcaggatgagcctgccctgttcgtggccctgaccttcgagcggcgggaggtcctggactcctccaatatcaaaccaatgaacctgatcggcgtggcaagaggcgaaaacatccccgccgtgatcgccctgaccgaccccgagggctgcccactgagccggtttaaggatagcctgggaaacccaacccacatcctgagaatcggcgagagctataaggagaagcagcggaccatccaggccaagaaggaggtggagcagcggagagccggcggctacagccggaagtacgccagcaaagccaagaatctggcagacgatatggtgagaaacaccgctagagatctgctgtactacgccgtgacccaggatgccatgctgatcttcgccaacctgagccggggcttcggccggcagggcaagcggaccttcatggccgagagacagtacacacggatggaggactggctgaccgccaagctggcctacgagggcctgagcaagacctacctgtccaagacactggcccagtacacctccaagacatgcagcaactgtgggtttaccatcaccagcgccgactacgacagggtgctggagaagctgaagaagacagcaacaggctggatgaccacaattaacggcaaggagctgaaggtggagggccagattacctactacaacagatacaagagacagaacgtagtcaaggacctgtccgtcgagctggatagactgagcgaagaatctgtgaacaacgacatctcctcctggacaaagggcagaagcggagaagctctgagcctcctgaagaaaagattctcccatagacccgtgcaggagaagttcgtgtgcctgaactgcggcttcgagacacacgcagccgagcaagccgccctgaacatcgccagatcctggctgttcctgcggagccaggagtacaagaaataccagacaaacaagacaaccggcaacaccgataagagagccttcgtcgagacctggcagtccttttaccggaagaagcttaaggaggtgtggaaacctgccgtgcggtctggcggatctggcggaggctccaccagccccaagaaaaagagaaaagtctaagctgccttctgcggggcttgccttctggccatgcccttcttctctcccttgcacctgtacctcttggtctttgaataaagcctgagtaggaaggctagcaaaaaaaaaaaaaaaaaaaaaaaaaaaaaaaaaaaaaaaaaaaaaaaaaaaaaaaaaaaaaaaaaaaaaaaaaaaaaaaagcccagccggctccccaacctctaccgaggagggcacctctgagtccgccacccccgagagcggccctggcacctccaccgagcccagcgagggcagcgcacccggcagccctgccggcagccccacctccacagaggagggaaccagcaccgagcccagcgaaggcagcgccccaggcaccagcaccgagcctagtgagcaggagattaaacggatcaacaagatcagaagaagacttgtgaaagacagcaacaccaagaaggccggcaagacaggccccatgaaaaccctgctggttagagtgatgacacccgatctgagagagcggctggaaaacctgagaaagaagcctgaaaatatcccccagcccatcagcaatacatctagagccaacctgaataagctgctgaccgattacaccgaaatgaagaaggcgatcctgcatgtgtactgggaagagttccagaaggaccctgtgggcctgatgagccgggtggcccagcctgccagcaagaagatcgatcagaacaagctgaaacctgagatggacgagaagggcaacctgaccaccgccggctttgcctgctctcagtgtggccagcccctgttcgtgtacaagctggagcaggtgtctgagaagggcaaggcttacaccaactacttcggacggtgcaatgtggccgagcacgaaaagctgatcctgctggcccagctgaagcccgagaaggatagcgacgaagccgtgacatatagcctgggaaagtttgggcagagggccctggatttctacagcattcatgtgaccaaggagtccacccaccccgtgaagcccctggcccagatcgccggaaacagatacgcctccggacctgtgggaaaggccctgagcgacgcatgtatgggcacaatcgcctccttcctgtctaagtaccaggacatcatcatcgaacaccagaaggtggtgaagggcaaccagaagagactggagagcctgcgggagctggccggcaaggaaaacctggaataccctagcgtgaccctgccacctcagcctcacaccaaggagggcgttgatgcctacaacgaagtgatcgcccgggtgcgaatgtgggtgaacctgaacctgtggcagaagctgaagctaagcagagatgatgccaagcctctgctgagactgaagggattcccttcctttcctctggtcgagagacaggccaacgaagtggactggtgggacatggtgtgtaacgtgaagaagctgatcaacgagaaaaaggaggatggcaaggtgttttggcagaatctggctggctacaagagacaggaagccctgagaccatacctgagcagcgaggaagatcggaagaagggaaagaaattcgctcggtaccagctgggcgacctgctgctgcacctggaaaagaagcacggcgaggactggggaaaggtgtacgacgaggcctgggagcggattgacaagaaagtggaaggcctgagcaagcacatcaagctggaagaggaacggagaagcgaggacgcccagagcaaggccgccctgaccgactggctgcgggctaaggccagcttcgtgatcgagggcctgaaggaggccgacaaggacgagttctgcagatgcgagctgaagctgcagaagtggtacggggacctgcggggaaagcccttcgccatcgaagccgagaacagcatcctggacatcagcggcttcagcaagcagtacaactgtgccttcatctggcagaaggacggcgtgaagaagctgaacctgtacctgatcatcaactacttcaagggcggcaagctgcggttcaagaagatcaaacctgaagccttcgaagccaacagattctacaccgtgatcaacaaaaagagcggcgagatcgtgcccatggaggtgaacttcaacttcgacgaccccaacctgatcatcctgcctctggcctttggcaagagacagggcagagaattcatctggaacgacctgctgtccctggaaaccggcagcctgaagctggccaacggaagagtgatcgagaagacactgtacaacagaagaacccggcaggatgagcctgccctgttcgtggccctgaccttcgagcggcgggaggtcctggactcctccaatatcaaaccaatgaacctgatcggcgtggcaagaggcgaaaacatccccgccgtgatcgccctgaccgaccccgagggctgcccactgagccggtttaaggatagcctgggaaacccaacccacatcctgagaatcggcgagagctataaggagaagcagcggaccatccaggccaagaaggaggtggagcagcggagagccggcggctacagccggaagtacgccagcaaagccaagaatctggcagacgatatggtgagaaacaccgctagagatctgctgtactacgccgtgacccaggatgccatgctgatcttcgccaacctgagccggggcttcggccggcagggcaagcggaccttcatggccgagagacagtacacacggatggaggactggctgaccgccaagctggcctacgagggcctgagcaagacctacctgtccaagacactggcccagtacacctccaagacatgcagcaactgtgggtttaccatcaccagcgccgactacgacagggtgctggagaagctgaagaagacagcaacaggctggatgaccacaattaacggcaaggagctgaaggtggagggccagattacctactacaacagatacaagagacagaacgtagtcaaggacctgtccgtcgagctggatagactgagcgaagaatctgtgaacaacgacatctcctcctggacaaagggcagaagcggagaagctctgagcctcctgaagaaaagattctcccatagacccgtgcaggagaagttcgtgtgcctgaactgcggcttcgagacacacgcagccgagcaagccgccctgaacatcgccagatcctggctgttcctgcggagccaggagtacaagaaataccagacaaacaagacaaccggcaacaccgataagagagccttcgtcgagacctggcagtccttttaccggaagaagcttaaggaggtgtggaaacctgccgtgcggtctggcggatctggcggaggctccaccagccccaagaaaaagagaaaagtctaagctgccttctgcggggcttgccttctggccatgcccttcttctctcccttgcacctgtacctcttggtctttgaataaagcctgagtaggaaggctagcaaaaaaaaaaaaaaaaaaaaaaaaaaaaaaaaaaaaaaaaaaaaaaaaaaaaaaaaaaaaaaaaaaaaaaaaaaaaaaaa

SEQ ID NO: 10445 - RNA, 8787 nt, synthetic construct
  source 1..8787: mol_type = other RNA
aggaaataagagagaaaagaagagtaagaagaaatataagagccaccatggcccctaagaagaagcgtaaagtgagccggatgaaccacgaccaggagttcgacccccctaaggtgtaccctcccgtccccgccgagaagagaaagcccatccgggtcctgagcctgttcgatggcatcgccaccggtctgctggtgctgaaggacctgggcatccaggtggataggtacattgcctccgaggtgtgcgaggactccatcaccgtgggaatggtgcgtcatcagggcaagatcatgtacgtgggcgacgtgcggagcgtgacacagaagcatatccaggagtggggccctttcgacctggtgatcggcggcagcccttgcaatgacctgagcatcgtgaacccagcccggaagggcctgtacgagggaaccggcagactgttcttcgagttttacagactgctgcacgacgcccggcctaaggaaggcgacgaccggcccttcttttggctgttcgagaatgtggtggccatgggagtcagcgacaagcgggatattagccggttcctggagagcaaccccgtgatgatcgatgccaaggaagtgagcgccgcccaccgggccagatacttctggggcaatctgcctggcatgaacagacccctggccagcaccgtgaacgacaagctggagctgcaggagtgcctggagcacggccggatcgccaagttcagcaaggtgagaaccatcaccacccgaagcaacagcatcaaacaaggcaaggaccagcactttcctgtgttcatgaacgagaaggaggacatcctgtggtgtaccgagatggagagagtgttcgggttcccagtccactacacagatgtcagcaacatgtctagactggccagacagagactgctgggaagaagctggtccgtccctgtgatcagacacctgttcgcccctctgaaggagtacttcgcctgcgtgagcagcggcaacagcaacgccaacagccggggccccagcttctctagcggcctggtgccactgtccctgagagggagccacatgggccccatggagatctacaaaaccgtgagcgcctggaagcggcagcctgtgcgcgtgctgagcctgtttcggaatatcgataaagtcctgaaaagcctgggattcctggagagcggctctggctccggcggtggcaccctgaagtacgtggaggatgtgacaaacgtggtcagacgggatgtggagaagtggggccccttcgatctggtgtacggcagcacccaacccctgggcagctcttgtgaccggtgccctggctggtacatgtttcagttccaccggatcctgcagtacgccctgccgagacaggagtcccagcggccattcttttggattttcatggacaacttgctgctgaccgaggatgaccaggaaactaccactcggttcctgcagaccgaagccgtgaccctgcaggacgtgagaggccgggactaccagaacgccatgcgggtgtggtccaacatccctggactgaaaagcaagcacgcacctctgacccctaaagaagaggagtacctgcaggcccaggtgcggagcagaagcaagctggacgcccctaaggtggatctgctggtgaagaattgcctcctgcccctgagagagtacttcaagtatttcagccagaatagtctgcccctgggaggcagcggcggcggcaggcccgagagcgtgaccttcgaggacgtggccgtgtacttcagcgagaacgagtggatcggcctggcccccgcccagagggtgctgtacagggacgtgatgctggagaactacggcgtggtggccagcctggccttccccttccccaagcccgccctgatcagccagctggagaggggcgaggccccctggtgcaaggccccccagggcgccctggacggcgagtgccccaggggcgtgagcggcggcccaagcagcggcgcccctcctcccagcggcggcaggcggcccaagcagcggcgcccctcctcccagcggcggcagcccagccggctccccaacctctaccgaggagggcacctctgagtccgccacccccgagagcggccctggcacctccaccgagcccagcgagggcagcgcacccggcagccctgccggcagccccacctccacagaggagggaaccagcaccgagcccagcgaaggcagcgccccaggcaccagcaccgagcctagtgagcaggagattaaacggatcaacaagatcagaagaagacttgtgaaagacagcaacaccaagaaggccggcaagacaggccccatgaaaaccctgctggttagagtgatgacacccgatctgagagagcggctggaaaacctgagaaagaagcctgaaaatatcccccagcccatcagcaatacatctagagccaacctgaataagctgctgaccgattacaccgaaatgaagaaggcgatcctgcatgtgtactgggaagagttccagaaggaccctgtgggcctgatgagccgggtggcccagcctgccagcaagaagatcgatcagaacaagctgaaacctgagatggacgagaagggcaacctgaccaccgccggctttgcctgctctcagtgtggccagcccctgttcgtgtacaagctggagcaggtgtctgagaagggcaaggcttacaccaactacttcggacggtgcaatgtggccgagcacgaaaagctgatcctgctggcccagctgaagcccgagaaggatagcgacgaagccgtgacatatagcctgggaaagtttgggcagagggccctggatttctacagcattcatgtgaccaaggagtccacccaccccgtgaagcccctggcccagatcgccggaaacagatacgcctccggacctgtgggaaaggccctgagcgacgcatgtatgggcacaatcgcctccttcctgtctaagtaccaggacatcatcatcgaacaccagaaggtggtgaagggcaaccagaagagactggagagcctgcgggagctggccggcaaggaaaacctggaataccctagcgtgaccctgccacctcagcctcacaccaaggagggcgttgatgcctacaacgaagtgatcgcccgggtgcgaatgtgggtgaacctgaacctgtggcagaagctgaagctaagcagagatgatgccaagcctctgctgagactgaagggattcccttcctttcctctggtcgagagacaggccaacgaagtggactggtgggacatggtgtgtaacgtgaagaagctgatcaacgagaaaaaggaggatggcaaggtgttttggcagaatctggctggctacaagagacaggaagccctgagaccatacctgagcagcgaggaagatcggaagaagggaaagaaattcgctcggtaccagctgggcgacctgctgctgcacctggaaaagaagcacggcgaggactggggaaaggtgtacgacgaggcctgggagcggattgacaagaaagtggaaggcctgagcaagcacatcaagctggaagaggaacggagaagcgaggacgcccagagcaaggccgccctgaccgactggctgcgggctaaggccagcttcgtgatcgagggcctgaaggaggccgacaaggacgagttctgcagatgcgagctgaagctgcagaagtggtacggggacctgcggggaaagcccttcgccatcgaagccgagaacagcatcctggacatcagcggcttcagcaagcagtacaactgtgccttcatctggcagaaggacggcgtgaagaagctgaacctgtacctgatcatcaactacttcaagggcggcaagctgcggttcaagaagatcaaacctgaagccttcgaagccaacagattctacaccgtgatcaacaaaaagagcggcgagatcgtgcccatggaggtgaacttcaacttcgacgaccccaacctgatcatcctgcctctggcctttggcaagagacagggcagagaattcatctggaacgacctgctgtccctggaaaccggcagcctgaagctggccaacggaagagtgatcgagaagacactgtacaacagaagaacccggcaggatgagcctgccctgttcgtggccctgaccttcgagcggcgggaggtcctggactcctccaatatcaaaccaatgaacctgatcggcgtggcaagaggcgaaaacatccccgccgtgatcgccctgaccgaccccgagggctgcccactgagccggtttaaggatagcctgggaaacccaacccacatcctgagaatcggcgagagctataaggagaagcagcggaccatccaggccaagaaggaggtggagcagcggagagccggcggctacagccggaagtacgccagcaaagccaagaatctggcagacgatatggtgagaaacaccgctagagatctgctgtactacgccgtgacccaggatgccatgctgatcttcgccaacctgagccggggcttcggccggcagggcaagcggaccttcatggccgagagacagtacacacggatggaggactggctgaccgccaagctggcctacgagggcctgagcaagacctacctgtccaagacactggcccagtacacctccaagacatgcagcaactgtgggtttaccatcaccagcgccgactacgacagggtgctggagaagctgaagaagacagcaacaggctggatgaccacaattaacggcaaggagctgaaggtggagggccagattacctactacaacagatacaagagacagaacgtagtcaaggacctgtccgtcgagctggatagactgagcgaagaatctgtgaacaacgacatctcctcctggacaaagggcagaagcggagaagctctgagcctcctgaagaaaagattctcccatagacccgtgcaggagaagttcgtgtgcctgaactgcggcttcgagacacacgcagccgagcaagccgccctgaacatcgccagatcctggctgttcctgcggagccaggagtacaagaaataccagacaaacaagacaaccggcaacaccgataagagagccttcgtcgagacctggcagtccttttaccggaagaagcttaaggaggtgtggaaacctgccgtgcggtctggcggatctggcggaggctccaccagccccaagaaaaagagaaaagtctaagctgccttctgcggggcttgccttctggccatgcccttcttctctcccttgcacctgtacctcttggtctttgaataaagcctgagtaggaaggctagcaaaaaaaaaaaaaaaaaaaaaaaaaaaaaaaaaaaaaaaaaaaaaaaaaaaaaaaaaaaaaaaaaaaaaaaaaaaaaaaagcccagccggctccccaacctctaccgaggagggcacctctgagtccgccacccccgagagcggccctggcacctccaccgagcccagcgagggcagcgcacccggcagccctgccggcagccccacctccacagaggagggaaccagcaccgagcccagcgaaggcagcgccccaggcaccagcaccgagcctagtgagcaggagattaaacggatcaacaagatcagaagaagacttgtgaaagacagcaacaccaagaaggccggcaagacaggccccatgaaaaccctgctggttagagtgatgacacccgatctgagagagcggctggaaaacctgagaaagaagcctgaaaatatcccccagcccatcagcaatacatctagagccaacctgaataagctgctgaccgattacaccgaaatgaagaaggcgatcctgcatgtgtactgggaagagttccagaaggaccctgtgggcctgatgagccgggtggcccagcctgccagcaagaagatcgatcagaacaagctgaaacctgagatggacgagaagggcaacctgaccaccgccggctttgcctgctctcagtgtggccagcccctgttcgtgtacaagctggagcaggtgtctgagaagggcaaggcttacaccaactacttcggacggtgcaatgtggccgagcacgaaaagctgatcctgctggcccagctgaagcccgagaaggatagcgacgaagccgtgacatatagcctgggaaagtttgggcagagggccctggatttctacagcattcatgtgaccaaggagtccacccaccccgtgaagcccctggcccagatcgccggaaacagatacgcctccggacctgtgggaaaggccctgagcgacgcatgtatgggcacaatcgcctccttcctgtctaagtaccaggacatcatcatcgaacaccagaaggtggtgaagggcaaccagaagagactggagagcctgcgggagctggccggcaaggaaaacctggaataccctagcgtgaccctgccacctcagcctcacaccaaggagggcgttgatgcctacaacgaagtgatcgcccgggtgcgaatgtgggtgaacctgaacctgtggcagaagctgaagctaagcagagatgatgccaagcctctgctgagactgaagggattcccttcctttcctctggtcgagagacaggccaacgaagtggactggtgggacatggtgtgtaacgtgaagaagctgatcaacgagaaaaaggaggatggcaaggtgttttggcagaatctggctggctacaagagacaggaagccctgagaccatacctgagcagcgaggaagatcggaagaagggaaagaaattcgctcggtaccagctgggcgacctgctgctgcacctggaaaagaagcacggcgaggactggggaaaggtgtacgacgaggcctgggagcggattgacaagaaagtggaaggcctgagcaagcacatcaagctggaagaggaacggagaagcgaggacgcccagagcaaggccgccctgaccgactggctgcgggctaaggccagcttcgtgatcgagggcctgaaggaggccgacaaggacgagttctgcagatgcgagctgaagctgcagaagtggtacggggacctgcggggaaagcccttcgccatcgaagccgagaacagcatcctggacatcagcggcttcagcaagcagtacaactgtgccttcatctggcagaaggacggcgtgaagaagctgaacctgtacctgatcatcaactacttcaagggcggcaagctgcggttcaagaagatcaaacctgaagccttcgaagccaacagattctacaccgtgatcaacaaaaagagcggcgagatcgtgcccatggaggtgaacttcaacttcgacgaccccaacctgatcatcctgcctctggcctttggcaagagacagggcagagaattcatctggaacgacctgctgtccctggaaaccggcagcctgaagctggccaacggaagagtgatcgagaagacactgtacaacagaagaacccggcaggatgagcctgccctgttcgtggccctgaccttcgagcggcgggaggtcctggactcctccaatatcaaaccaatgaacctgatcggcgtggcaagaggcgaaaacatccccgccgtgatcgccctgaccgaccccgagggctgcccactgagccggtttaaggatagcctgggaaacccaacccacatcctgagaatcggcgagagctataaggagaagcagcggaccatccaggccaagaaggaggtggagcagcggagagccggcggctacagccggaagtacgccagcaaagccaagaatctggcagacgatatggtgagaaacaccgctagagatctgctgtactacgccgtgacccaggatgccatgctgatcttcgccaacctgagccggggcttcggccggcagggcaagcggaccttcatggccgagagacagtacacacggatggaggactggctgaccgccaagctggcctacgagggcctgagcaagacctacctgtccaagacactggcccagtacacctccaagacatgcagcaactgtgggtttaccatcaccagcgccgactacgacagggtgctggagaagctgaagaagacagcaacaggctggatgaccacaattaacggcaaggagctgaaggtggagggccagattacctactacaacagatacaagagacagaacgtagtcaaggacctgtccgtcgagctggatagactgagcgaagaatctgtgaacaacgacatctcctcctggacaaagggcagaagcggagaagctctgagcctcctgaagaaaagattctcccatagacccgtgcaggagaagttcgtgtgcctgaactgcggcttcgagacacacgcagccgagcaagccgccctgaacatcgccagatcctggctgttcctgcggagccaggagtacaagaaataccagacaaacaagacaaccggcaacaccgataagagagccttcgtcgagacctggcagtccttttaccggaagaagcttaaggaggtgtggaaacctgccgtgcggtctggcggatctggcggaggctccaccagccccaagaaaaagagaaaagtctaagctgccttctgcggggcttgccttctggccatgcccttcttctctcccttgcacctgtacctcttggtctttgaataaagcctgagtaggaaggctagcaaaaaaaaaaaaaaaaaaaaaaaaaaaaaaaaaaaaaaaaaaaaaaaaaaaaaaaaaaaaaaaaaaaaaaaaaaaaaaaa

SEQ ID NO: 10446 - RNA, 8787 nt, synthetic construct
  source 1..8787: mol_type = other RNA
aggaaataagagagaaaagaagagtaagaagaaatataagagccaccatggcccctaagaagaagcgtaaagtgagccggatgaaccacgaccaggagttcgacccccctaaggtgtaccctcccgtccccgccgagaagagaaagcccatccgggtcctgagcctgttcgatggcatcgccaccggtctgctggtgctgaaggacctgggcatccaggtggataggtacattgcctccgaggtgtgcgaggactccatcaccgtgggaatggtgcgtcatcagggcaagatcatgtacgtgggcgacgtgcggagcgtgacacagaagcatatccaggagtggggccctttcgacctggtgatcggcggcagcccttgcaatgacctgagcatcgtgaacccagcccggaagggcctgtacgagggaaccggcagactgttcttcgagttttacagactgctgcacgacgcccggcctaaggaaggcgacgaccggcccttcttttggctgttcgagaatgtggtggccatgggagtcagcgacaagcgggatattagccggttcctggagagcaaccccgtgatgatcgatgccaaggaagtgagcgccgcccaccgggccagatacttctggggcaatctgcctggcatgaacagacccctggccagcaccgtgaacgacaagctggagctgcaggagtgcctggagcacggccggatcgccaagttcagcaaggtgagaaccatcaccacccgaagcaacagcatcaaacaaggcaaggaccagcactttcctgtgttcatgaacgagaaggaggacatcctgtggtgtaccgagatggagagagtgttcgggttcccagtccactacacagatgtcagcaacatgtctagactggccagacagagactgctgggaagaagctggtccgtccctgtgatcagacacctgttcgcccctctgaaggagtacttcgcctgcgtgagcagcggcaacagcaacgccaacagccggggccccagcttctctagcggcctggtgccactgtccctgagagggagccacatgggccccatggagatctacaaaaccgtgagcgcctggaagcggcagcctgtgcgcgtgctgagcctgtttcggaatatcgataaagtcctgaaaagcctgggattcctggagagcggctctggctccggcggtggcaccctgaagtacgtggaggatgtgacaaacgtggtcagacgggatgtggagaagtggggccccttcgatctggtgtacggcagcacccaacccctgggcagctcttgtgaccggtgccctggctggtacatgtttcagttccaccggatcctgcagtacgccctgccgagacaggagtcccagcggccattcttttggattttcatggacaacttgctgctgaccgaggatgaccaggaaactaccactcggttcctgcagaccgaagccgtgaccctgcaggacgtgagaggccgggactaccagaacgccatgcgggtgtggtccaacatccctggactgaaaagcaagcacgcacctctgacccctaaagaagaggagtacctgcaggcccaggtgcggagcagaagcaagctggacgcccctaaggtggatctgctggtgaagaattgcctcctgcccctgagagagtacttcaagtatttcagccagaatagtctgcccctgggaggcagcggcggcggcacccccgagcccgtgaggttcgccgacgtggccgtgtacttcagcctggaggagtggggctgcctgcagcccgcccagagggccctgtacagggacgtgatgagggagacctacggccacctgggcgccctgggcttcaggggcaccaagcccgccctgatcagctgggtggagaaggaggccgagctgtggggccccgacgccagggaccccgaggtgggcgagtgcctgaccgaggccgacggcggcccaagcagcggcgcccctcctcccagcggcggcaggcggcccaagcagcggcgcccctcctcccagcggcggcagcccagccggctccccaacctctaccgaggagggcacctctgagtccgccacccccgagagcggccctggcacctccaccgagcccagcgagggcagcgcacccggcagccctgccggcagccccacctccacagaggagggaaccagcaccgagcccagcgaaggcagcgccccaggcaccagcaccgagcctagtgagcaggagattaaacggatcaacaagatcagaagaagacttgtgaaagacagcaacaccaagaaggccggcaagacaggccccatgaaaaccctgctggttagagtgatgacacccgatctgagagagcggctggaaaacctgagaaagaagcctgaaaatatcccccagcccatcagcaatacatctagagccaacctgaataagctgctgaccgattacaccgaaatgaagaaggcgatcctgcatgtgtactgggaagagttccagaaggaccctgtgggcctgatgagccgggtggcccagcctgccagcaagaagatcgatcagaacaagctgaaacctgagatggacgagaagggcaacctgaccaccgccggctttgcctgctctcagtgtggccagcccctgttcgtgtacaagctggagcaggtgtctgagaagggcaaggcttacaccaactacttcggacggtgcaatgtggccgagcacgaaaagctgatcctgctggcccagctgaagcccgagaaggatagcgacgaagccgtgacatatagcctgggaaagtttgggcagagggccctggatttctacagcattcatgtgaccaaggagtccacccaccccgtgaagcccctggcccagatcgccggaaacagatacgcctccggacctgtgggaaaggccctgagcgacgcatgtatgggcacaatcgcctccttcctgtctaagtaccaggacatcatcatcgaacaccagaaggtggtgaagggcaaccagaagagactggagagcctgcgggagctggccggcaaggaaaacctggaataccctagcgtgaccctgccacctcagcctcacaccaaggagggcgttgatgcctacaacgaagtgatcgcccgggtgcgaatgtgggtgaacctgaacctgtggcagaagctgaagctaagcagagatgatgccaagcctctgctgagactgaagggattcccttcctttcctctggtcgagagacaggccaacgaagtggactggtgggacatggtgtgtaacgtgaagaagctgatcaacgagaaaaaggaggatggcaaggtgttttggcagaatctggctggctacaagagacaggaagccctgagaccatacctgagcagcgaggaagatcggaagaagggaaagaaattcgctcggtaccagctgggcgacctgctgctgcacctggaaaagaagcacggcgaggactggggaaaggtgtacgacgaggcctgggagcggattgacaagaaagtggaaggcctgagcaagcacatcaagctggaagaggaacggagaagcgaggacgcccagagcaaggccgccctgaccgactggctgcgggctaaggccagcttcgtgatcgagggcctgaaggaggccgacaaggacgagttctgcagatgcgagctgaagctgcagaagtggtacggggacctgcggggaaagcccttcgccatcgaagccgagaacagcatcctggacatcagcggcttcagcaagcagtacaactgtgccttcatctggcagaaggacggcgtgaagaagctgaacctgtacctgatcatcaactacttcaagggcggcaagctgcggttcaagaagatcaaacctgaagccttcgaagccaacagattctacaccgtgatcaacaaaaagagcggcgagatcgtgcccatggaggtgaacttcaacttcgacgaccccaacctgatcatcctgcctctggcctttggcaagagacagggcagagaattcatctggaacgacctgctgtccctggaaaccggcagcctgaagctggccaacggaagagtgatcgagaagacactgtacaacagaagaacccggcaggatgagcctgccctgttcgtggccctgaccttcgagcggcgggaggtcctggactcctccaatatcaaaccaatgaacctgatcggcgtggcaagaggcgaaaacatccccgccgtgatcgccctgaccgaccccgagggctgcccactgagccggtttaaggatagcctgggaaacccaacccacatcctgagaatcggcgagagctataaggagaagcagcggaccatccaggccaagaaggaggtggagcagcggagagccggcggctacagccggaagtacgccagcaaagccaagaatctggcagacgatatggtgagaaacaccgctagagatctgctgtactacgccgtgacccaggatgccatgctgatcttcgccaacctgagccggggcttcggccggcagggcaagcggaccttcatggccgagagacagtacacacggatggaggactggctgaccgccaagctggcctacgagggcctgagcaagacctacctgtccaagacactggcccagtacacctccaagacatgcagcaactgtgggtttaccatcaccagcgccgactacgacagggtgctggagaagctgaagaagacagcaacaggctggatgaccacaattaacggcaaggagctgaaggtggagggccagattacctactacaacagatacaagagacagaacgtagtcaaggacctgtccgtcgagctggatagactgagcgaagaatctgtgaacaacgacatctcctcctggacaaagggcagaagcggagaagctctgagcctcctgaagaaaagattctcccatagacccgtgcaggagaagttcgtgtgcctgaactgcggcttcgagacacacgcagccgagcaagccgccctgaacatcgccagatcctggctgttcctgcggagccaggagtacaagaaataccagacaaacaagacaaccggcaacaccgataagagagccttcgtcgagacctggcagtccttttaccggaagaagcttaaggaggtgtggaaacctgccgtgcggtctggcggatctggcggaggctccaccagccccaagaaaaagagaaaagtctaagctgccttctgcggggcttgccttctggccatgcccttcttctctcccttgcacctgtacctcttggtctttgaataaagcctgagtaggaaggctagcaaaaaaaaaaaaaaaaaaaaaaaaaaaaaaaaaaaaaaaaaaaaaaaaaaaaaaaaaaaaaaaaaaaaaaaaaaaaaaaagcccagccggctccccaacctctaccgaggagggcacctctgagtccgccacccccgagagcggccctggcacctccaccgagcccagcgagggcagcgcacccggcagccctgccggcagccccacctccacagaggagggaaccagcaccgagcccagcgaaggcagcgccccaggcaccagcaccgagcctagtgagcaggagattaaacggatcaacaagatcagaagaagacttgtgaaagacagcaacaccaagaaggccggcaagacaggccccatgaaaaccctgctggttagagtgatgacacccgatctgagagagcggctggaaaacctgagaaagaagcctgaaaatatcccccagcccatcagcaatacatctagagccaacctgaataagctgctgaccgattacaccgaaatgaagaaggcgatcctgcatgtgtactgggaagagttccagaaggaccctgtgggcctgatgagccgggtggcccagcctgccagcaagaagatcgatcagaacaagctgaaacctgagatggacgagaagggcaacctgaccaccgccggctttgcctgctctcagtgtggccagcccctgttcgtgtacaagctggagcaggtgtctgagaagggcaaggcttacaccaactacttcggacggtgcaatgtggccgagcacgaaaagctgatcctgctggcccagctgaagcccgagaaggatagcgacgaagccgtgacatatagcctgggaaagtttgggcagagggccctggatttctacagcattcatgtgaccaaggagtccacccaccccgtgaagcccctggcccagatcgccggaaacagatacgcctccggacctgtgggaaaggccctgagcgacgcatgtatgggcacaatcgcctccttcctgtctaagtaccaggacatcatcatcgaacaccagaaggtggtgaagggcaaccagaagagactggagagcctgcgggagctggccggcaaggaaaacctggaataccctagcgtgaccctgccacctcagcctcacaccaaggagggcgttgatgcctacaacgaagtgatcgcccgggtgcgaatgtgggtgaacctgaacctgtggcagaagctgaagctaagcagagatgatgccaagcctctgctgagactgaagggattcccttcctttcctctggtcgagagacaggccaacgaagtggactggtgggacatggtgtgtaacgtgaagaagctgatcaacgagaaaaaggaggatggcaaggtgttttggcagaatctggctggctacaagagacaggaagccctgagaccatacctgagcagcgaggaagatcggaagaagggaaagaaattcgctcggtaccagctgggcgacctgctgctgcacctggaaaagaagcacggcgaggactggggaaaggtgtacgacgaggcctgggagcggattgacaagaaagtggaaggcctgagcaagcacatcaagctggaagaggaacggagaagcgaggacgcccagagcaaggccgccctgaccgactggctgcgggctaaggccagcttcgtgatcgagggcctgaaggaggccgacaaggacgagttctgcagatgcgagctgaagctgcagaagtggtacggggacctgcggggaaagcccttcgccatcgaagccgagaacagcatcctggacatcagcggcttcagcaagcagtacaactgtgccttcatctggcagaaggacggcgtgaagaagctgaacctgtacctgatcatcaactacttcaagggcggcaagctgcggttcaagaagatcaaacctgaagccttcgaagccaacagattctacaccgtgatcaacaaaaagagcggcgagatcgtgcccatggaggtgaacttcaacttcgacgaccccaacctgatcatcctgcctctggcctttggcaagagacagggcagagaattcatctggaacgacctgctgtccctggaaaccggcagcctgaagctggccaacggaagagtgatcgagaagacactgtacaacagaagaacccggcaggatgagcctgccctgttcgtggccctgaccttcgagcggcgggaggtcctggactcctccaatatcaaaccaatgaacctgatcggcgtggcaagaggcgaaaacatccccgccgtgatcgccctgaccgaccccgagggctgcccactgagccggtttaaggatagcctgggaaacccaacccacatcctgagaatcggcgagagctataaggagaagcagcggaccatccaggccaagaaggaggtggagcagcggagagccggcggctacagccggaagtacgccagcaaagccaagaatctggcagacgatatggtgagaaacaccgctagagatctgctgtactacgccgtgacccaggatgccatgctgatcttcgccaacctgagccggggcttcggccggcagggcaagcggaccttcatggccgagagacagtacacacggatggaggactggctgaccgccaagctggcctacgagggcctgagcaagacctacctgtccaagacactggcccagtacacctccaagacatgcagcaactgtgggtttaccatcaccagcgccgactacgacagggtgctggagaagctgaagaagacagcaacaggctggatgaccacaattaacggcaaggagctgaaggtggagggccagattacctactacaacagatacaagagacagaacgtagtcaaggacctgtccgtcgagctggatagactgagcgaagaatctgtgaacaacgacatctcctcctggacaaagggcagaagcggagaagctctgagcctcctgaagaaaagattctcccatagacccgtgcaggagaagttcgtgtgcctgaactgcggcttcgagacacacgcagccgagcaagccgccctgaacatcgccagatcctggctgttcctgcggagccaggagtacaagaaataccagacaaacaagacaaccggcaacaccgataagagagccttcgtcgagacctggcagtccttttaccggaagaagcttaaggaggtgtggaaacctgccgtgcggtctggcggatctggcggaggctccaccagccccaagaaaaagagaaaagtctaagctgccttctgcggggcttgccttctggccatgcccttcttctctcccttgcacctgtacctcttggtctttgaataaagcctgagtaggaaggctagcaaaaaaaaaaaaaaaaaaaaaaaaaaaaaaaaaaaaaaaaaaaaaaaaaaaaaaaaaaaaaaaaaaaaaaaaaaaaaaaa

SEQ ID NO: 10447 - RNA, 8787 nt, synthetic construct
  source 1..8787: mol_type = other RNA
aggaaataagagagaaaagaagagtaagaagaaatataagagccaccatggcccctaagaagaagcgtaaagtgagccggatgaaccacgaccaggagttcgacccccctaaggtgtaccctcccgtccccgccgagaagagaaagcccatccgggtcctgagcctgttcgatggcatcgccaccggtctgctggtgctgaaggacctgggcatccaggtggataggtacattgcctccgaggtgtgcgaggactccatcaccgtgggaatggtgcgtcatcagggcaagatcatgtacgtgggcgacgtgcggagcgtgacacagaagcatatccaggagtggggccctttcgacctggtgatcggcggcagcccttgcaatgacctgagcatcgtgaacccagcccggaagggcctgtacgagggaaccggcagactgttcttcgagttttacagactgctgcacgacgcccggcctaaggaaggcgacgaccggcccttcttttggctgttcgagaatgtggtggccatgggagtcagcgacaagcgggatattagccggttcctggagagcaaccccgtgatgatcgatgccaaggaagtgagcgccgcccaccgggccagatacttctggggcaatctgcctggcatgaacagacccctggccagcaccgtgaacgacaagctggagctgcaggagtgcctggagcacggccggatcgccaagttcagcaaggtgagaaccatcaccacccgaagcaacagcatcaaacaaggcaaggaccagcactttcctgtgttcatgaacgagaaggaggacatcctgtggtgtaccgagatggagagagtgttcgggttcccagtccactacacagatgtcagcaacatgtctagactggccagacagagactgctgggaagaagctggtccgtccctgtgatcagacacctgttcgcccctctgaaggagtacttcgcctgcgtgagcagcggcaacagcaacgccaacagccggggccccagcttctctagcggcctggtgccactgtccctgagagggagccacatgggccccatggagatctacaaaaccgtgagcgcctggaagcggcagcctgtgcgcgtgctgagcctgtttcggaatatcgataaagtcctgaaaagcctgggattcctggagagcggctctggctccggcggtggcaccctgaagtacgtggaggatgtgacaaacgtggtcagacgggatgtggagaagtggggccccttcgatctggtgtacggcagcacccaacccctgggcagctcttgtgaccggtgccctggctggtacatgtttcagttccaccggatcctgcagtacgccctgccgagacaggagtcccagcggccattcttttggattttcatggacaacttgctgctgaccgaggatgaccaggaaactaccactcggttcctgcagaccgaagccgtgaccctgcaggacgtgagaggccgggactaccagaacgccatgcgggtgtggtccaacatccctggactgaaaagcaagcacgcacctctgacccctaaagaagaggagtacctgcaggcccaggtgcggagcagaagcaagctggacgcccctaaggtggatctgctggtgaagaattgcctcctgcccctgagagagtacttcaagtatttcagccagaatagtctgcccctgggaggcagcggcggcggcaccatgaccaccgtgagcagcaccgccaggccccaggagagcgtggccttcgacgacgtggccgtgtacttcaccaagaaggagtgggccatcatggtgcccgaccagagggccctgtacagggacgtgatgctggagaactacgaggccgtggccttcgtggtgccccccaccagcaagcccgccctggtgagccacctggagcagggcaaggagccctgcttcacccagccccagggcgtgggcggcccaagcagcggcgcccctcctcccagcggcggcaggcggcccaagcagcggcgcccctcctcccagcggcggcagcccagccggctccccaacctctaccgaggagggcacctctgagtccgccacccccgagagcggccctggcacctccaccgagcccagcgagggcagcgcacccggcagccctgccggcagccccacctccacagaggagggaaccagcaccgagcccagcgaaggcagcgccccaggcaccagcaccgagcctagtgagcaggagattaaacggatcaacaagatcagaagaagacttgtgaaagacagcaacaccaagaaggccggcaagacaggccccatgaaaaccctgctggttagagtgatgacacccgatctgagagagcggctggaaaacctgagaaagaagcctgaaaatatcccccagcccatcagcaatacatctagagccaacctgaataagctgctgaccgattacaccgaaatgaagaaggcgatcctgcatgtgtactgggaagagttccagaaggaccctgtgggcctgatgagccgggtggcccagcctgccagcaagaagatcgatcagaacaagctgaaacctgagatggacgagaagggcaacctgaccaccgccggctttgcctgctctcagtgtggccagcccctgttcgtgtacaagctggagcaggtgtctgagaagggcaaggcttacaccaactacttcggacggtgcaatgtggccgagcacgaaaagctgatcctgctggcccagctgaagcccgagaaggatagcgacgaagccgtgacatatagcctgggaaagtttgggcagagggccctggatttctacagcattcatgtgaccaaggagtccacccaccccgtgaagcccctggcccagatcgccggaaacagatacgcctccggacctgtgggaaaggccctgagcgacgcatgtatgggcacaatcgcctccttcctgtctaagtaccaggacatcatcatcgaacaccagaaggtggtgaagggcaaccagaagagactggagagcctgcgggagctggccggcaaggaaaacctggaataccctagcgtgaccctgccacctcagcctcacaccaaggagggcgttgatgcctacaacgaagtgatcgcccgggtgcgaatgtgggtgaacctgaacctgtggcagaagctgaagctaagcagagatgatgccaagcctctgctgagactgaagggattcccttcctttcctctggtcgagagacaggccaacgaagtggactggtgggacatggtgtgtaacgtgaagaagctgatcaacgagaaaaaggaggatggcaaggtgttttggcagaatctggctggctacaagagacaggaagccctgagaccatacctgagcagcgaggaagatcggaagaagggaaagaaattcgctcggtaccagctgggcgacctgctgctgcacctggaaaagaagcacggcgaggactggggaaaggtgtacgacgaggcctgggagcggattgacaagaaagtggaaggcctgagcaagcacatcaagctggaagaggaacggagaagcgaggacgcccagagcaaggccgccctgaccgactggctgcgggctaaggccagcttcgtgatcgagggcctgaaggaggccgacaaggacgagttctgcagatgcgagctgaagctgcagaagtggtacggggacctgcggggaaagcccttcgccatcgaagccgagaacagcatcctggacatcagcggcttcagcaagcagtacaactgtgccttcatctggcagaaggacggcgtgaagaagctgaacctgtacctgatcatcaactacttcaagggcggcaagctgcggttcaagaagatcaaacctgaagccttcgaagccaacagattctacaccgtgatcaacaaaaagagcggcgagatcgtgcccatggaggtgaacttcaacttcgacgaccccaacctgatcatcctgcctctggcctttggcaagagacagggcagagaattcatctggaacgacctgctgtccctggaaaccggcagcctgaagctggccaacggaagagtgatcgagaagacactgtacaacagaagaacccggcaggatgagcctgccctgttcgtggccctgaccttcgagcggcgggaggtcctggactcctccaatatcaaaccaatgaacctgatcggcgtggcaagaggcgaaaacatccccgccgtgatcgccctgaccgaccccgagggctgcccactgagccggtttaaggatagcctgggaaacccaacccacatcctgagaatcggcgagagctataaggagaagcagcggaccatccaggccaagaaggaggtggagcagcggagagccggcggctacagccggaagtacgccagcaaagccaagaatctggcagacgatatggtgagaaacaccgctagagatctgctgtactacgccgtgacccaggatgccatgctgatcttcgccaacctgagccggggcttcggccggcagggcaagcggaccttcatggccgagagacagtacacacggatggaggactggctgaccgccaagctggcctacgagggcctgagcaagacctacctgtccaagacactggcccagtacacctccaagacatgcagcaactgtgggtttaccatcaccagcgccgactacgacagggtgctggagaagctgaagaagacagcaacaggctggatgaccacaattaacggcaaggagctgaaggtggagggccagattacctactacaacagatacaagagacagaacgtagtcaaggacctgtccgtcgagctggatagactgagcgaagaatctgtgaacaacgacatctcctcctggacaaagggcagaagcggagaagctctgagcctcctgaagaaaagattctcccatagacccgtgcaggagaagttcgtgtgcctgaactgcggcttcgagacacacgcagccgagcaagccgccctgaacatcgccagatcctggctgttcctgcggagccaggagtacaagaaataccagacaaacaagacaaccggcaacaccgataagagagccttcgtcgagacctggcagtccttttaccggaagaagcttaaggaggtgtggaaacctgccgtgcggtctggcggatctggcggaggctccaccagccccaagaaaaagagaaaagtctaagctgccttctgcggggcttgccttctggccatgcccttcttctctcccttgcacctgtacctcttggtctttgaataaagcctgagtaggaaggctagcaaaaaaaaaaaaaaaaaaaaaaaaaaaaaaaaaaaaaaaaaaaaaaaaaaaaaaaaaaaaaaaaaaaaaaaaaaaaaaaagcccagccggctccccaacctctaccgaggagggcacctctgagtccgccacccccgagagcggccctggcacctccaccgagcccagcgagggcagcgcacccggcagccctgccggcagccccacctccacagaggagggaaccagcaccgagcccagcgaaggcagcgccccaggcaccagcaccgagcctagtgagcaggagattaaacggatcaacaagatcagaagaagacttgtgaaagacagcaacaccaagaaggccggcaagacaggccccatgaaaaccctgctggttagagtgatgacacccgatctgagagagcggctggaaaacctgagaaagaagcctgaaaatatcccccagcccatcagcaatacatctagagccaacctgaataagctgctgaccgattacaccgaaatgaagaaggcgatcctgcatgtgtactgggaagagttccagaaggaccctgtgggcctgatgagccgggtggcccagcctgccagcaagaagatcgatcagaacaagctgaaacctgagatggacgagaagggcaacctgaccaccgccggctttgcctgctctcagtgtggccagcccctgttcgtgtacaagctggagcaggtgtctgagaagggcaaggcttacaccaactacttcggacggtgcaatgtggccgagcacgaaaagctgatcctgctggcccagctgaagcccgagaaggatagcgacgaagccgtgacatatagcctgggaaagtttgggcagagggccctggatttctacagcattcatgtgaccaaggagtccacccaccccgtgaagcccctggcccagatcgccggaaacagatacgcctccggacctgtgggaaaggccctgagcgacgcatgtatgggcacaatcgcctccttcctgtctaagtaccaggacatcatcatcgaacaccagaaggtggtgaagggcaaccagaagagactggagagcctgcgggagctggccggcaaggaaaacctggaataccctagcgtgaccctgccacctcagcctcacaccaaggagggcgttgatgcctacaacgaagtgatcgcccgggtgcgaatgtgggtgaacctgaacctgtggcagaagctgaagctaagcagagatgatgccaagcctctgctgagactgaagggattcccttcctttcctctggtcgagagacaggccaacgaagtggactggtgggacatggtgtgtaacgtgaagaagctgatcaacgagaaaaaggaggatggcaaggtgttttggcagaatctggctggctacaagagacaggaagccctgagaccatacctgagcagcgaggaagatcggaagaagggaaagaaattcgctcggtaccagctgggcgacctgctgctgcacctggaaaagaagcacggcgaggactggggaaaggtgtacgacgaggcctgggagcggattgacaagaaagtggaaggcctgagcaagcacatcaagctggaagaggaacggagaagcgaggacgcccagagcaaggccgccctgaccgactggctgcgggctaaggccagcttcgtgatcgagggcctgaaggaggccgacaaggacgagttctgcagatgcgagctgaagctgcagaagtggtacggggacctgcggggaaagcccttcgccatcgaagccgagaacagcatcctggacatcagcggcttcagcaagcagtacaactgtgccttcatctggcagaaggacggcgtgaagaagctgaacctgtacctgatcatcaactacttcaagggcggcaagctgcggttcaagaagatcaaacctgaagccttcgaagccaacagattctacaccgtgatcaacaaaaagagcggcgagatcgtgcccatggaggtgaacttcaacttcgacgaccccaacctgatcatcctgcctctggcctttggcaagagacagggcagagaattcatctggaacgacctgctgtccctggaaaccggcagcctgaagctggccaacggaagagtgatcgagaagacactgtacaacagaagaacccggcaggatgagcctgccctgttcgtggccctgaccttcgagcggcgggaggtcctggactcctccaatatcaaaccaatgaacctgatcggcgtggcaagaggcgaaaacatccccgccgtgatcgccctgaccgaccccgagggctgcccactgagccggtttaaggatagcctgggaaacccaacccacatcctgagaatcggcgagagctataaggagaagcagcggaccatccaggccaagaaggaggtggagcagcggagagccggcggctacagccggaagtacgccagcaaagccaagaatctggcagacgatatggtgagaaacaccgctagagatctgctgtactacgccgtgacccaggatgccatgctgatcttcgccaacctgagccggggcttcggccggcagggcaagcggaccttcatggccgagagacagtacacacggatggaggactggctgaccgccaagctggcctacgagggcctgagcaagacctacctgtccaagacactggcccagtacacctccaagacatgcagcaactgtgggtttaccatcaccagcgccgactacgacagggtgctggagaagctgaagaagacagcaacaggctggatgaccacaattaacggcaaggagctgaaggtggagggccagattacctactacaacagatacaagagacagaacgtagtcaaggacctgtccgtcgagctggatagactgagcgaagaatctgtgaacaacgacatctcctcctggacaaagggcagaagcggagaagctctgagcctcctgaagaaaagattctcccatagacccgtgcaggagaagttcgtgtgcctgaactgcggcttcgagacacacgcagccgagcaagccgccctgaacatcgccagatcctggctgttcctgcggagccaggagtacaagaaataccagacaaacaagacaaccggcaacaccgataagagagccttcgtcgagacctggcagtccttttaccggaagaagcttaaggaggtgtggaaacctgccgtgcggtctggcggatctggcggaggctccaccagccccaagaaaaagagaaaagtctaagctgccttctgcggggcttgccttctggccatgcccttcttctctcccttgcacctgtacctcttggtctttgaataaagcctgagtaggaaggctagcaaaaaaaaaaaaaaaaaaaaaaaaaaaaaaaaaaaaaaaaaaaaaaaaaaaaaaaaaaaaaaaaaaaaaaaaaaaaaaaa

SEQ ID NO: 10448 - RNA, 8787 nt, synthetic construct
  source 1..8787: mol_type = other RNA
aggaaataagagagaaaagaagagtaagaagaaatataagagccaccatggcccctaagaagaagcgtaaagtgagccggatgaaccacgaccaggagttcgacccccctaaggtgtaccctcccgtccccgccgagaagagaaagcccatccgggtcctgagcctgttcgatggcatcgccaccggtctgctggtgctgaaggacctgggcatccaggtggataggtacattgcctccgaggtgtgcgaggactccatcaccgtgggaatggtgcgtcatcagggcaagatcatgtacgtgggcgacgtgcggagcgtgacacagaagcatatccaggagtggggccctttcgacctggtgatcggcggcagcccttgcaatgacctgagcatcgtgaacccagcccggaagggcctgtacgagggaaccggcagactgttcttcgagttttacagactgctgcacgacgcccggcctaaggaaggcgacgaccggcccttcttttggctgttcgagaatgtggtggccatgggagtcagcgacaagcgggatattagccggttcctggagagcaaccccgtgatgatcgatgccaaggaagtgagcgccgcccaccgggccagatacttctggggcaatctgcctggcatgaacagacccctggccagcaccgtgaacgacaagctggagctgcaggagtgcctggagcacggccggatcgccaagttcagcaaggtgagaaccatcaccacccgaagcaacagcatcaaacaaggcaaggaccagcactttcctgtgttcatgaacgagaaggaggacatcctgtggtgtaccgagatggagagagtgttcgggttcccagtccactacacagatgtcagcaacatgtctagactggccagacagagactgctgggaagaagctggtccgtccctgtgatcagacacctgttcgcccctctgaaggagtacttcgcctgcgtgagcagcggcaacagcaacgccaacagccggggccccagcttctctagcggcctggtgccactgtccctgagagggagccacatgggccccatggagatctacaaaaccgtgagcgcctggaagcggcagcctgtgcgcgtgctgagcctgtttcggaatatcgataaagtcctgaaaagcctgggattcctggagagcggctctggctccggcggtggcaccctgaagtacgtggaggatgtgacaaacgtggtcagacgggatgtggagaagtggggccccttcgatctggtgtacggcagcacccaacccctgggcagctcttgtgaccggtgccctggctggtacatgtttcagttccaccggatcctgcagtacgccctgccgagacaggagtcccagcggccattcttttggattttcatggacaacttgctgctgaccgaggatgaccaggaaactaccactcggttcctgcagaccgaagccgtgaccctgcaggacgtgagaggccgggactaccagaacgccatgcgggtgtggtccaacatccctggactgaaaagcaagcacgcacctctgacccctaaagaagaggagtacctgcaggcccaggtgcggagcagaagcaagctggacgcccctaaggtggatctgctggtgaagaattgcctcctgcccctgagagagtacttcaagtatttcagccagaatagtctgcccctgggaggcagcggcggcggcttccagggccccgtgaccttcagggacgtggccatcgacttcagccaggaggagtggaagtggctgcagcccgcccagagggacctgtacaggtgcgtgatgctggagaactacggccacctggtgagcctgggcctgagcatcagcaagcccgacgtggtgagcctgctggagcagggcaaggagccctggctggagcagggcgacgtgaggaggaacctgttcagcgtgagccagagcaacggcggcccaagcagcggcgcccctcctcccagcggcggcaggcggcccaagcagcggcgcccctcctcccagcggcggcagcccagccggctccccaacctctaccgaggagggcacctctgagtccgccacccccgagagcggccctggcacctccaccgagcccagcgagggcagcgcacccggcagccctgccggcagccccacctccacagaggagggaaccagcaccgagcccagcgaaggcagcgccccaggcaccagcaccgagcctagtgagcaggagattaaacggatcaacaagatcagaagaagacttgtgaaagacagcaacaccaagaaggccggcaagacaggccccatgaaaaccctgctggttagagtgatgacacccgatctgagagagcggctggaaaacctgagaaagaagcctgaaaatatcccccagcccatcagcaatacatctagagccaacctgaataagctgctgaccgattacaccgaaatgaagaaggcgatcctgcatgtgtactgggaagagttccagaaggaccctgtgggcctgatgagccgggtggcccagcctgccagcaagaagatcgatcagaacaagctgaaacctgagatggacgagaagggcaacctgaccaccgccggctttgcctgctctcagtgtggccagcccctgttcgtgtacaagctggagcaggtgtctgagaagggcaaggcttacaccaactacttcggacggtgcaatgtggccgagcacgaaaagctgatcctgctggcccagctgaagcccgagaaggatagcgacgaagccgtgacatatagcctgggaaagtttgggcagagggccctggatttctacagcattcatgtgaccaaggagtccacccaccccgtgaagcccctggcccagatcgccggaaacagatacgcctccggacctgtgggaaaggccctgagcgacgcatgtatgggcacaatcgcctccttcctgtctaagtaccaggacatcatcatcgaacaccagaaggtggtgaagggcaaccagaagagactggagagcctgcgggagctggccggcaaggaaaacctggaataccctagcgtgaccctgccacctcagcctcacaccaaggagggcgttgatgcctacaacgaagtgatcgcccgggtgcgaatgtgggtgaacctgaacctgtggcagaagctgaagctaagcagagatgatgccaagcctctgctgagactgaagggattcccttcctttcctctggtcgagagacaggccaacgaagtggactggtgggacatggtgtgtaacgtgaagaagctgatcaacgagaaaaaggaggatggcaaggtgttttggcagaatctggctggctacaagagacaggaagccctgagaccatacctgagcagcgaggaagatcggaagaagggaaagaaattcgctcggtaccagctgggcgacctgctgctgcacctggaaaagaagcacggcgaggactggggaaaggtgtacgacgaggcctgggagcggattgacaagaaagtggaaggcctgagcaagcacatcaagctggaagaggaacggagaagcgaggacgcccagagcaaggccgccctgaccgactggctgcgggctaaggccagcttcgtgatcgagggcctgaaggaggccgacaaggacgagttctgcagatgcgagctgaagctgcagaagtggtacggggacctgcggggaaagcccttcgccatcgaagccgagaacagcatcctggacatcagcggcttcagcaagcagtacaactgtgccttcatctggcagaaggacggcgtgaagaagctgaacctgtacctgatcatcaactacttcaagggcggcaagctgcggttcaagaagatcaaacctgaagccttcgaagccaacagattctacaccgtgatcaacaaaaagagcggcgagatcgtgcccatggaggtgaacttcaacttcgacgaccccaacctgatcatcctgcctctggcctttggcaagagacagggcagagaattcatctggaacgacctgctgtccctggaaaccggcagcctgaagctggccaacggaagagtgatcgagaagacactgtacaacagaagaacccggcaggatgagcctgccctgttcgtggccctgaccttcgagcggcgggaggtcctggactcctccaatatcaaaccaatgaacctgatcggcgtggcaagaggcgaaaacatccccgccgtgatcgccctgaccgaccccgagggctgcccactgagccggtttaaggatagcctgggaaacccaacccacatcctgagaatcggcgagagctataaggagaagcagcggaccatccaggccaagaaggaggtggagcagcggagagccggcggctacagccggaagtacgccagcaaagccaagaatctggcagacgatatggtgagaaacaccgctagagatctgctgtactacgccgtgacccaggatgccatgctgatcttcgccaacctgagccggggcttcggccggcagggcaagcggaccttcatggccgagagacagtacacacggatggaggactggctgaccgccaagctggcctacgagggcctgagcaagacctacctgtccaagacactggcccagtacacctccaagacatgcagcaactgtgggtttaccatcaccagcgccgactacgacagggtgctggagaagctgaagaagacagcaacaggctggatgaccacaattaacggcaaggagctgaaggtggagggccagattacctactacaacagatacaagagacagaacgtagtcaaggacctgtccgtcgagctggatagactgagcgaagaatctgtgaacaacgacatctcctcctggacaaagggcagaagcggagaagctctgagcctcctgaagaaaagattctcccatagacccgtgcaggagaagttcgtgtgcctgaactgcggcttcgagacacacgcagccgagcaagccgccctgaacatcgccagatcctggctgttcctgcggagccaggagtacaagaaataccagacaaacaagacaaccggcaacaccgataagagagccttcgtcgagacctggcagtccttttaccggaagaagcttaaggaggtgtggaaacctgccgtgcggtctggcggatctggcggaggctccaccagccccaagaaaaagagaaaagtctaagctgccttctgcggggcttgccttctggccatgcccttcttctctcccttgcacctgtacctcttggtctttgaataaagcctgagtaggaaggctagcaaaaaaaaaaaaaaaaaaaaaaaaaaaaaaaaaaaaaaaaaaaaaaaaaaaaaaaaaaaaaaaaaaaaaaaaaaaaaaaagcccagccggctccccaacctctaccgaggagggcacctctgagtccgccacccccgagagcggccctggcacctccaccgagcccagcgagggcagcgcacccggcagccctgccggcagccccacctccacagaggagggaaccagcaccgagcccagcgaaggcagcgccccaggcaccagcaccgagcctagtgagcaggagattaaacggatcaacaagatcagaagaagacttgtgaaagacagcaacaccaagaaggccggcaagacaggccccatgaaaaccctgctggttagagtgatgacacccgatctgagagagcggctggaaaacctgagaaagaagcctgaaaatatcccccagcccatcagcaatacatctagagccaacctgaataagctgctgaccgattacaccgaaatgaagaaggcgatcctgcatgtgtactgggaagagttccagaaggaccctgtgggcctgatgagccgggtggcccagcctgccagcaagaagatcgatcagaacaagctgaaacctgagatggacgagaagggcaacctgaccaccgccggctttgcctgctctcagtgtggccagcccctgttcgtgtacaagctggagcaggtgtctgagaagggcaaggcttacaccaactacttcggacggtgcaatgtggccgagcacgaaaagctgatcctgctggcccagctgaagcccgagaaggatagcgacgaagccgtgacatatagcctgggaaagtttgggcagagggccctggatttctacagcattcatgtgaccaaggagtccacccaccccgtgaagcccctggcccagatcgccggaaacagatacgcctccggacctgtgggaaaggccctgagcgacgcatgtatgggcacaatcgcctccttcctgtctaagtaccaggacatcatcatcgaacaccagaaggtggtgaagggcaaccagaagagactggagagcctgcgggagctggccggcaaggaaaacctggaataccctagcgtgaccctgccacctcagcctcacaccaaggagggcgttgatgcctacaacgaagtgatcgcccgggtgcgaatgtgggtgaacctgaacctgtggcagaagctgaagctaagcagagatgatgccaagcctctgctgagactgaagggattcccttcctttcctctggtcgagagacaggccaacgaagtggactggtgggacatggtgtgtaacgtgaagaagctgatcaacgagaaaaaggaggatggcaaggtgttttggcagaatctggctggctacaagagacaggaagccctgagaccatacctgagcagcgaggaagatcggaagaagggaaagaaattcgctcggtaccagctgggcgacctgctgctgcacctggaaaagaagcacggcgaggactggggaaaggtgtacgacgaggcctgggagcggattgacaagaaagtggaaggcctgagcaagcacatcaagctggaagaggaacggagaagcgaggacgcccagagcaaggccgccctgaccgactggctgcgggctaaggccagcttcgtgatcgagggcctgaaggaggccgacaaggacgagttctgcagatgcgagctgaagctgcagaagtggtacggggacctgcggggaaagcccttcgccatcgaagccgagaacagcatcctggacatcagcggcttcagcaagcagtacaactgtgccttcatctggcagaaggacggcgtgaagaagctgaacctgtacctgatcatcaactacttcaagggcggcaagctgcggttcaagaagatcaaacctgaagccttcgaagccaacagattctacaccgtgatcaacaaaaagagcggcgagatcgtgcccatggaggtgaacttcaacttcgacgaccccaacctgatcatcctgcctctggcctttggcaagagacagggcagagaattcatctggaacgacctgctgtccctggaaaccggcagcctgaagctggccaacggaagagtgatcgagaagacactgtacaacagaagaacccggcaggatgagcctgccctgttcgtggccctgaccttcgagcggcgggaggtcctggactcctccaatatcaaaccaatgaacctgatcggcgtggcaagaggcgaaaacatccccgccgtgatcgccctgaccgaccccgagggctgcccactgagccggtttaaggatagcctgggaaacccaacccacatcctgagaatcggcgagagctataaggagaagcagcggaccatccaggccaagaaggaggtggagcagcggagagccggcggctacagccggaagtacgccagcaaagccaagaatctggcagacgatatggtgagaaacaccgctagagatctgctgtactacgccgtgacccaggatgccatgctgatcttcgccaacctgagccggggcttcggccggcagggcaagcggaccttcatggccgagagacagtacacacggatggaggactggctgaccgccaagctggcctacgagggcctgagcaagacctacctgtccaagacactggcccagtacacctccaagacatgcagcaactgtgggtttaccatcaccagcgccgactacgacagggtgctggagaagctgaagaagacagcaacaggctggatgaccacaattaacggcaaggagctgaaggtggagggccagattacctactacaacagatacaagagacagaacgtagtcaaggacctgtccgtcgagctggatagactgagcgaagaatctgtgaacaacgacatctcctcctggacaaagggcagaagcggagaagctctgagcctcctgaagaaaagattctcccatagacccgtgcaggagaagttcgtgtgcctgaactgcggcttcgagacacacgcagccgagcaagccgccctgaacatcgccagatcctggctgttcctgcggagccaggagtacaagaaataccagacaaacaagacaaccggcaacaccgataagagagccttcgtcgagacctggcagtccttttaccggaagaagcttaaggaggtgtggaaacctgccgtgcggtctggcggatctggcggaggctccaccagccccaagaaaaagagaaaagtctaagctgccttctgcggggcttgccttctggccatgcccttcttctctcccttgcacctgtacctcttggtctttgaataaagcctgagtaggaaggctagcaaaaaaaaaaaaaaaaaaaaaaaaaaaaaaaaaaaaaaaaaaaaaaaaaaaaaaaaaaaaaaaaaaaaaaaaaaaaaaaa

SEQ ID NO: 10449 - RNA, 8787 nt, synthetic construct
  source 1..8787: mol_type = other RNA
aggaaataagagagaaaagaagagtaagaagaaatataagagccaccatggcccctaagaagaagcgtaaagtgagccggatgaaccacgaccaggagttcgacccccctaaggtgtaccctcccgtccccgccgagaagagaaagcccatccgggtcctgagcctgttcgatggcatcgccaccggtctgctggtgctgaaggacctgggcatccaggtggataggtacattgcctccgaggtgtgcgaggactccatcaccgtgggaatggtgcgtcatcagggcaagatcatgtacgtgggcgacgtgcggagcgtgacacagaagcatatccaggagtggggccctttcgacctggtgatcggcggcagcccttgcaatgacctgagcatcgtgaacccagcccggaagggcctgtacgagggaaccggcagactgttcttcgagttttacagactgctgcacgacgcccggcctaaggaaggcgacgaccggcccttcttttggctgttcgagaatgtggtggccatgggagtcagcgacaagcgggatattagccggttcctggagagcaaccccgtgatgatcgatgccaaggaagtgagcgccgcccaccgggccagatacttctggggcaatctgcctggcatgaacagacccctggccagcaccgtgaacgacaagctggagctgcaggagtgcctggagcacggccggatcgccaagttcagcaaggtgagaaccatcaccacccgaagcaacagcatcaaacaaggcaaggaccagcactttcctgtgttcatgaacgagaaggaggacatcctgtggtgtaccgagatggagagagtgttcgggttcccagtccactacacagatgtcagcaacatgtctagactggccagacagagactgctgggaagaagctggtccgtccctgtgatcagacacctgttcgcccctctgaaggagtacttcgcctgcgtgagcagcggcaacagcaacgccaacagccggggccccagcttctctagcggcctggtgccactgtccctgagagggagccacatgggccccatggagatctacaaaaccgtgagcgcctggaagcggcagcctgtgcgcgtgctgagcctgtttcggaatatcgataaagtcctgaaaagcctgggattcctggagagcggctctggctccggcggtggcaccctgaagtacgtggaggatgtgacaaacgtggtcagacgggatgtggagaagtggggccccttcgatctggtgtacggcagcacccaacccctgggcagctcttgtgaccggtgccctggctggtacatgtttcagttccaccggatcctgcagtacgccctgccgagacaggagtcccagcggccattcttttggattttcatggacaacttgctgctgaccgaggatgaccaggaaactaccactcggttcctgcagaccgaagccgtgaccctgcaggacgtgagaggccgggactaccagaacgccatgcgggtgtggtccaacatccctggactgaaaagcaagcacgcacctctgacccctaaagaagaggagtacctgcaggcccaggtgcggagcagaagcaagctggacgcccctaaggtggatctgctggtgaagaattgcctcctgcccctgagagagtacttcaagtatttcagccagaatagtctgcccctgggaggcagcggcggcggcgcccagatgctggtgaccttcaaggacgtggccgtgaccttcacccaggaggagtggaggcagctggacctgacccagaggaccctgtacagggaggtgatgctggagacctgcggcctgctggtgagcctgggccacagggtgcccaagcccgagctggtgcacctgctggagcacggccaggagctgtggaccgtgaagaggggcctgagcgaccccacctgcgccggcgacaggacccagggcggcccaagcagcggcgcccctcctcccagcggcggcaggcggcccaagcagcggcgcccctcctcccagcggcggcagcccagccggctccccaacctctaccgaggagggcacctctgagtccgccacccccgagagcggccctggcacctccaccgagcccagcgagggcagcgcacccggcagccctgccggcagccccacctccacagaggagggaaccagcaccgagcccagcgaaggcagcgccccaggcaccagcaccgagcctagtgagcaggagattaaacggatcaacaagatcagaagaagacttgtgaaagacagcaacaccaagaaggccggcaagacaggccccatgaaaaccctgctggttagagtgatgacacccgatctgagagagcggctggaaaacctgagaaagaagcctgaaaatatcccccagcccatcagcaatacatctagagccaacctgaataagctgctgaccgattacaccgaaatgaagaaggcgatcctgcatgtgtactgggaagagttccagaaggaccctgtgggcctgatgagccgggtggcccagcctgccagcaagaagatcgatcagaacaagctgaaacctgagatggacgagaagggcaacctgaccaccgccggctttgcctgctctcagtgtggccagcccctgttcgtgtacaagctggagcaggtgtctgagaagggcaaggcttacaccaactacttcggacggtgcaatgtggccgagcacgaaaagctgatcctgctggcccagctgaagcccgagaaggatagcgacgaagccgtgacatatagcctgggaaagtttgggcagagggccctggatttctacagcattcatgtgaccaaggagtccacccaccccgtgaagcccctggcccagatcgccggaaacagatacgcctccggacctgtgggaaaggccctgagcgacgcatgtatgggcacaatcgcctccttcctgtctaagtaccaggacatcatcatcgaacaccagaaggtggtgaagggcaaccagaagagactggagagcctgcgggagctggccggcaaggaaaacctggaataccctagcgtgaccctgccacctcagcctcacaccaaggagggcgttgatgcctacaacgaagtgatcgcccgggtgcgaatgtgggtgaacctgaacctgtggcagaagctgaagctaagcagagatgatgccaagcctctgctgagactgaagggattcccttcctttcctctggtcgagagacaggccaacgaagtggactggtgggacatggtgtgtaacgtgaagaagctgatcaacgagaaaaaggaggatggcaaggtgttttggcagaatctggctggctacaagagacaggaagccctgagaccatacctgagcagcgaggaagatcggaagaagggaaagaaattcgctcggtaccagctgggcgacctgctgctgcacctggaaaagaagcacggcgaggactggggaaaggtgtacgacgaggcctgggagcggattgacaagaaagtggaaggcctgagcaagcacatcaagctggaagaggaacggagaagcgaggacgcccagagcaaggccgccctgaccgactggctgcgggctaaggccagcttcgtgatcgagggcctgaaggaggccgacaaggacgagttctgcagatgcgagctgaagctgcagaagtggtacggggacctgcggggaaagcccttcgccatcgaagccgagaacagcatcctggacatcagcggcttcagcaagcagtacaactgtgccttcatctggcagaaggacggcgtgaagaagctgaacctgtacctgatcatcaactacttcaagggcggcaagctgcggttcaagaagatcaaacctgaagccttcgaagccaacagattctacaccgtgatcaacaaaaagagcggcgagatcgtgcccatggaggtgaacttcaacttcgacgaccccaacctgatcatcctgcctctggcctttggcaagagacagggcagagaattcatctggaacgacctgctgtccctggaaaccggcagcctgaagctggccaacggaagagtgatcgagaagacactgtacaacagaagaacccggcaggatgagcctgccctgttcgtggccctgaccttcgagcggcgggaggtcctggactcctccaatatcaaaccaatgaacctgatcggcgtggcaagaggcgaaaacatccccgccgtgatcgccctgaccgaccccgagggctgcccactgagccggtttaaggatagcctgggaaacccaacccacatcctgagaatcggcgagagctataaggagaagcagcggaccatccaggccaagaaggaggtggagcagcggagagccggcggctacagccggaagtacgccagcaaagccaagaatctggcagacgatatggtgagaaacaccgctagagatctgctgtactacgccgtgacccaggatgccatgctgatcttcgccaacctgagccggggcttcggccggcagggcaagcggaccttcatggccgagagacagtacacacggatggaggactggctgaccgccaagctggcctacgagggcctgagcaagacctacctgtccaagacactggcccagtacacctccaagacatgcagcaactgtgggtttaccatcaccagcgccgactacgacagggtgctggagaagctgaagaagacagcaacaggctggatgaccacaattaacggcaaggagctgaaggtggagggccagattacctactacaacagatacaagagacagaacgtagtcaaggacctgtccgtcgagctggatagactgagcgaagaatctgtgaacaacgacatctcctcctggacaaagggcagaagcggagaagctctgagcctcctgaagaaaagattctcccatagacccgtgcaggagaagttcgtgtgcctgaactgcggcttcgagacacacgcagccgagcaagccgccctgaacatcgccagatcctggctgttcctgcggagccaggagtacaagaaataccagacaaacaagacaaccggcaacaccgataagagagccttcgtcgagacctggcagtccttttaccggaagaagcttaaggaggtgtggaaacctgccgtgcggtctggcggatctggcggaggctccaccagccccaagaaaaagagaaaagtctaagctgccttctgcggggcttgccttctggccatgcccttcttctctcccttgcacctgtacctcttggtctttgaataaagcctgagtaggaaggctagcaaaaaaaaaaaaaaaaaaaaaaaaaaaaaaaaaaaaaaaaaaaaaaaaaaaaaaaaaaaaaaaaaaaaaaaaaaaaaaaagcccagccggctccccaacctctaccgaggagggcacctctgagtccgccacccccgagagcggccctggcacctccaccgagcccagcgagggcagcgcacccggcagccctgccggcagccccacctccacagaggagggaaccagcaccgagcccagcgaaggcagcgccccaggcaccagcaccgagcctagtgagcaggagattaaacggatcaacaagatcagaagaagacttgtgaaagacagcaacaccaagaaggccggcaagacaggccccatgaaaaccctgctggttagagtgatgacacccgatctgagagagcggctggaaaacctgagaaagaagcctgaaaatatcccccagcccatcagcaatacatctagagccaacctgaataagctgctgaccgattacaccgaaatgaagaaggcgatcctgcatgtgtactgggaagagttccagaaggaccctgtgggcctgatgagccgggtggcccagcctgccagcaagaagatcgatcagaacaagctgaaacctgagatggacgagaagggcaacctgaccaccgccggctttgcctgctctcagtgtggccagcccctgttcgtgtacaagctggagcaggtgtctgagaagggcaaggcttacaccaactacttcggacggtgcaatgtggccgagcacgaaaagctgatcctgctggcccagctgaagcccgagaaggatagcgacgaagccgtgacatatagcctgggaaagtttgggcagagggccctggatttctacagcattcatgtgaccaaggagtccacccaccccgtgaagcccctggcccagatcgccggaaacagatacgcctccggacctgtgggaaaggccctgagcgacgcatgtatgggcacaatcgcctccttcctgtctaagtaccaggacatcatcatcgaacaccagaaggtggtgaagggcaaccagaagagactggagagcctgcgggagctggccggcaaggaaaacctggaataccctagcgtgaccctgccacctcagcctcacaccaaggagggcgttgatgcctacaacgaagtgatcgcccgggtgcgaatgtgggtgaacctgaacctgtggcagaagctgaagctaagcagagatgatgccaagcctctgctgagactgaagggattcccttcctttcctctggtcgagagacaggccaacgaagtggactggtgggacatggtgtgtaacgtgaagaagctgatcaacgagaaaaaggaggatggcaaggtgttttggcagaatctggctggctacaagagacaggaagccctgagaccatacctgagcagcgaggaagatcggaagaagggaaagaaattcgctcggtaccagctgggcgacctgctgctgcacctggaaaagaagcacggcgaggactggggaaaggtgtacgacgaggcctgggagcggattgacaagaaagtggaaggcctgagcaagcacatcaagctggaagaggaacggagaagcgaggacgcccagagcaaggccgccctgaccgactggctgcgggctaaggccagcttcgtgatcgagggcctgaaggaggccgacaaggacgagttctgcagatgcgagctgaagctgcagaagtggtacggggacctgcggggaaagcccttcgccatcgaagccgagaacagcatcctggacatcagcggcttcagcaagcagtacaactgtgccttcatctggcagaaggacggcgtgaagaagctgaacctgtacctgatcatcaactacttcaagggcggcaagctgcggttcaagaagatcaaacctgaagccttcgaagccaacagattctacaccgtgatcaacaaaaagagcggcgagatcgtgcccatggaggtgaacttcaacttcgacgaccccaacctgatcatcctgcctctggcctttggcaagagacagggcagagaattcatctggaacgacctgctgtccctggaaaccggcagcctgaagctggccaacggaagagtgatcgagaagacactgtacaacagaagaacccggcaggatgagcctgccctgttcgtggccctgaccttcgagcggcgggaggtcctggactcctccaatatcaaaccaatgaacctgatcggcgtggcaagaggcgaaaacatccccgccgtgatcgccctgaccgaccccgagggctgcccactgagccggtttaaggatagcctgggaaacccaacccacatcctgagaatcggcgagagctataaggagaagcagcggaccatccaggccaagaaggaggtggagcagcggagagccggcggctacagccggaagtacgccagcaaagccaagaatctggcagacgatatggtgagaaacaccgctagagatctgctgtactacgccgtgacccaggatgccatgctgatcttcgccaacctgagccggggcttcggccggcagggcaagcggaccttcatggccgagagacagtacacacggatggaggactggctgaccgccaagctggcctacgagggcctgagcaagacctacctgtccaagacactggcccagtacacctccaagacatgcagcaactgtgggtttaccatcaccagcgccgactacgacagggtgctggagaagctgaagaagacagcaacaggctggatgaccacaattaacggcaaggagctgaaggtggagggccagattacctactacaacagatacaagagacagaacgtagtcaaggacctgtccgtcgagctggatagactgagcgaagaatctgtgaacaacgacatctcctcctggacaaagggcagaagcggagaagctctgagcctcctgaagaaaagattctcccatagacccgtgcaggagaagttcgtgtgcctgaactgcggcttcgagacacacgcagccgagcaagccgccctgaacatcgccagatcctggctgttcctgcggagccaggagtacaagaaataccagacaaacaagacaaccggcaacaccgataagagagccttcgtcgagacctggcagtccttttaccggaagaagcttaaggaggtgtggaaacctgccgtgcggtctggcggatctggcggaggctccaccagccccaagaaaaagagaaaagtctaagctgccttctgcggggcttgccttctggccatgcccttcttctctcccttgcacctgtacctcttggtctttgaataaagcctgagtaggaaggctagcaaaaaaaaaaaaaaaaaaaaaaaaaaaaaaaaaaaaaaaaaaaaaaaaaaaaaaaaaaaaaaaaaaaaaaaaaaaaaaaa

SEQ ID NO: 10450 - RNA, 8787 nt, synthetic construct
  source 1..8787: mol_type = other RNA
aggaaataagagagaaaagaagagtaagaagaaatataagagccaccatggcccctaagaagaagcgtaaagtgagccggatgaaccacgaccaggagttcgacccccctaaggtgtaccctcccgtccccgccgagaagagaaagcccatccgggtcctgagcctgttcgatggcatcgccaccggtctgctggtgctgaaggacctgggcatccaggtggataggtacattgcctccgaggtgtgcgaggactccatcaccgtgggaatggtgcgtcatcagggcaagatcatgtacgtgggcgacgtgcggagcgtgacacagaagcatatccaggagtggggccctttcgacctggtgatcggcggcagcccttgcaatgacctgagcatcgtgaacccagcccggaagggcctgtacgagggaaccggcagactgttcttcgagttttacagactgctgcacgacgcccggcctaaggaaggcgacgaccggcccttcttttggctgttcgagaatgtggtggccatgggagtcagcgacaagcgggatattagccggttcctggagagcaaccccgtgatgatcgatgccaaggaagtgagcgccgcccaccgggccagatacttctggggcaatctgcctggcatgaacagacccctggccagcaccgtgaacgacaagctggagctgcaggagtgcctggagcacggccggatcgccaagttcagcaaggtgagaaccatcaccacccgaagcaacagcatcaaacaaggcaaggaccagcactttcctgtgttcatgaacgagaaggaggacatcctgtggtgtaccgagatggagagagtgttcgggttcccagtccactacacagatgtcagcaacatgtctagactggccagacagagactgctgggaagaagctggtccgtccctgtgatcagacacctgttcgcccctctgaaggagtacttcgcctgcgtgagcagcggcaacagcaacgccaacagccggggccccagcttctctagcggcctggtgccactgtccctgagagggagccacatgggccccatggagatctacaaaaccgtgagcgcctggaagcggcagcctgtgcgcgtgctgagcctgtttcggaatatcgataaagtcctgaaaagcctgggattcctggagagcggctctggctccggcggtggcaccctgaagtacgtggaggatgtgacaaacgtggtcagacgggatgtggagaagtggggccccttcgatctggtgtacggcagcacccaacccctgggcagctcttgtgaccggtgccctggctggtacatgtttcagttccaccggatcctgcagtacgccctgccgagacaggagtcccagcggccattcttttggattttcatggacaacttgctgctgaccgaggatgaccaggaaactaccactcggttcctgcagaccgaagccgtgaccctgcaggacgtgagaggccgggactaccagaacgccatgcgggtgtggtccaacatccctggactgaaaagcaagcacgcacctctgacccctaaagaagaggagtacctgcaggcccaggtgcggagcagaagcaagctggacgcccctaaggtggatctgctggtgaagaattgcctcctgcccctgagagagtacttcaagtatttcagccagaatagtctgcccctgggaggcagcggcggcggcaggcccagggccctgaagttcgtggacgtggccgtgtacttcagcagcgaggagtggggctgcctgaggcccgcccagagggccctgtacagggacgtgatgagggagacctacggccacctgggcgccctgggcttccccggccccaagcccgccctgatcagctggatggagcaggagagcgaggcctggagcagcgccgcccaggaccccgagaacggcgagagcctgggcggcgccaggggcggcccaagcagcggcgcccctcctcccagcggcggcaggcggcccaagcagcggcgcccctcctcccagcggcggcagcccagccggctccccaacctctaccgaggagggcacctctgagtccgccacccccgagagcggccctggcacctccaccgagcccagcgagggcagcgcacccggcagccctgccggcagccccacctccacagaggagggaaccagcaccgagcccagcgaaggcagcgccccaggcaccagcaccgagcctagtgagcaggagattaaacggatcaacaagatcagaagaagacttgtgaaagacagcaacaccaagaaggccggcaagacaggccccatgaaaaccctgctggttagagtgatgacacccgatctgagagagcggctggaaaacctgagaaagaagcctgaaaatatcccccagcccatcagcaatacatctagagccaacctgaataagctgctgaccgattacaccgaaatgaagaaggcgatcctgcatgtgtactgggaagagttccagaaggaccctgtgggcctgatgagccgggtggcccagcctgccagcaagaagatcgatcagaacaagctgaaacctgagatggacgagaagggcaacctgaccaccgccggctttgcctgctctcagtgtggccagcccctgttcgtgtacaagctggagcaggtgtctgagaagggcaaggcttacaccaactacttcggacggtgcaatgtggccgagcacgaaaagctgatcctgctggcccagctgaagcccgagaaggatagcgacgaagccgtgacatatagcctgggaaagtttgggcagagggccctggatttctacagcattcatgtgaccaaggagtccacccaccccgtgaagcccctggcccagatcgccggaaacagatacgcctccggacctgtgggaaaggccctgagcgacgcatgtatgggcacaatcgcctccttcctgtctaagtaccaggacatcatcatcgaacaccagaaggtggtgaagggcaaccagaagagactggagagcctgcgggagctggccggcaaggaaaacctggaataccctagcgtgaccctgccacctcagcctcacaccaaggagggcgttgatgcctacaacgaagtgatcgcccgggtgcgaatgtgggtgaacctgaacctgtggcagaagctgaagctaagcagagatgatgccaagcctctgctgagactgaagggattcccttcctttcctctggtcgagagacaggccaacgaagtggactggtgggacatggtgtgtaacgtgaagaagctgatcaacgagaaaaaggaggatggcaaggtgttttggcagaatctggctggctacaagagacaggaagccctgagaccatacctgagcagcgaggaagatcggaagaagggaaagaaattcgctcggtaccagctgggcgacctgctgctgcacctggaaaagaagcacggcgaggactggggaaaggtgtacgacgaggcctgggagcggattgacaagaaagtggaaggcctgagcaagcacatcaagctggaagaggaacggagaagcgaggacgcccagagcaaggccgccctgaccgactggctgcgggctaaggccagcttcgtgatcgagggcctgaaggaggccgacaaggacgagttctgcagatgcgagctgaagctgcagaagtggtacggggacctgcggggaaagcccttcgccatcgaagccgagaacagcatcctggacatcagcggcttcagcaagcagtacaactgtgccttcatctggcagaaggacggcgtgaagaagctgaacctgtacctgatcatcaactacttcaagggcggcaagctgcggttcaagaagatcaaacctgaagccttcgaagccaacagattctacaccgtgatcaacaaaaagagcggcgagatcgtgcccatggaggtgaacttcaacttcgacgaccccaacctgatcatcctgcctctggcctttggcaagagacagggcagagaattcatctggaacgacctgctgtccctggaaaccggcagcctgaagctggccaacggaagagtgatcgagaagacactgtacaacagaagaacccggcaggatgagcctgccctgttcgtggccctgaccttcgagcggcgggaggtcctggactcctccaatatcaaaccaatgaacctgatcggcgtggcaagaggcgaaaacatccccgccgtgatcgccctgaccgaccccgagggctgcccactgagccggtttaaggatagcctgggaaacccaacccacatcctgagaatcggcgagagctataaggagaagcagcggaccatccaggccaagaaggaggtggagcagcggagagccggcggctacagccggaagtacgccagcaaagccaagaatctggcagacgatatggtgagaaacaccgctagagatctgctgtactacgccgtgacccaggatgccatgctgatcttcgccaacctgagccggggcttcggccggcagggcaagcggaccttcatggccgagagacagtacacacggatggaggactggctgaccgccaagctggcctacgagggcctgagcaagacctacctgtccaagacactggcccagtacacctccaagacatgcagcaactgtgggtttaccatcaccagcgccgactacgacagggtgctggagaagctgaagaagacagcaacaggctggatgaccacaattaacggcaaggagctgaaggtggagggccagattacctactacaacagatacaagagacagaacgtagtcaaggacctgtccgtcgagctggatagactgagcgaagaatctgtgaacaacgacatctcctcctggacaaagggcagaagcggagaagctctgagcctcctgaagaaaagattctcccatagacccgtgcaggagaagttcgtgtgcctgaactgcggcttcgagacacacgcagccgagcaagccgccctgaacatcgccagatcctggctgttcctgcggagccaggagtacaagaaataccagacaaacaagacaaccggcaacaccgataagagagccttcgtcgagacctggcagtccttttaccggaagaagcttaaggaggtgtggaaacctgccgtgcggtctggcggatctggcggaggctccaccagccccaagaaaaagagaaaagtctaagctgccttctgcggggcttgccttctggccatgcccttcttctctcccttgcacctgtacctcttggtctttgaataaagcctgagtaggaaggctagcaaaaaaaaaaaaaaaaaaaaaaaaaaaaaaaaaaaaaaaaaaaaaaaaaaaaaaaaaaaaaaaaaaaaaaaaaaaaaaaagcccagccggctccccaacctctaccgaggagggcacctctgagtccgccacccccgagagcggccctggcacctccaccgagcccagcgagggcagcgcacccggcagccctgccggcagccccacctccacagaggagggaaccagcaccgagcccagcgaaggcagcgccccaggcaccagcaccgagcctagtgagcaggagattaaacggatcaacaagatcagaagaagacttgtgaaagacagcaacaccaagaaggccggcaagacaggccccatgaaaaccctgctggttagagtgatgacacccgatctgagagagcggctggaaaacctgagaaagaagcctgaaaatatcccccagcccatcagcaatacatctagagccaacctgaataagctgctgaccgattacaccgaaatgaagaaggcgatcctgcatgtgtactgggaagagttccagaaggaccctgtgggcctgatgagccgggtggcccagcctgccagcaagaagatcgatcagaacaagctgaaacctgagatggacgagaagggcaacctgaccaccgccggctttgcctgctctcagtgtggccagcccctgttcgtgtacaagctggagcaggtgtctgagaagggcaaggcttacaccaactacttcggacggtgcaatgtggccgagcacgaaaagctgatcctgctggcccagctgaagcccgagaaggatagcgacgaagccgtgacatatagcctgggaaagtttgggcagagggccctggatttctacagcattcatgtgaccaaggagtccacccaccccgtgaagcccctggcccagatcgccggaaacagatacgcctccggacctgtgggaaaggccctgagcgacgcatgtatgggcacaatcgcctccttcctgtctaagtaccaggacatcatcatcgaacaccagaaggtggtgaagggcaaccagaagagactggagagcctgcgggagctggccggcaaggaaaacctggaataccctagcgtgaccctgccacctcagcctcacaccaaggagggcgttgatgcctacaacgaagtgatcgcccgggtgcgaatgtgggtgaacctgaacctgtggcagaagctgaagctaagcagagatgatgccaagcctctgctgagactgaagggattcccttcctttcctctggtcgagagacaggccaacgaagtggactggtgggacatggtgtgtaacgtgaagaagctgatcaacgagaaaaaggaggatggcaaggtgttttggcagaatctggctggctacaagagacaggaagccctgagaccatacctgagcagcgaggaagatcggaagaagggaaagaaattcgctcggtaccagctgggcgacctgctgctgcacctggaaaagaagcacggcgaggactggggaaaggtgtacgacgaggcctgggagcggattgacaagaaagtggaaggcctgagcaagcacatcaagctggaagaggaacggagaagcgaggacgcccagagcaaggccgccctgaccgactggctgcgggctaaggccagcttcgtgatcgagggcctgaaggaggccgacaaggacgagttctgcagatgcgagctgaagctgcagaagtggtacggggacctgcggggaaagcccttcgccatcgaagccgagaacagcatcctggacatcagcggcttcagcaagcagtacaactgtgccttcatctggcagaaggacggcgtgaagaagctgaacctgtacctgatcatcaactacttcaagggcggcaagctgcggttcaagaagatcaaacctgaagccttcgaagccaacagattctacaccgtgatcaacaaaaagagcggcgagatcgtgcccatggaggtgaacttcaacttcgacgaccccaacctgatcatcctgcctctggcctttggcaagagacagggcagagaattcatctggaacgacctgctgtccctggaaaccggcagcctgaagctggccaacggaagagtgatcgagaagacactgtacaacagaagaacccggcaggatgagcctgccctgttcgtggccctgaccttcgagcggcgggaggtcctggactcctccaatatcaaaccaatgaacctgatcggcgtggcaagaggcgaaaacatccccgccgtgatcgccctgaccgaccccgagggctgcccactgagccggtttaaggatagcctgggaaacccaacccacatcctgagaatcggcgagagctataaggagaagcagcggaccatccaggccaagaaggaggtggagcagcggagagccggcggctacagccggaagtacgccagcaaagccaagaatctggcagacgatatggtgagaaacaccgctagagatctgctgtactacgccgtgacccaggatgccatgctgatcttcgccaacctgagccggggcttcggccggcagggcaagcggaccttcatggccgagagacagtacacacggatggaggactggctgaccgccaagctggcctacgagggcctgagcaagacctacctgtccaagacactggcccagtacacctccaagacatgcagcaactgtgggtttaccatcaccagcgccgactacgacagggtgctggagaagctgaagaagacagcaacaggctggatgaccacaattaacggcaaggagctgaaggtggagggccagattacctactacaacagatacaagagacagaacgtagtcaaggacctgtccgtcgagctggatagactgagcgaagaatctgtgaacaacgacatctcctcctggacaaagggcagaagcggagaagctctgagcctcctgaagaaaagattctcccatagacccgtgcaggagaagttcgtgtgcctgaactgcggcttcgagacacacgcagccgagcaagccgccctgaacatcgccagatcctggctgttcctgcggagccaggagtacaagaaataccagacaaacaagacaaccggcaacaccgataagagagccttcgtcgagacctggcagtccttttaccggaagaagcttaaggaggtgtggaaacctgccgtgcggtctggcggatctggcggaggctccaccagccccaagaaaaagagaaaagtctaagctgccttctgcggggcttgccttctggccatgcccttcttctctcccttgcacctgtacctcttggtctttgaataaagcctgagtaggaaggctagcaaaaaaaaaaaaaaaaaaaaaaaaaaaaaaaaaaaaaaaaaaaaaaaaaaaaaaaaaaaaaaaaaaaaaaaaaaaaaaaa

SEQ ID NO: 10451 - RNA, 8787 nt, synthetic construct
  source 1..8787: mol_type = other RNA
aggaaataagagagaaaagaagagtaagaagaaatataagagccaccatggcccctaagaagaagcgtaaagtgagccggatgaaccacgaccaggagttcgacccccctaaggtgtaccctcccgtccccgccgagaagagaaagcccatccgggtcctgagcctgttcgatggcatcgccaccggtctgctggtgctgaaggacctgggcatccaggtggataggtacattgcctccgaggtgtgcgaggactccatcaccgtgggaatggtgcgtcatcagggcaagatcatgtacgtgggcgacgtgcggagcgtgacacagaagcatatccaggagtggggccctttcgacctggtgatcggcggcagcccttgcaatgacctgagcatcgtgaacccagcccggaagggcctgtacgagggaaccggcagactgttcttcgagttttacagactgctgcacgacgcccggcctaaggaaggcgacgaccggcccttcttttggctgttcgagaatgtggtggccatgggagtcagcgacaagcgggatattagccggttcctggagagcaaccccgtgatgatcgatgccaaggaagtgagcgccgcccaccgggccagatacttctggggcaatctgcctggcatgaacagacccctggccagcaccgtgaacgacaagctggagctgcaggagtgcctggagcacggccggatcgccaagttcagcaaggtgagaaccatcaccacccgaagcaacagcatcaaacaaggcaaggaccagcactttcctgtgttcatgaacgagaaggaggacatcctgtggtgtaccgagatggagagagtgttcgggttcccagtccactacacagatgtcagcaacatgtctagactggccagacagagactgctgggaagaagctggtccgtccctgtgatcagacacctgttcgcccctctgaaggagtacttcgcctgcgtgagcagcggcaacagcaacgccaacagccggggccccagcttctctagcggcctggtgccactgtccctgagagggagccacatgggccccatggagatctacaaaaccgtgagcgcctggaagcggcagcctgtgcgcgtgctgagcctgtttcggaatatcgataaagtcctgaaaagcctgggattcctggagagcggctctggctccggcggtggcaccctgaagtacgtggaggatgtgacaaacgtggtcagacgggatgtggagaagtggggccccttcgatctggtgtacggcagcacccaacccctgggcagctcttgtgaccggtgccctggctggtacatgtttcagttccaccggatcctgcagtacgccctgccgagacaggagtcccagcggccattcttttggattttcatggacaacttgctgctgaccgaggatgaccaggaaactaccactcggttcctgcagaccgaagccgtgaccctgcaggacgtgagaggccgggactaccagaacgccatgcgggtgtggtccaacatccctggactgaaaagcaagcacgcacctctgacccctaaagaagaggagtacctgcaggcccaggtgcggagcagaagcaagctggacgcccctaaggtggatctgctggtgaagaattgcctcctgcccctgagagagtacttcaagtatttcagccagaatagtctgcccctgggaggcagcggcggcggcttccagggccccgtgaccttcgacgaggtggccgtgtacttcaccaaggaggagtgggccctgctggaccccgcccagagggccctgtacagggacgtgatgcaggagaactacgagaccgtgaccagcctgggcctgcccgtgagcaggcccgacgtgatcagccagatggagcagggcgaggagccctgggccagcgccctgcagggcagcgaggacaggctgatcctgaggggcatctgcggcggcccaagcagcggcgcccctcctcccagcggcggcaggcggcccaagcagcggcgcccctcctcccagcggcggcagcccagccggctccccaacctctaccgaggagggcacctctgagtccgccacccccgagagcggccctggcacctccaccgagcccagcgagggcagcgcacccggcagccctgccggcagccccacctccacagaggagggaaccagcaccgagcccagcgaaggcagcgccccaggcaccagcaccgagcctagtgagcaggagattaaacggatcaacaagatcagaagaagacttgtgaaagacagcaacaccaagaaggccggcaagacaggccccatgaaaaccctgctggttagagtgatgacacccgatctgagagagcggctggaaaacctgagaaagaagcctgaaaatatcccccagcccatcagcaatacatctagagccaacctgaataagctgctgaccgattacaccgaaatgaagaaggcgatcctgcatgtgtactgggaagagttccagaaggaccctgtgggcctgatgagccgggtggcccagcctgccagcaagaagatcgatcagaacaagctgaaacctgagatggacgagaagggcaacctgaccaccgccggctttgcctgctctcagtgtggccagcccctgttcgtgtacaagctggagcaggtgtctgagaagggcaaggcttacaccaactacttcggacggtgcaatgtggccgagcacgaaaagctgatcctgctggcccagctgaagcccgagaaggatagcgacgaagccgtgacatatagcctgggaaagtttgggcagagggccctggatttctacagcattcatgtgaccaaggagtccacccaccccgtgaagcccctggcccagatcgccggaaacagatacgcctccggacctgtgggaaaggccctgagcgacgcatgtatgggcacaatcgcctccttcctgtctaagtaccaggacatcatcatcgaacaccagaaggtggtgaagggcaaccagaagagactggagagcctgcgggagctggccggcaaggaaaacctggaataccctagcgtgaccctgccacctcagcctcacaccaaggagggcgttgatgcctacaacgaagtgatcgcccgggtgcgaatgtgggtgaacctgaacctgtggcagaagctgaagctaagcagagatgatgccaagcctctgctgagactgaagggattcccttcctttcctctggtcgagagacaggccaacgaagtggactggtgggacatggtgtgtaacgtgaagaagctgatcaacgagaaaaaggaggatggcaaggtgttttggcagaatctggctggctacaagagacaggaagccctgagaccatacctgagcagcgaggaagatcggaagaagggaaagaaattcgctcggtaccagctgggcgacctgctgctgcacctggaaaagaagcacggcgaggactggggaaaggtgtacgacgaggcctgggagcggattgacaagaaagtggaaggcctgagcaagcacatcaagctggaagaggaacggagaagcgaggacgcccagagcaaggccgccctgaccgactggctgcgggctaaggccagcttcgtgatcgagggcctgaaggaggccgacaaggacgagttctgcagatgcgagctgaagctgcagaagtggtacggggacctgcggggaaagcccttcgccatcgaagccgagaacagcatcctggacatcagcggcttcagcaagcagtacaactgtgccttcatctggcagaaggacggcgtgaagaagctgaacctgtacctgatcatcaactacttcaagggcggcaagctgcggttcaagaagatcaaacctgaagccttcgaagccaacagattctacaccgtgatcaacaaaaagagcggcgagatcgtgcccatggaggtgaacttcaacttcgacgaccccaacctgatcatcctgcctctggcctttggcaagagacagggcagagaattcatctggaacgacctgctgtccctggaaaccggcagcctgaagctggccaacggaagagtgatcgagaagacactgtacaacagaagaacccggcaggatgagcctgccctgttcgtggccctgaccttcgagcggcgggaggtcctggactcctccaatatcaaaccaatgaacctgatcggcgtggcaagaggcgaaaacatccccgccgtgatcgccctgaccgaccccgagggctgcccactgagccggtttaaggatagcctgggaaacccaacccacatcctgagaatcggcgagagctataaggagaagcagcggaccatccaggccaagaaggaggtggagcagcggagagccggcggctacagccggaagtacgccagcaaagccaagaatctggcagacgatatggtgagaaacaccgctagagatctgctgtactacgccgtgacccaggatgccatgctgatcttcgccaacctgagccggggcttcggccggcagggcaagcggaccttcatggccgagagacagtacacacggatggaggactggctgaccgccaagctggcctacgagggcctgagcaagacctacctgtccaagacactggcccagtacacctccaagacatgcagcaactgtgggtttaccatcaccagcgccgactacgacagggtgctggagaagctgaagaagacagcaacaggctggatgaccacaattaacggcaaggagctgaaggtggagggccagattacctactacaacagatacaagagacagaacgtagtcaaggacctgtccgtcgagctggatagactgagcgaagaatctgtgaacaacgacatctcctcctggacaaagggcagaagcggagaagctctgagcctcctgaagaaaagattctcccatagacccgtgcaggagaagttcgtgtgcctgaactgcggcttcgagacacacgcagccgagcaagccgccctgaacatcgccagatcctggctgttcctgcggagccaggagtacaagaaataccagacaaacaagacaaccggcaacaccgataagagagccttcgtcgagacctggcagtccttttaccggaagaagcttaaggaggtgtggaaacctgccgtgcggtctggcggatctggcggaggctccaccagccccaagaaaaagagaaaagtctaagctgccttctgcggggcttgccttctggccatgcccttcttctctcccttgcacctgtacctcttggtctttgaataaagcctgagtaggaaggctagcaaaaaaaaaaaaaaaaaaaaaaaaaaaaaaaaaaaaaaaaaaaaaaaaaaaaaaaaaaaaaaaaaaaaaaaaaaaaaaaagcccagccggctccccaacctctaccgaggagggcacctctgagtccgccacccccgagagcggccctggcacctccaccgagcccagcgagggcagcgcacccggcagccctgccggcagccccacctccacagaggagggaaccagcaccgagcccagcgaaggcagcgccccaggcaccagcaccgagcctagtgagcaggagattaaacggatcaacaagatcagaagaagacttgtgaaagacagcaacaccaagaaggccggcaagacaggccccatgaaaaccctgctggttagagtgatgacacccgatctgagagagcggctggaaaacctgagaaagaagcctgaaaatatcccccagcccatcagcaatacatctagagccaacctgaataagctgctgaccgattacaccgaaatgaagaaggcgatcctgcatgtgtactgggaagagttccagaaggaccctgtgggcctgatgagccgggtggcccagcctgccagcaagaagatcgatcagaacaagctgaaacctgagatggacgagaagggcaacctgaccaccgccggctttgcctgctctcagtgtggccagcccctgttcgtgtacaagctggagcaggtgtctgagaagggcaaggcttacaccaactacttcggacggtgcaatgtggccgagcacgaaaagctgatcctgctggcccagctgaagcccgagaaggatagcgacgaagccgtgacatatagcctgggaaagtttgggcagagggccctggatttctacagcattcatgtgaccaaggagtccacccaccccgtgaagcccctggcccagatcgccggaaacagatacgcctccggacctgtgggaaaggccctgagcgacgcatgtatgggcacaatcgcctccttcctgtctaagtaccaggacatcatcatcgaacaccagaaggtggtgaagggcaaccagaagagactggagagcctgcgggagctggccggcaaggaaaacctggaataccctagcgtgaccctgccacctcagcctcacaccaaggagggcgttgatgcctacaacgaagtgatcgcccgggtgcgaatgtgggtgaacctgaacctgtggcagaagctgaagctaagcagagatgatgccaagcctctgctgagactgaagggattcccttcctttcctctggtcgagagacaggccaacgaagtggactggtgggacatggtgtgtaacgtgaagaagctgatcaacgagaaaaaggaggatggcaaggtgttttggcagaatctggctggctacaagagacaggaagccctgagaccatacctgagcagcgaggaagatcggaagaagggaaagaaattcgctcggtaccagctgggcgacctgctgctgcacctggaaaagaagcacggcgaggactggggaaaggtgtacgacgaggcctgggagcggattgacaagaaagtggaaggcctgagcaagcacatcaagctggaagaggaacggagaagcgaggacgcccagagcaaggccgccctgaccgactggctgcgggctaaggccagcttcgtgatcgagggcctgaaggaggccgacaaggacgagttctgcagatgcgagctgaagctgcagaagtggtacggggacctgcggggaaagcccttcgccatcgaagccgagaacagcatcctggacatcagcggcttcagcaagcagtacaactgtgccttcatctggcagaaggacggcgtgaagaagctgaacctgtacctgatcatcaactacttcaagggcggcaagctgcggttcaagaagatcaaacctgaagccttcgaagccaacagattctacaccgtgatcaacaaaaagagcggcgagatcgtgcccatggaggtgaacttcaacttcgacgaccccaacctgatcatcctgcctctggcctttggcaagagacagggcagagaattcatctggaacgacctgctgtccctggaaaccggcagcctgaagctggccaacggaagagtgatcgagaagacactgtacaacagaagaacccggcaggatgagcctgccctgttcgtggccctgaccttcgagcggcgggaggtcctggactcctccaatatcaaaccaatgaacctgatcggcgtggcaagaggcgaaaacatccccgccgtgatcgccctgaccgaccccgagggctgcccactgagccggtttaaggatagcctgggaaacccaacccacatcctgagaatcggcgagagctataaggagaagcagcggaccatccaggccaagaaggaggtggagcagcggagagccggcggctacagccggaagtacgccagcaaagccaagaatctggcagacgatatggtgagaaacaccgctagagatctgctgtactacgccgtgacccaggatgccatgctgatcttcgccaacctgagccggggcttcggccggcagggcaagcggaccttcatggccgagagacagtacacacggatggaggactggctgaccgccaagctggcctacgagggcctgagcaagacctacctgtccaagacactggcccagtacacctccaagacatgcagcaactgtgggtttaccatcaccagcgccgactacgacagggtgctggagaagctgaagaagacagcaacaggctggatgaccacaattaacggcaaggagctgaaggtggagggccagattacctactacaacagatacaagagacagaacgtagtcaaggacctgtccgtcgagctggatagactgagcgaagaatctgtgaacaacgacatctcctcctggacaaagggcagaagcggagaagctctgagcctcctgaagaaaagattctcccatagacccgtgcaggagaagttcgtgtgcctgaactgcggcttcgagacacacgcagccgagcaagccgccctgaacatcgccagatcctggctgttcctgcggagccaggagtacaagaaataccagacaaacaagacaaccggcaacaccgataagagagccttcgtcgagacctggcagtccttttaccggaagaagcttaaggaggtgtggaaacctgccgtgcggtctggcggatctggcggaggctccaccagccccaagaaaaagagaaaagtctaagctgccttctgcggggcttgccttctggccatgcccttcttctctcccttgcacctgtacctcttggtctttgaataaagcctgagtaggaaggctagcaaaaaaaaaaaaaaaaaaaaaaaaaaaaaaaaaaaaaaaaaaaaaaaaaaaaaaaaaaaaaaaaaaaaaaaaaaaaaaaa

SEQ ID NO: 10452 - RNA, 8787 nt, synthetic construct
  source 1..8787: mol_type = other RNA
aggaaataagagagaaaagaagagtaagaagaaatataagagccaccatggcccctaagaagaagcgtaaagtgagccggatgaaccacgaccaggagttcgacccccctaaggtgtaccctcccgtccccgccgagaagagaaagcccatccgggtcctgagcctgttcgatggcatcgccaccggtctgctggtgctgaaggacctgggcatccaggtggataggtacattgcctccgaggtgtgcgaggactccatcaccgtgggaatggtgcgtcatcagggcaagatcatgtacgtgggcgacgtgcggagcgtgacacagaagcatatccaggagtggggccctttcgacctggtgatcggcggcagcccttgcaatgacctgagcatcgtgaacccagcccggaagggcctgtacgagggaaccggcagactgttcttcgagttttacagactgctgcacgacgcccggcctaaggaaggcgacgaccggcccttcttttggctgttcgagaatgtggtggccatgggagtcagcgacaagcgggatattagccggttcctggagagcaaccccgtgatgatcgatgccaaggaagtgagcgccgcccaccgggccagatacttctggggcaatctgcctggcatgaacagacccctggccagcaccgtgaacgacaagctggagctgcaggagtgcctggagcacggccggatcgccaagttcagcaaggtgagaaccatcaccacccgaagcaacagcatcaaacaaggcaaggaccagcactttcctgtgttcatgaacgagaaggaggacatcctgtggtgtaccgagatggagagagtgttcgggttcccagtccactacacagatgtcagcaacatgtctagactggccagacagagactgctgggaagaagctggtccgtccctgtgatcagacacctgttcgcccctctgaaggagtacttcgcctgcgtgagcagcggcaacagcaacgccaacagccggggccccagcttctctagcggcctggtgccactgtccctgagagggagccacatgggccccatggagatctacaaaaccgtgagcgcctggaagcggcagcctgtgcgcgtgctgagcctgtttcggaatatcgataaagtcctgaaaagcctgggattcctggagagcggctctggctccggcggtggcaccctgaagtacgtggaggatgtgacaaacgtggtcagacgggatgtggagaagtggggccccttcgatctggtgtacggcagcacccaacccctgggcagctcttgtgaccggtgccctggctggtacatgtttcagttccaccggatcctgcagtacgccctgccgagacaggagtcccagcggccattcttttggattttcatggacaacttgctgctgaccgaggatgaccaggaaactaccactcggttcctgcagaccgaagccgtgaccctgcaggacgtgagaggccgggactaccagaacgccatgcgggtgtggtccaacatccctggactgaaaagcaagcacgcacctctgacccctaaagaagaggagtacctgcaggcccaggtgcggagcagaagcaagctggacgcccctaaggtggatctgctggtgaagaattgcctcctgcccctgagagagtacttcaagtatttcagccagaatagtctgcccctgggaggcagcggcggcggcatgaccatgctgcaggacagcttcagcttcgacgacctgagcgtggacttcacccagaaggagtggcagctgctggaccccagccagaagaacctgtacaaggacgtgatgctggagaactacagcagcctggtgagcctgggctacgaggccatgaagcccgacgtgatcttcaagctggagcagggcgaggagccctggatcggcgacgaggagatccccagcagctggagccccgacatcggcggcccaagcagcggcgcccctcctcccagcggcggcaggcggcccaagcagcggcgcccctcctcccagcggcggcagcccagccggctccccaacctctaccgaggagggcacctctgagtccgccacccccgagagcggccctggcacctccaccgagcccagcgagggcagcgcacccggcagccctgccggcagccccacctccacagaggagggaaccagcaccgagcccagcgaaggcagcgccccaggcaccagcaccgagcctagtgagcaggagattaaacggatcaacaagatcagaagaagacttgtgaaagacagcaacaccaagaaggccggcaagacaggccccatgaaaaccctgctggttagagtgatgacacccgatctgagagagcggctggaaaacctgagaaagaagcctgaaaatatcccccagcccatcagcaatacatctagagccaacctgaataagctgctgaccgattacaccgaaatgaagaaggcgatcctgcatgtgtactgggaagagttccagaaggaccctgtgggcctgatgagccgggtggcccagcctgccagcaagaagatcgatcagaacaagctgaaacctgagatggacgagaagggcaacctgaccaccgccggctttgcctgctctcagtgtggccagcccctgttcgtgtacaagctggagcaggtgtctgagaagggcaaggcttacaccaactacttcggacggtgcaatgtggccgagcacgaaaagctgatcctgctggcccagctgaagcccgagaaggatagcgacgaagccgtgacatatagcctgggaaagtttgggcagagggccctggatttctacagcattcatgtgaccaaggagtccacccaccccgtgaagcccctggcccagatcgccggaaacagatacgcctccggacctgtgggaaaggccctgagcgacgcatgtatgggcacaatcgcctccttcctgtctaagtaccaggacatcatcatcgaacaccagaaggtggtgaagggcaaccagaagagactggagagcctgcgggagctggccggcaaggaaaacctggaataccctagcgtgaccctgccacctcagcctcacaccaaggagggcgttgatgcctacaacgaagtgatcgcccgggtgcgaatgtgggtgaacctgaacctgtggcagaagctgaagctaagcagagatgatgccaagcctctgctgagactgaagggattcccttcctttcctctggtcgagagacaggccaacgaagtggactggtgggacatggtgtgtaacgtgaagaagctgatcaacgagaaaaaggaggatggcaaggtgttttggcagaatctggctggctacaagagacaggaagccctgagaccatacctgagcagcgaggaagatcggaagaagggaaagaaattcgctcggtaccagctgggcgacctgctgctgcacctggaaaagaagcacggcgaggactggggaaaggtgtacgacgaggcctgggagcggattgacaagaaagtggaaggcctgagcaagcacatcaagctggaagaggaacggagaagcgaggacgcccagagcaaggccgccctgaccgactggctgcgggctaaggccagcttcgtgatcgagggcctgaaggaggccgacaaggacgagttctgcagatgcgagctgaagctgcagaagtggtacggggacctgcggggaaagcccttcgccatcgaagccgagaacagcatcctggacatcagcggcttcagcaagcagtacaactgtgccttcatctggcagaaggacggcgtgaagaagctgaacctgtacctgatcatcaactacttcaagggcggcaagctgcggttcaagaagatcaaacctgaagccttcgaagccaacagattctacaccgtgatcaacaaaaagagcggcgagatcgtgcccatggaggtgaacttcaacttcgacgaccccaacctgatcatcctgcctctggcctttggcaagagacagggcagagaattcatctggaacgacctgctgtccctggaaaccggcagcctgaagctggccaacggaagagtgatcgagaagacactgtacaacagaagaacccggcaggatgagcctgccctgttcgtggccctgaccttcgagcggcgggaggtcctggactcctccaatatcaaaccaatgaacctgatcggcgtggcaagaggcgaaaacatccccgccgtgatcgccctgaccgaccccgagggctgcccactgagccggtttaaggatagcctgggaaacccaacccacatcctgagaatcggcgagagctataaggagaagcagcggaccatccaggccaagaaggaggtggagcagcggagagccggcggctacagccggaagtacgccagcaaagccaagaatctggcagacgatatggtgagaaacaccgctagagatctgctgtactacgccgtgacccaggatgccatgctgatcttcgccaacctgagccggggcttcggccggcagggcaagcggaccttcatggccgagagacagtacacacggatggaggactggctgaccgccaagctggcctacgagggcctgagcaagacctacctgtccaagacactggcccagtacacctccaagacatgcagcaactgtgggtttaccatcaccagcgccgactacgacagggtgctggagaagctgaagaagacagcaacaggctggatgaccacaattaacggcaaggagctgaaggtggagggccagattacctactacaacagatacaagagacagaacgtagtcaaggacctgtccgtcgagctggatagactgagcgaagaatctgtgaacaacgacatctcctcctggacaaagggcagaagcggagaagctctgagcctcctgaagaaaagattctcccatagacccgtgcaggagaagttcgtgtgcctgaactgcggcttcgagacacacgcagccgagcaagccgccctgaacatcgccagatcctggctgttcctgcggagccaggagtacaagaaataccagacaaacaagacaaccggcaacaccgataagagagccttcgtcgagacctggcagtccttttaccggaagaagcttaaggaggtgtggaaacctgccgtgcggtctggcggatctggcggaggctccaccagccccaagaaaaagagaaaagtctaagctgccttctgcggggcttgccttctggccatgcccttcttctctcccttgcacctgtacctcttggtctttgaataaagcctgagtaggaaggctagcaaaaaaaaaaaaaaaaaaaaaaaaaaaaaaaaaaaaaaaaaaaaaaaaaaaaaaaaaaaaaaaaaaaaaaaaaaaaaaaagcccagccggctccccaacctctaccgaggagggcacctctgagtccgccacccccgagagcggccctggcacctccaccgagcccagcgagggcagcgcacccggcagccctgccggcagccccacctccacagaggagggaaccagcaccgagcccagcgaaggcagcgccccaggcaccagcaccgagcctagtgagcaggagattaaacggatcaacaagatcagaagaagacttgtgaaagacagcaacaccaagaaggccggcaagacaggccccatgaaaaccctgctggttagagtgatgacacccgatctgagagagcggctggaaaacctgagaaagaagcctgaaaatatcccccagcccatcagcaatacatctagagccaacctgaataagctgctgaccgattacaccgaaatgaagaaggcgatcctgcatgtgtactgggaagagttccagaaggaccctgtgggcctgatgagccgggtggcccagcctgccagcaagaagatcgatcagaacaagctgaaacctgagatggacgagaagggcaacctgaccaccgccggctttgcctgctctcagtgtggccagcccctgttcgtgtacaagctggagcaggtgtctgagaagggcaaggcttacaccaactacttcggacggtgcaatgtggccgagcacgaaaagctgatcctgctggcccagctgaagcccgagaaggatagcgacgaagccgtgacatatagcctgggaaagtttgggcagagggccctggatttctacagcattcatgtgaccaaggagtccacccaccccgtgaagcccctggcccagatcgccggaaacagatacgcctccggacctgtgggaaaggccctgagcgacgcatgtatgggcacaatcgcctccttcctgtctaagtaccaggacatcatcatcgaacaccagaaggtggtgaagggcaaccagaagagactggagagcctgcgggagctggccggcaaggaaaacctggaataccctagcgtgaccctgccacctcagcctcacaccaaggagggcgttgatgcctacaacgaagtgatcgcccgggtgcgaatgtgggtgaacctgaacctgtggcagaagctgaagctaagcagagatgatgccaagcctctgctgagactgaagggattcccttcctttcctctggtcgagagacaggccaacgaagtggactggtgggacatggtgtgtaacgtgaagaagctgatcaacgagaaaaaggaggatggcaaggtgttttggcagaatctggctggctacaagagacaggaagccctgagaccatacctgagcagcgaggaagatcggaagaagggaaagaaattcgctcggtaccagctgggcgacctgctgctgcacctggaaaagaagcacggcgaggactggggaaaggtgtacgacgaggcctgggagcggattgacaagaaagtggaaggcctgagcaagcacatcaagctggaagaggaacggagaagcgaggacgcccagagcaaggccgccctgaccgactggctgcgggctaaggccagcttcgtgatcgagggcctgaaggaggccgacaaggacgagttctgcagatgcgagctgaagctgcagaagtggtacggggacctgcggggaaagcccttcgccatcgaagccgagaacagcatcctggacatcagcggcttcagcaagcagtacaactgtgccttcatctggcagaaggacggcgtgaagaagctgaacctgtacctgatcatcaactacttcaagggcggcaagctgcggttcaagaagatcaaacctgaagccttcgaagccaacagattctacaccgtgatcaacaaaaagagcggcgagatcgtgcccatggaggtgaacttcaacttcgacgaccccaacctgatcatcctgcctctggcctttggcaagagacagggcagagaattcatctggaacgacctgctgtccctggaaaccggcagcctgaagctggccaacggaagagtgatcgagaagacactgtacaacagaagaacccggcaggatgagcctgccctgttcgtggccctgaccttcgagcggcgggaggtcctggactcctccaatatcaaaccaatgaacctgatcggcgtggcaagaggcgaaaacatccccgccgtgatcgccctgaccgaccccgagggctgcccactgagccggtttaaggatagcctgggaaacccaacccacatcctgagaatcggcgagagctataaggagaagcagcggaccatccaggccaagaaggaggtggagcagcggagagccggcggctacagccggaagtacgccagcaaagccaagaatctggcagacgatatggtgagaaacaccgctagagatctgctgtactacgccgtgacccaggatgccatgctgatcttcgccaacctgagccggggcttcggccggcagggcaagcggaccttcatggccgagagacagtacacacggatggaggactggctgaccgccaagctggcctacgagggcctgagcaagacctacctgtccaagacactggcccagtacacctccaagacatgcagcaactgtgggtttaccatcaccagcgccgactacgacagggtgctggagaagctgaagaagacagcaacaggctggatgaccacaattaacggcaaggagctgaaggtggagggccagattacctactacaacagatacaagagacagaacgtagtcaaggacctgtccgtcgagctggatagactgagcgaagaatctgtgaacaacgacatctcctcctggacaaagggcagaagcggagaagctctgagcctcctgaagaaaagattctcccatagacccgtgcaggagaagttcgtgtgcctgaactgcggcttcgagacacacgcagccgagcaagccgccctgaacatcgccagatcctggctgttcctgcggagccaggagtacaagaaataccagacaaacaagacaaccggcaacaccgataagagagccttcgtcgagacctggcagtccttttaccggaagaagcttaaggaggtgtggaaacctgccgtgcggtctggcggatctggcggaggctccaccagccccaagaaaaagagaaaagtctaagctgccttctgcggggcttgccttctggccatgcccttcttctctcccttgcacctgtacctcttggtctttgaataaagcctgagtaggaaggctagcaaaaaaaaaaaaaaaaaaaaaaaaaaaaaaaaaaaaaaaaaaaaaaaaaaaaaaaaaaaaaaaaaaaaaaaaaaaaaaaa

SEQ ID NO: 10453 - RNA, 8787 nt, synthetic construct
  source 1..8787: mol_type = other RNA
aggaaataagagagaaaagaagagtaagaagaaatataagagccaccatggcccctaagaagaagcgtaaagtgagccggatgaaccacgaccaggagttcgacccccctaaggtgtaccctcccgtccccgccgagaagagaaagcccatccgggtcctgagcctgttcgatggcatcgccaccggtctgctggtgctgaaggacctgggcatccaggtggataggtacattgcctccgaggtgtgcgaggactccatcaccgtgggaatggtgcgtcatcagggcaagatcatgtacgtgggcgacgtgcggagcgtgacacagaagcatatccaggagtggggccctttcgacctggtgatcggcggcagcccttgcaatgacctgagcatcgtgaacccagcccggaagggcctgtacgagggaaccggcagactgttcttcgagttttacagactgctgcacgacgcccggcctaaggaaggcgacgaccggcccttcttttggctgttcgagaatgtggtggccatgggagtcagcgacaagcgggatattagccggttcctggagagcaaccccgtgatgatcgatgccaaggaagtgagcgccgcccaccgggccagatacttctggggcaatctgcctggcatgaacagacccctggccagcaccgtgaacgacaagctggagctgcaggagtgcctggagcacggccggatcgccaagttcagcaaggtgagaaccatcaccacccgaagcaacagcatcaaacaaggcaaggaccagcactttcctgtgttcatgaacgagaaggaggacatcctgtggtgtaccgagatggagagagtgttcgggttcccagtccactacacagatgtcagcaacatgtctagactggccagacagagactgctgggaagaagctggtccgtccctgtgatcagacacctgttcgcccctctgaaggagtacttcgcctgcgtgagcagcggcaacagcaacgccaacagccggggccccagcttctctagcggcctggtgccactgtccctgagagggagccacatgggccccatggagatctacaaaaccgtgagcgcctggaagcggcagcctgtgcgcgtgctgagcctgtttcggaatatcgataaagtcctgaaaagcctgggattcctggagagcggctctggctccggcggtggcaccctgaagtacgtggaggatgtgacaaacgtggtcagacgggatgtggagaagtggggccccttcgatctggtgtacggcagcacccaacccctgggcagctcttgtgaccggtgccctggctggtacatgtttcagttccaccggatcctgcagtacgccctgccgagacaggagtcccagcggccattcttttggattttcatggacaacttgctgctgaccgaggatgaccaggaaactaccactcggttcctgcagaccgaagccgtgaccctgcaggacgtgagaggccgggactaccagaacgccatgcgggtgtggtccaacatccctggactgaaaagcaagcacgcacctctgacccctaaagaagaggagtacctgcaggcccaggtgcggagcagaagcaagctggacgcccctaaggtggatctgctggtgaagaattgcctcctgcccctgagagagtacttcaagtatttcagccagaatagtctgcccctgggaggcagcggcggcggcttccccatgcccgtgaccttcgaggaggtggccgtgtacttcacccagggccagggcgccctgctggaccccgcccagagggccctgtacagggacgtgatgcaggagaactacaagatggtgaccagcctggccggcttccccatccccaagcccgacctgatcgcccagctggagaggggcgaggagccctgggtgcccgacctgcaggccgacgaggagagggagagccccaggggcaccggcggcccaagcagcggcgcccctcctcccagcggcggcaggcggcccaagcagcggcgcccctcctcccagcggcggcagcccagccggctccccaacctctaccgaggagggcacctctgagtccgccacccccgagagcggccctggcacctccaccgagcccagcgagggcagcgcacccggcagccctgccggcagccccacctccacagaggagggaaccagcaccgagcccagcgaaggcagcgccccaggcaccagcaccgagcctagtgagcaggagattaaacggatcaacaagatcagaagaagacttgtgaaagacagcaacaccaagaaggccggcaagacaggccccatgaaaaccctgctggttagagtgatgacacccgatctgagagagcggctggaaaacctgagaaagaagcctgaaaatatcccccagcccatcagcaatacatctagagccaacctgaataagctgctgaccgattacaccgaaatgaagaaggcgatcctgcatgtgtactgggaagagttccagaaggaccctgtgggcctgatgagccgggtggcccagcctgccagcaagaagatcgatcagaacaagctgaaacctgagatggacgagaagggcaacctgaccaccgccggctttgcctgctctcagtgtggccagcccctgttcgtgtacaagctggagcaggtgtctgagaagggcaaggcttacaccaactacttcggacggtgcaatgtggccgagcacgaaaagctgatcctgctggcccagctgaagcccgagaaggatagcgacgaagccgtgacatatagcctgggaaagtttgggcagagggccctggatttctacagcattcatgtgaccaaggagtccacccaccccgtgaagcccctggcccagatcgccggaaacagatacgcctccggacctgtgggaaaggccctgagcgacgcatgtatgggcacaatcgcctccttcctgtctaagtaccaggacatcatcatcgaacaccagaaggtggtgaagggcaaccagaagagactggagagcctgcgggagctggccggcaaggaaaacctggaataccctagcgtgaccctgccacctcagcctcacaccaaggagggcgttgatgcctacaacgaagtgatcgcccgggtgcgaatgtgggtgaacctgaacctgtggcagaagctgaagctaagcagagatgatgccaagcctctgctgagactgaagggattcccttcctttcctctggtcgagagacaggccaacgaagtggactggtgggacatggtgtgtaacgtgaagaagctgatcaacgagaaaaaggaggatggcaaggtgttttggcagaatctggctggctacaagagacaggaagccctgagaccatacctgagcagcgaggaagatcggaagaagggaaagaaattcgctcggtaccagctgggcgacctgctgctgcacctggaaaagaagcacggcgaggactggggaaaggtgtacgacgaggcctgggagcggattgacaagaaagtggaaggcctgagcaagcacatcaagctggaagaggaacggagaagcgaggacgcccagagcaaggccgccctgaccgactggctgcgggctaaggccagcttcgtgatcgagggcctgaaggaggccgacaaggacgagttctgcagatgcgagctgaagctgcagaagtggtacggggacctgcggggaaagcccttcgccatcgaagccgagaacagcatcctggacatcagcggcttcagcaagcagtacaactgtgccttcatctggcagaaggacggcgtgaagaagctgaacctgtacctgatcatcaactacttcaagggcggcaagctgcggttcaagaagatcaaacctgaagccttcgaagccaacagattctacaccgtgatcaacaaaaagagcggcgagatcgtgcccatggaggtgaacttcaacttcgacgaccccaacctgatcatcctgcctctggcctttggcaagagacagggcagagaattcatctggaacgacctgctgtccctggaaaccggcagcctgaagctggccaacggaagagtgatcgagaagacactgtacaacagaagaacccggcaggatgagcctgccctgttcgtggccctgaccttcgagcggcgggaggtcctggactcctccaatatcaaaccaatgaacctgatcggcgtggcaagaggcgaaaacatccccgccgtgatcgccctgaccgaccccgagggctgcccactgagccggtttaaggatagcctgggaaacccaacccacatcctgagaatcggcgagagctataaggagaagcagcggaccatccaggccaagaaggaggtggagcagcggagagccggcggctacagccggaagtacgccagcaaagccaagaatctggcagacgatatggtgagaaacaccgctagagatctgctgtactacgccgtgacccaggatgccatgctgatcttcgccaacctgagccggggcttcggccggcagggcaagcggaccttcatggccgagagacagtacacacggatggaggactggctgaccgccaagctggcctacgagggcctgagcaagacctacctgtccaagacactggcccagtacacctccaagacatgcagcaactgtgggtttaccatcaccagcgccgactacgacagggtgctggagaagctgaagaagacagcaacaggctggatgaccacaattaacggcaaggagctgaaggtggagggccagattacctactacaacagatacaagagacagaacgtagtcaaggacctgtccgtcgagctggatagactgagcgaagaatctgtgaacaacgacatctcctcctggacaaagggcagaagcggagaagctctgagcctcctgaagaaaagattctcccatagacccgtgcaggagaagttcgtgtgcctgaactgcggcttcgagacacacgcagccgagcaagccgccctgaacatcgccagatcctggctgttcctgcggagccaggagtacaagaaataccagacaaacaagacaaccggcaacaccgataagagagccttcgtcgagacctggcagtccttttaccggaagaagcttaaggaggtgtggaaacctgccgtgcggtctggcggatctggcggaggctccaccagccccaagaaaaagagaaaagtctaagctgccttctgcggggcttgccttctggccatgcccttcttctctcccttgcacctgtacctcttggtctttgaataaagcctgagtaggaaggctagcaaaaaaaaaaaaaaaaaaaaaaaaaaaaaaaaaaaaaaaaaaaaaaaaaaaaaaaaaaaaaaaaaaaaaaaaaaaaaaaagcccagccggctccccaacctctaccgaggagggcacctctgagtccgccacccccgagagcggccctggcacctccaccgagcccagcgagggcagcgcacccggcagccctgccggcagccccacctccacagaggagggaaccagcaccgagcccagcgaaggcagcgccccaggcaccagcaccgagcctagtgagcaggagattaaacggatcaacaagatcagaagaagacttgtgaaagacagcaacaccaagaaggccggcaagacaggccccatgaaaaccctgctggttagagtgatgacacccgatctgagagagcggctggaaaacctgagaaagaagcctgaaaatatcccccagcccatcagcaatacatctagagccaacctgaataagctgctgaccgattacaccgaaatgaagaaggcgatcctgcatgtgtactgggaagagttccagaaggaccctgtgggcctgatgagccgggtggcccagcctgccagcaagaagatcgatcagaacaagctgaaacctgagatggacgagaagggcaacctgaccaccgccggctttgcctgctctcagtgtggccagcccctgttcgtgtacaagctggagcaggtgtctgagaagggcaaggcttacaccaactacttcggacggtgcaatgtggccgagcacgaaaagctgatcctgctggcccagctgaagcccgagaaggatagcgacgaagccgtgacatatagcctgggaaagtttgggcagagggccctggatttctacagcattcatgtgaccaaggagtccacccaccccgtgaagcccctggcccagatcgccggaaacagatacgcctccggacctgtgggaaaggccctgagcgacgcatgtatgggcacaatcgcctccttcctgtctaagtaccaggacatcatcatcgaacaccagaaggtggtgaagggcaaccagaagagactggagagcctgcgggagctggccggcaaggaaaacctggaataccctagcgtgaccctgccacctcagcctcacaccaaggagggcgttgatgcctacaacgaagtgatcgcccgggtgcgaatgtgggtgaacctgaacctgtggcagaagctgaagctaagcagagatgatgccaagcctctgctgagactgaagggattcccttcctttcctctggtcgagagacaggccaacgaagtggactggtgggacatggtgtgtaacgtgaagaagctgatcaacgagaaaaaggaggatggcaaggtgttttggcagaatctggctggctacaagagacaggaagccctgagaccatacctgagcagcgaggaagatcggaagaagggaaagaaattcgctcggtaccagctgggcgacctgctgctgcacctggaaaagaagcacggcgaggactggggaaaggtgtacgacgaggcctgggagcggattgacaagaaagtggaaggcctgagcaagcacatcaagctggaagaggaacggagaagcgaggacgcccagagcaaggccgccctgaccgactggctgcgggctaaggccagcttcgtgatcgagggcctgaaggaggccgacaaggacgagttctgcagatgcgagctgaagctgcagaagtggtacggggacctgcggggaaagcccttcgccatcgaagccgagaacagcatcctggacatcagcggcttcagcaagcagtacaactgtgccttcatctggcagaaggacggcgtgaagaagctgaacctgtacctgatcatcaactacttcaagggcggcaagctgcggttcaagaagatcaaacctgaagccttcgaagccaacagattctacaccgtgatcaacaaaaagagcggcgagatcgtgcccatggaggtgaacttcaacttcgacgaccccaacctgatcatcctgcctctggcctttggcaagagacagggcagagaattcatctggaacgacctgctgtccctggaaaccggcagcctgaagctggccaacggaagagtgatcgagaagacactgtacaacagaagaacccggcaggatgagcctgccctgttcgtggccctgaccttcgagcggcgggaggtcctggactcctccaatatcaaaccaatgaacctgatcggcgtggcaagaggcgaaaacatccccgccgtgatcgccctgaccgaccccgagggctgcccactgagccggtttaaggatagcctgggaaacccaacccacatcctgagaatcggcgagagctataaggagaagcagcggaccatccaggccaagaaggaggtggagcagcggagagccggcggctacagccggaagtacgccagcaaagccaagaatctggcagacgatatggtgagaaacaccgctagagatctgctgtactacgccgtgacccaggatgccatgctgatcttcgccaacctgagccggggcttcggccggcagggcaagcggaccttcatggccgagagacagtacacacggatggaggactggctgaccgccaagctggcctacgagggcctgagcaagacctacctgtccaagacactggcccagtacacctccaagacatgcagcaactgtgggtttaccatcaccagcgccgactacgacagggtgctggagaagctgaagaagacagcaacaggctggatgaccacaattaacggcaaggagctgaaggtggagggccagattacctactacaacagatacaagagacagaacgtagtcaaggacctgtccgtcgagctggatagactgagcgaagaatctgtgaacaacgacatctcctcctggacaaagggcagaagcggagaagctctgagcctcctgaagaaaagattctcccatagacccgtgcaggagaagttcgtgtgcctgaactgcggcttcgagacacacgcagccgagcaagccgccctgaacatcgccagatcctggctgttcctgcggagccaggagtacaagaaataccagacaaacaagacaaccggcaacaccgataagagagccttcgtcgagacctggcagtccttttaccggaagaagcttaaggaggtgtggaaacctgccgtgcggtctggcggatctggcggaggctccaccagccccaagaaaaagagaaaagtctaagctgccttctgcggggcttgccttctggccatgcccttcttctctcccttgcacctgtacctcttggtctttgaataaagcctgagtaggaaggctagcaaaaaaaaaaaaaaaaaaaaaaaaaaaaaaaaaaaaaaaaaaaaaaaaaaaaaaaaaaaaaaaaaaaaaaaaaaaaaaaa

SEQ ID NO: 10454 - RNA, 8787 nt, synthetic construct
  source 1..8787: mol_type = other RNA
aggaaataagagagaaaagaagagtaagaagaaatataagagccaccatggcccctaagaagaagcgtaaagtgagccggatgaaccacgaccaggagttcgacccccctaaggtgtaccctcccgtccccgccgagaagagaaagcccatccgggtcctgagcctgttcgatggcatcgccaccggtctgctggtgctgaaggacctgggcatccaggtggataggtacattgcctccgaggtgtgcgaggactccatcaccgtgggaatggtgcgtcatcagggcaagatcatgtacgtgggcgacgtgcggagcgtgacacagaagcatatccaggagtggggccctttcgacctggtgatcggcggcagcccttgcaatgacctgagcatcgtgaacccagcccggaagggcctgtacgagggaaccggcagactgttcttcgagttttacagactgctgcacgacgcccggcctaaggaaggcgacgaccggcccttcttttggctgttcgagaatgtggtggccatgggagtcagcgacaagcgggatattagccggttcctggagagcaaccccgtgatgatcgatgccaaggaagtgagcgccgcccaccgggccagatacttctggggcaatctgcctggcatgaacagacccctggccagcaccgtgaacgacaagctggagctgcaggagtgcctggagcacggccggatcgccaagttcagcaaggtgagaaccatcaccacccgaagcaacagcatcaaacaaggcaaggaccagcactttcctgtgttcatgaacgagaaggaggacatcctgtggtgtaccgagatggagagagtgttcgggttcccagtccactacacagatgtcagcaacatgtctagactggccagacagagactgctgggaagaagctggtccgtccctgtgatcagacacctgttcgcccctctgaaggagtacttcgcctgcgtgagcagcggcaacagcaacgccaacagccggggccccagcttctctagcggcctggtgccactgtccctgagagggagccacatgggccccatggagatctacaaaaccgtgagcgcctggaagcggcagcctgtgcgcgtgctgagcctgtttcggaatatcgataaagtcctgaaaagcctgggattcctggagagcggctctggctccggcggtggcaccctgaagtacgtggaggatgtgacaaacgtggtcagacgggatgtggagaagtggggccccttcgatctggtgtacggcagcacccaacccctgggcagctcttgtgaccggtgccctggctggtacatgtttcagttccaccggatcctgcagtacgccctgccgagacaggagtcccagcggccattcttttggattttcatggacaacttgctgctgaccgaggatgaccaggaaactaccactcggttcctgcagaccgaagccgtgaccctgcaggacgtgagaggccgggactaccagaacgccatgcgggtgtggtccaacatccctggactgaaaagcaagcacgcacctctgacccctaaagaagaggagtacctgcaggcccaggtgcggagcagaagcaagctggacgcccctaaggtggatctgctggtgaagaattgcctcctgcccctgagagagtacttcaagtatttcagccagaatagtctgcccctgggaggcagcggcggcggcctgctgaccttcgaggacgtggccgtgttcttcagcgaggaggagtggaagctgctgaaccccacccagaagatcctgtacagcgacgtgatgcaggagaactacgagaccgtgatcagcctgggcctgaagctgaagaacgacaccggcaacgaccagcccatcagcctgagcaccctggagctgcaggccagcggctgcaaggtgctgaggaaggccagggtgaaggtggcccagaagaccggcggcccaagcagcggcgcccctcctcccagcggcggcaggcggcccaagcagcggcgcccctcctcccagcggcggcagcccagccggctccccaacctctaccgaggagggcacctctgagtccgccacccccgagagcggccctggcacctccaccgagcccagcgagggcagcgcacccggcagccctgccggcagccccacctccacagaggagggaaccagcaccgagcccagcgaaggcagcgccccaggcaccagcaccgagcctagtgagcaggagattaaacggatcaacaagatcagaagaagacttgtgaaagacagcaacaccaagaaggccggcaagacaggccccatgaaaaccctgctggttagagtgatgacacccgatctgagagagcggctggaaaacctgagaaagaagcctgaaaatatcccccagcccatcagcaatacatctagagccaacctgaataagctgctgaccgattacaccgaaatgaagaaggcgatcctgcatgtgtactgggaagagttccagaaggaccctgtgggcctgatgagccgggtggcccagcctgccagcaagaagatcgatcagaacaagctgaaacctgagatggacgagaagggcaacctgaccaccgccggctttgcctgctctcagtgtggccagcccctgttcgtgtacaagctggagcaggtgtctgagaagggcaaggcttacaccaactacttcggacggtgcaatgtggccgagcacgaaaagctgatcctgctggcccagctgaagcccgagaaggatagcgacgaagccgtgacatatagcctgggaaagtttgggcagagggccctggatttctacagcattcatgtgaccaaggagtccacccaccccgtgaagcccctggcccagatcgccggaaacagatacgcctccggacctgtgggaaaggccctgagcgacgcatgtatgggcacaatcgcctccttcctgtctaagtaccaggacatcatcatcgaacaccagaaggtggtgaagggcaaccagaagagactggagagcctgcgggagctggccggcaaggaaaacctggaataccctagcgtgaccctgccacctcagcctcacaccaaggagggcgttgatgcctacaacgaagtgatcgcccgggtgcgaatgtgggtgaacctgaacctgtggcagaagctgaagctaagcagagatgatgccaagcctctgctgagactgaagggattcccttcctttcctctggtcgagagacaggccaacgaagtggactggtgggacatggtgtgtaacgtgaagaagctgatcaacgagaaaaaggaggatggcaaggtgttttggcagaatctggctggctacaagagacaggaagccctgagaccatacctgagcagcgaggaagatcggaagaagggaaagaaattcgctcggtaccagctgggcgacctgctgctgcacctggaaaagaagcacggcgaggactggggaaaggtgtacgacgaggcctgggagcggattgacaagaaagtggaaggcctgagcaagcacatcaagctggaagaggaacggagaagcgaggacgcccagagcaaggccgccctgaccgactggctgcgggctaaggccagcttcgtgatcgagggcctgaaggaggccgacaaggacgagttctgcagatgcgagctgaagctgcagaagtggtacggggacctgcggggaaagcccttcgccatcgaagccgagaacagcatcctggacatcagcggcttcagcaagcagtacaactgtgccttcatctggcagaaggacggcgtgaagaagctgaacctgtacctgatcatcaactacttcaagggcggcaagctgcggttcaagaagatcaaacctgaagccttcgaagccaacagattctacaccgtgatcaacaaaaagagcggcgagatcgtgcccatggaggtgaacttcaacttcgacgaccccaacctgatcatcctgcctctggcctttggcaagagacagggcagagaattcatctggaacgacctgctgtccctggaaaccggcagcctgaagctggccaacggaagagtgatcgagaagacactgtacaacagaagaacccggcaggatgagcctgccctgttcgtggccctgaccttcgagcggcgggaggtcctggactcctccaatatcaaaccaatgaacctgatcggcgtggcaagaggcgaaaacatccccgccgtgatcgccctgaccgaccccgagggctgcccactgagccggtttaaggatagcctgggaaacccaacccacatcctgagaatcggcgagagctataaggagaagcagcggaccatccaggccaagaaggaggtggagcagcggagagccggcggctacagccggaagtacgccagcaaagccaagaatctggcagacgatatggtgagaaacaccgctagagatctgctgtactacgccgtgacccaggatgccatgctgatcttcgccaacctgagccggggcttcggccggcagggcaagcggaccttcatggccgagagacagtacacacggatggaggactggctgaccgccaagctggcctacgagggcctgagcaagacctacctgtccaagacactggcccagtacacctccaagacatgcagcaactgtgggtttaccatcaccagcgccgactacgacagggtgctggagaagctgaagaagacagcaacaggctggatgaccacaattaacggcaaggagctgaaggtggagggccagattacctactacaacagatacaagagacagaacgtagtcaaggacctgtccgtcgagctggatagactgagcgaagaatctgtgaacaacgacatctcctcctggacaaagggcagaagcggagaagctctgagcctcctgaagaaaagattctcccatagacccgtgcaggagaagttcgtgtgcctgaactgcggcttcgagacacacgcagccgagcaagccgccctgaacatcgccagatcctggctgttcctgcggagccaggagtacaagaaataccagacaaacaagacaaccggcaacaccgataagagagccttcgtcgagacctggcagtccttttaccggaagaagcttaaggaggtgtggaaacctgccgtgcggtctggcggatctggcggaggctccaccagccccaagaaaaagagaaaagtctaagctgccttctgcggggcttgccttctggccatgcccttcttctctcccttgcacctgtacctcttggtctttgaataaagcctgagtaggaaggctagcaaaaaaaaaaaaaaaaaaaaaaaaaaaaaaaaaaaaaaaaaaaaaaaaaaaaaaaaaaaaaaaaaaaaaaaaaaaaaaaagcccagccggctccccaacctctaccgaggagggcacctctgagtccgccacccccgagagcggccctggcacctccaccgagcccagcgagggcagcgcacccggcagccctgccggcagccccacctccacagaggagggaaccagcaccgagcccagcgaaggcagcgccccaggcaccagcaccgagcctagtgagcaggagattaaacggatcaacaagatcagaagaagacttgtgaaagacagcaacaccaagaaggccggcaagacaggccccatgaaaaccctgctggttagagtgatgacacccgatctgagagagcggctggaaaacctgagaaagaagcctgaaaatatcccccagcccatcagcaatacatctagagccaacctgaataagctgctgaccgattacaccgaaatgaagaaggcgatcctgcatgtgtactgggaagagttccagaaggaccctgtgggcctgatgagccgggtggcccagcctgccagcaagaagatcgatcagaacaagctgaaacctgagatggacgagaagggcaacctgaccaccgccggctttgcctgctctcagtgtggccagcccctgttcgtgtacaagctggagcaggtgtctgagaagggcaaggcttacaccaactacttcggacggtgcaatgtggccgagcacgaaaagctgatcctgctggcccagctgaagcccgagaaggatagcgacgaagccgtgacatatagcctgggaaagtttgggcagagggccctggatttctacagcattcatgtgaccaaggagtccacccaccccgtgaagcccctggcccagatcgccggaaacagatacgcctccggacctgtgggaaaggccctgagcgacgcatgtatgggcacaatcgcctccttcctgtctaagtaccaggacatcatcatcgaacaccagaaggtggtgaagggcaaccagaagagactggagagcctgcgggagctggccggcaaggaaaacctggaataccctagcgtgaccctgccacctcagcctcacaccaaggagggcgttgatgcctacaacgaagtgatcgcccgggtgcgaatgtgggtgaacctgaacctgtggcagaagctgaagctaagcagagatgatgccaagcctctgctgagactgaagggattcccttcctttcctctggtcgagagacaggccaacgaagtggactggtgggacatggtgtgtaacgtgaagaagctgatcaacgagaaaaaggaggatggcaaggtgttttggcagaatctggctggctacaagagacaggaagccctgagaccatacctgagcagcgaggaagatcggaagaagggaaagaaattcgctcggtaccagctgggcgacctgctgctgcacctggaaaagaagcacggcgaggactggggaaaggtgtacgacgaggcctgggagcggattgacaagaaagtggaaggcctgagcaagcacatcaagctggaagaggaacggagaagcgaggacgcccagagcaaggccgccctgaccgactggctgcgggctaaggccagcttcgtgatcgagggcctgaaggaggccgacaaggacgagttctgcagatgcgagctgaagctgcagaagtggtacggggacctgcggggaaagcccttcgccatcgaagccgagaacagcatcctggacatcagcggcttcagcaagcagtacaactgtgccttcatctggcagaaggacggcgtgaagaagctgaacctgtacctgatcatcaactacttcaagggcggcaagctgcggttcaagaagatcaaacctgaagccttcgaagccaacagattctacaccgtgatcaacaaaaagagcggcgagatcgtgcccatggaggtgaacttcaacttcgacgaccccaacctgatcatcctgcctctggcctttggcaagagacagggcagagaattcatctggaacgacctgctgtccctggaaaccggcagcctgaagctggccaacggaagagtgatcgagaagacactgtacaacagaagaacccggcaggatgagcctgccctgttcgtggccctgaccttcgagcggcgggaggtcctggactcctccaatatcaaaccaatgaacctgatcggcgtggcaagaggcgaaaacatccccgccgtgatcgccctgaccgaccccgagggctgcccactgagccggtttaaggatagcctgggaaacccaacccacatcctgagaatcggcgagagctataaggagaagcagcggaccatccaggccaagaaggaggtggagcagcggagagccggcggctacagccggaagtacgccagcaaagccaagaatctggcagacgatatggtgagaaacaccgctagagatctgctgtactacgccgtgacccaggatgccatgctgatcttcgccaacctgagccggggcttcggccggcagggcaagcggaccttcatggccgagagacagtacacacggatggaggactggctgaccgccaagctggcctacgagggcctgagcaagacctacctgtccaagacactggcccagtacacctccaagacatgcagcaactgtgggtttaccatcaccagcgccgactacgacagggtgctggagaagctgaagaagacagcaacaggctggatgaccacaattaacggcaaggagctgaaggtggagggccagattacctactacaacagatacaagagacagaacgtagtcaaggacctgtccgtcgagctggatagactgagcgaagaatctgtgaacaacgacatctcctcctggacaaagggcagaagcggagaagctctgagcctcctgaagaaaagattctcccatagacccgtgcaggagaagttcgtgtgcctgaactgcggcttcgagacacacgcagccgagcaagccgccctgaacatcgccagatcctggctgttcctgcggagccaggagtacaagaaataccagacaaacaagacaaccggcaacaccgataagagagccttcgtcgagacctggcagtccttttaccggaagaagcttaaggaggtgtggaaacctgccgtgcggtctggcggatctggcggaggctccaccagccccaagaaaaagagaaaagtctaagctgccttctgcggggcttgccttctggccatgcccttcttctctcccttgcacctgtacctcttggtctttgaataaagcctgagtaggaaggctagcaaaaaaaaaaaaaaaaaaaaaaaaaaaaaaaaaaaaaaaaaaaaaaaaaaaaaaaaaaaaaaaaaaaaaaaaaaaaaaaa

SEQ ID NO: 10455 - RNA, 8787 nt, synthetic construct
  source 1..8787: mol_type = other RNA
aggaaataagagagaaaagaagagtaagaagaaatataagagccaccatggcccctaagaagaagcgtaaagtgagccggatgaaccacgaccaggagttcgacccccctaaggtgtaccctcccgtccccgccgagaagagaaagcccatccgggtcctgagcctgttcgatggcatcgccaccggtctgctggtgctgaaggacctgggcatccaggtggataggtacattgcctccgaggtgtgcgaggactccatcaccgtgggaatggtgcgtcatcagggcaagatcatgtacgtgggcgacgtgcggagcgtgacacagaagcatatccaggagtggggccctttcgacctggtgatcggcggcagcccttgcaatgacctgagcatcgtgaacccagcccggaagggcctgtacgagggaaccggcagactgttcttcgagttttacagactgctgcacgacgcccggcctaaggaaggcgacgaccggcccttcttttggctgttcgagaatgtggtggccatgggagtcagcgacaagcgggatattagccggttcctggagagcaaccccgtgatgatcgatgccaaggaagtgagcgccgcccaccgggccagatacttctggggcaatctgcctggcatgaacagacccctggccagcaccgtgaacgacaagctggagctgcaggagtgcctggagcacggccggatcgccaagttcagcaaggtgagaaccatcaccacccgaagcaacagcatcaaacaaggcaaggaccagcactttcctgtgttcatgaacgagaaggaggacatcctgtggtgtaccgagatggagagagtgttcgggttcccagtccactacacagatgtcagcaacatgtctagactggccagacagagactgctgggaagaagctggtccgtccctgtgatcagacacctgttcgcccctctgaaggagtacttcgcctgcgtgagcagcggcaacagcaacgccaacagccggggccccagcttctctagcggcctggtgccactgtccctgagagggagccacatgggccccatggagatctacaaaaccgtgagcgcctggaagcggcagcctgtgcgcgtgctgagcctgtttcggaatatcgataaagtcctgaaaagcctgggattcctggagagcggctctggctccggcggtggcaccctgaagtacgtggaggatgtgacaaacgtggtcagacgggatgtggagaagtggggccccttcgatctggtgtacggcagcacccaacccctgggcagctcttgtgaccggtgccctggctggtacatgtttcagttccaccggatcctgcagtacgccctgccgagacaggagtcccagcggccattcttttggattttcatggacaacttgctgctgaccgaggatgaccaggaaactaccactcggttcctgcagaccgaagccgtgaccctgcaggacgtgagaggccgggactaccagaacgccatgcgggtgtggtccaacatccctggactgaaaagcaagcacgcacctctgacccctaaagaagaggagtacctgcaggcccaggtgcggagcagaagcaagctggacgcccctaaggtggatctgctggtgaagaattgcctcctgcccctgagagagtacttcaagtatttcagccagaatagtctgcccctgggaggcagcggcggcggctggaaggagctgctgagcttcgaggacgtggccctgttcttcaccagggaggagtggaaccagctggactgggcccagaaggacctgtacagggacgtgatgctggagaactacaggaacctgatcctgctgggcttccagttccccaagcccgaggtgatctgccagctggagcagtgggaggagccctggatcctggacctgcccagggccggcaccaggaaggccagcggcagcgcctgcggcggcccaagcagcggcgcccctcctcccagcggcggcaggcggcccaagcagcggcgcccctcctcccagcggcggcagcccagccggctccccaacctctaccgaggagggcacctctgagtccgccacccccgagagcggccctggcacctccaccgagcccagcgagggcagcgcacccggcagccctgccggcagccccacctccacagaggagggaaccagcaccgagcccagcgaaggcagcgccccaggcaccagcaccgagcctagtgagcaggagattaaacggatcaacaagatcagaagaagacttgtgaaagacagcaacaccaagaaggccggcaagacaggccccatgaaaaccctgctggttagagtgatgacacccgatctgagagagcggctggaaaacctgagaaagaagcctgaaaatatcccccagcccatcagcaatacatctagagccaacctgaataagctgctgaccgattacaccgaaatgaagaaggcgatcctgcatgtgtactgggaagagttccagaaggaccctgtgggcctgatgagccgggtggcccagcctgccagcaagaagatcgatcagaacaagctgaaacctgagatggacgagaagggcaacctgaccaccgccggctttgcctgctctcagtgtggccagcccctgttcgtgtacaagctggagcaggtgtctgagaagggcaaggcttacaccaactacttcggacggtgcaatgtggccgagcacgaaaagctgatcctgctggcccagctgaagcccgagaaggatagcgacgaagccgtgacatatagcctgggaaagtttgggcagagggccctggatttctacagcattcatgtgaccaaggagtccacccaccccgtgaagcccctggcccagatcgccggaaacagatacgcctccggacctgtgggaaaggccctgagcgacgcatgtatgggcacaatcgcctccttcctgtctaagtaccaggacatcatcatcgaacaccagaaggtggtgaagggcaaccagaagagactggagagcctgcgggagctggccggcaaggaaaacctggaataccctagcgtgaccctgccacctcagcctcacaccaaggagggcgttgatgcctacaacgaagtgatcgcccgggtgcgaatgtgggtgaacctgaacctgtggcagaagctgaagctaagcagagatgatgccaagcctctgctgagactgaagggattcccttcctttcctctggtcgagagacaggccaacgaagtggactggtgggacatggtgtgtaacgtgaagaagctgatcaacgagaaaaaggaggatggcaaggtgttttggcagaatctggctggctacaagagacaggaagccctgagaccatacctgagcagcgaggaagatcggaagaagggaaagaaattcgctcggtaccagctgggcgacctgctgctgcacctggaaaagaagcacggcgaggactggggaaaggtgtacgacgaggcctgggagcggattgacaagaaagtggaaggcctgagcaagcacatcaagctggaagaggaacggagaagcgaggacgcccagagcaaggccgccctgaccgactggctgcgggctaaggccagcttcgtgatcgagggcctgaaggaggccgacaaggacgagttctgcagatgcgagctgaagctgcagaagtggtacggggacctgcggggaaagcccttcgccatcgaagccgagaacagcatcctggacatcagcggcttcagcaagcagtacaactgtgccttcatctggcagaaggacggcgtgaagaagctgaacctgtacctgatcatcaactacttcaagggcggcaagctgcggttcaagaagatcaaacctgaagccttcgaagccaacagattctacaccgtgatcaacaaaaagagcggcgagatcgtgcccatggaggtgaacttcaacttcgacgaccccaacctgatcatcctgcctctggcctttggcaagagacagggcagagaattcatctggaacgacctgctgtccctggaaaccggcagcctgaagctggccaacggaagagtgatcgagaagacactgtacaacagaagaacccggcaggatgagcctgccctgttcgtggccctgaccttcgagcggcgggaggtcctggactcctccaatatcaaaccaatgaacctgatcggcgtggcaagaggcgaaaacatccccgccgtgatcgccctgaccgaccccgagggctgcccactgagccggtttaaggatagcctgggaaacccaacccacatcctgagaatcggcgagagctataaggagaagcagcggaccatccaggccaagaaggaggtggagcagcggagagccggcggctacagccggaagtacgccagcaaagccaagaatctggcagacgatatggtgagaaacaccgctagagatctgctgtactacgccgtgacccaggatgccatgctgatcttcgccaacctgagccggggcttcggccggcagggcaagcggaccttcatggccgagagacagtacacacggatggaggactggctgaccgccaagctggcctacgagggcctgagcaagacctacctgtccaagacactggcccagtacacctccaagacatgcagcaactgtgggtttaccatcaccagcgccgactacgacagggtgctggagaagctgaagaagacagcaacaggctggatgaccacaattaacggcaaggagctgaaggtggagggccagattacctactacaacagatacaagagacagaacgtagtcaaggacctgtccgtcgagctggatagactgagcgaagaatctgtgaacaacgacatctcctcctggacaaagggcagaagcggagaagctctgagcctcctgaagaaaagattctcccatagacccgtgcaggagaagttcgtgtgcctgaactgcggcttcgagacacacgcagccgagcaagccgccctgaacatcgccagatcctggctgttcctgcggagccaggagtacaagaaataccagacaaacaagacaaccggcaacaccgataagagagccttcgtcgagacctggcagtccttttaccggaagaagcttaaggaggtgtggaaacctgccgtgcggtctggcggatctggcggaggctccaccagccccaagaaaaagagaaaagtctaagctgccttctgcggggcttgccttctggccatgcccttcttctctcccttgcacctgtacctcttggtctttgaataaagcctgagtaggaaggctagcaaaaaaaaaaaaaaaaaaaaaaaaaaaaaaaaaaaaaaaaaaaaaaaaaaaaaaaaaaaaaaaaaaaaaaaaaaaaaaaagcccagccggctccccaacctctaccgaggagggcacctctgagtccgccacccccgagagcggccctggcacctccaccgagcccagcgagggcagcgcacccggcagccctgccggcagccccacctccacagaggagggaaccagcaccgagcccagcgaaggcagcgccccaggcaccagcaccgagcctagtgagcaggagattaaacggatcaacaagatcagaagaagacttgtgaaagacagcaacaccaagaaggccggcaagacaggccccatgaaaaccctgctggttagagtgatgacacccgatctgagagagcggctggaaaacctgagaaagaagcctgaaaatatcccccagcccatcagcaatacatctagagccaacctgaataagctgctgaccgattacaccgaaatgaagaaggcgatcctgcatgtgtactgggaagagttccagaaggaccctgtgggcctgatgagccgggtggcccagcctgccagcaagaagatcgatcagaacaagctgaaacctgagatggacgagaagggcaacctgaccaccgccggctttgcctgctctcagtgtggccagcccctgttcgtgtacaagctggagcaggtgtctgagaagggcaaggcttacaccaactacttcggacggtgcaatgtggccgagcacgaaaagctgatcctgctggcccagctgaagcccgagaaggatagcgacgaagccgtgacatatagcctgggaaagtttgggcagagggccctggatttctacagcattcatgtgaccaaggagtccacccaccccgtgaagcccctggcccagatcgccggaaacagatacgcctccggacctgtgggaaaggccctgagcgacgcatgtatgggcacaatcgcctccttcctgtctaagtaccaggacatcatcatcgaacaccagaaggtggtgaagggcaaccagaagagactggagagcctgcgggagctggccggcaaggaaaacctggaataccctagcgtgaccctgccacctcagcctcacaccaaggagggcgttgatgcctacaacgaagtgatcgcccgggtgcgaatgtgggtgaacctgaacctgtggcagaagctgaagctaagcagagatgatgccaagcctctgctgagactgaagggattcccttcctttcctctggtcgagagacaggccaacgaagtggactggtgggacatggtgtgtaacgtgaagaagctgatcaacgagaaaaaggaggatggcaaggtgttttggcagaatctggctggctacaagagacaggaagccctgagaccatacctgagcagcgaggaagatcggaagaagggaaagaaattcgctcggtaccagctgggcgacctgctgctgcacctggaaaagaagcacggcgaggactggggaaaggtgtacgacgaggcctgggagcggattgacaagaaagtggaaggcctgagcaagcacatcaagctggaagaggaacggagaagcgaggacgcccagagcaaggccgccctgaccgactggctgcgggctaaggccagcttcgtgatcgagggcctgaaggaggccgacaaggacgagttctgcagatgcgagctgaagctgcagaagtggtacggggacctgcggggaaagcccttcgccatcgaagccgagaacagcatcctggacatcagcggcttcagcaagcagtacaactgtgccttcatctggcagaaggacggcgtgaagaagctgaacctgtacctgatcatcaactacttcaagggcggcaagctgcggttcaagaagatcaaacctgaagccttcgaagccaacagattctacaccgtgatcaacaaaaagagcggcgagatcgtgcccatggaggtgaacttcaacttcgacgaccccaacctgatcatcctgcctctggcctttggcaagagacagggcagagaattcatctggaacgacctgctgtccctggaaaccggcagcctgaagctggccaacggaagagtgatcgagaagacactgtacaacagaagaacccggcaggatgagcctgccctgttcgtggccctgaccttcgagcggcgggaggtcctggactcctccaatatcaaaccaatgaacctgatcggcgtggcaagaggcgaaaacatccccgccgtgatcgccctgaccgaccccgagggctgcccactgagccggtttaaggatagcctgggaaacccaacccacatcctgagaatcggcgagagctataaggagaagcagcggaccatccaggccaagaaggaggtggagcagcggagagccggcggctacagccggaagtacgccagcaaagccaagaatctggcagacgatatggtgagaaacaccgctagagatctgctgtactacgccgtgacccaggatgccatgctgatcttcgccaacctgagccggggcttcggccggcagggcaagcggaccttcatggccgagagacagtacacacggatggaggactggctgaccgccaagctggcctacgagggcctgagcaagacctacctgtccaagacactggcccagtacacctccaagacatgcagcaactgtgggtttaccatcaccagcgccgactacgacagggtgctggagaagctgaagaagacagcaacaggctggatgaccacaattaacggcaaggagctgaaggtggagggccagattacctactacaacagatacaagagacagaacgtagtcaaggacctgtccgtcgagctggatagactgagcgaagaatctgtgaacaacgacatctcctcctggacaaagggcagaagcggagaagctctgagcctcctgaagaaaagattctcccatagacccgtgcaggagaagttcgtgtgcctgaactgcggcttcgagacacacgcagccgagcaagccgccctgaacatcgccagatcctggctgttcctgcggagccaggagtacaagaaataccagacaaacaagacaaccggcaacaccgataagagagccttcgtcgagacctggcagtccttttaccggaagaagcttaaggaggtgtggaaacctgccgtgcggtctggcggatctggcggaggctccaccagccccaagaaaaagagaaaagtctaagctgccttctgcggggcttgccttctggccatgcccttcttctctcccttgcacctgtacctcttggtctttgaataaagcctgagtaggaaggctagcaaaaaaaaaaaaaaaaaaaaaaaaaaaaaaaaaaaaaaaaaaaaaaaaaaaaaaaaaaaaaaaaaaaaaaaaaaaaaaaa

SEQ ID NO: 10456 - RNA, 8787 nt, synthetic construct
  source 1..8787: mol_type = other RNA
aggaaataagagagaaaagaagagtaagaagaaatataagagccaccatggcccctaagaagaagcgtaaagtgagccggatgaaccacgaccaggagttcgacccccctaaggtgtaccctcccgtccccgccgagaagagaaagcccatccgggtcctgagcctgttcgatggcatcgccaccggtctgctggtgctgaaggacctgggcatccaggtggataggtacattgcctccgaggtgtgcgaggactccatcaccgtgggaatggtgcgtcatcagggcaagatcatgtacgtgggcgacgtgcggagcgtgacacagaagcatatccaggagtggggccctttcgacctggtgatcggcggcagcccttgcaatgacctgagcatcgtgaacccagcccggaagggcctgtacgagggaaccggcagactgttcttcgagttttacagactgctgcacgacgcccggcctaaggaaggcgacgaccggcccttcttttggctgttcgagaatgtggtggccatgggagtcagcgacaagcgggatattagccggttcctggagagcaaccccgtgatgatcgatgccaaggaagtgagcgccgcccaccgggccagatacttctggggcaatctgcctggcatgaacagacccctggccagcaccgtgaacgacaagctggagctgcaggagtgcctggagcacggccggatcgccaagttcagcaaggtgagaaccatcaccacccgaagcaacagcatcaaacaaggcaaggaccagcactttcctgtgttcatgaacgagaaggaggacatcctgtggtgtaccgagatggagagagtgttcgggttcccagtccactacacagatgtcagcaacatgtctagactggccagacagagactgctgggaagaagctggtccgtccctgtgatcagacacctgttcgcccctctgaaggagtacttcgcctgcgtgagcagcggcaacagcaacgccaacagccggggccccagcttctctagcggcctggtgccactgtccctgagagggagccacatgggccccatggagatctacaaaaccgtgagcgcctggaagcggcagcctgtgcgcgtgctgagcctgtttcggaatatcgataaagtcctgaaaagcctgggattcctggagagcggctctggctccggcggtggcaccctgaagtacgtggaggatgtgacaaacgtggtcagacgggatgtggagaagtggggccccttcgatctggtgtacggcagcacccaacccctgggcagctcttgtgaccggtgccctggctggtacatgtttcagttccaccggatcctgcagtacgccctgccgagacaggagtcccagcggccattcttttggattttcatggacaacttgctgctgaccgaggatgaccaggaaactaccactcggttcctgcagaccgaagccgtgaccctgcaggacgtgagaggccgggactaccagaacgccatgcgggtgtggtccaacatccctggactgaaaagcaagcacgcacctctgacccctaaagaagaggagtacctgcaggcccaggtgcggagcagaagcaagctggacgcccctaaggtggatctgctggtgaagaattgcctcctgcccctgagagagtacttcaagtatttcagccagaatagtctgcccctgggaggcagcggcggcggccagggcctgctgaccttcggcgacgtggccatcgagttcagccaggaggagtggaggtgcctgagccacacccagagggagctgtacagggacgtgatgctggagaactacggccacctgctgttcctgggcctgatcgtgagcaagcccgacctggtgagcctgctggagcagaggaaggagccctgggacgtgaagaggaagaagaccgtggtgttcgaccccgccgtgagcagccacggcggcggcccaagcagcggcgcccctcctcccagcggcggcaggcggcccaagcagcggcgcccctcctcccagcggcggcagcccagccggctccccaacctctaccgaggagggcacctctgagtccgccacccccgagagcggccctggcacctccaccgagcccagcgagggcagcgcacccggcagccctgccggcagccccacctccacagaggagggaaccagcaccgagcccagcgaaggcagcgccccaggcaccagcaccgagcctagtgagcaggagattaaacggatcaacaagatcagaagaagacttgtgaaagacagcaacaccaagaaggccggcaagacaggccccatgaaaaccctgctggttagagtgatgacacccgatctgagagagcggctggaaaacctgagaaagaagcctgaaaatatcccccagcccatcagcaatacatctagagccaacctgaataagctgctgaccgattacaccgaaatgaagaaggcgatcctgcatgtgtactgggaagagttccagaaggaccctgtgggcctgatgagccgggtggcccagcctgccagcaagaagatcgatcagaacaagctgaaacctgagatggacgagaagggcaacctgaccaccgccggctttgcctgctctcagtgtggccagcccctgttcgtgtacaagctggagcaggtgtctgagaagggcaaggcttacaccaactacttcggacggtgcaatgtggccgagcacgaaaagctgatcctgctggcccagctgaagcccgagaaggatagcgacgaagccgtgacatatagcctgggaaagtttgggcagagggccctggatttctacagcattcatgtgaccaaggagtccacccaccccgtgaagcccctggcccagatcgccggaaacagatacgcctccggacctgtgggaaaggccctgagcgacgcatgtatgggcacaatcgcctccttcctgtctaagtaccaggacatcatcatcgaacaccagaaggtggtgaagggcaaccagaagagactggagagcctgcgggagctggccggcaaggaaaacctggaataccctagcgtgaccctgccacctcagcctcacaccaaggagggcgttgatgcctacaacgaagtgatcgcccgggtgcgaatgtgggtgaacctgaacctgtggcagaagctgaagctaagcagagatgatgccaagcctctgctgagactgaagggattcccttcctttcctctggtcgagagacaggccaacgaagtggactggtgggacatggtgtgtaacgtgaagaagctgatcaacgagaaaaaggaggatggcaaggtgttttggcagaatctggctggctacaagagacaggaagccctgagaccatacctgagcagcgaggaagatcggaagaagggaaagaaattcgctcggtaccagctgggcgacctgctgctgcacctggaaaagaagcacggcgaggactggggaaaggtgtacgacgaggcctgggagcggattgacaagaaagtggaaggcctgagcaagcacatcaagctggaagaggaacggagaagcgaggacgcccagagcaaggccgccctgaccgactggctgcgggctaaggccagcttcgtgatcgagggcctgaaggaggccgacaaggacgagttctgcagatgcgagctgaagctgcagaagtggtacggggacctgcggggaaagcccttcgccatcgaagccgagaacagcatcctggacatcagcggcttcagcaagcagtacaactgtgccttcatctggcagaaggacggcgtgaagaagctgaacctgtacctgatcatcaactacttcaagggcggcaagctgcggttcaagaagatcaaacctgaagccttcgaagccaacagattctacaccgtgatcaacaaaaagagcggcgagatcgtgcccatggaggtgaacttcaacttcgacgaccccaacctgatcatcctgcctctggcctttggcaagagacagggcagagaattcatctggaacgacctgctgtccctggaaaccggcagcctgaagctggccaacggaagagtgatcgagaagacactgtacaacagaagaacccggcaggatgagcctgccctgttcgtggccctgaccttcgagcggcgggaggtcctggactcctccaatatcaaaccaatgaacctgatcggcgtggcaagaggcgaaaacatccccgccgtgatcgccctgaccgaccccgagggctgcccactgagccggtttaaggatagcctgggaaacccaacccacatcctgagaatcggcgagagctataaggagaagcagcggaccatccaggccaagaaggaggtggagcagcggagagccggcggctacagccggaagtacgccagcaaagccaagaatctggcagacgatatggtgagaaacaccgctagagatctgctgtactacgccgtgacccaggatgccatgctgatcttcgccaacctgagccggggcttcggccggcagggcaagcggaccttcatggccgagagacagtacacacggatggaggactggctgaccgccaagctggcctacgagggcctgagcaagacctacctgtccaagacactggcccagtacacctccaagacatgcagcaactgtgggtttaccatcaccagcgccgactacgacagggtgctggagaagctgaagaagacagcaacaggctggatgaccacaattaacggcaaggagctgaaggtggagggccagattacctactacaacagatacaagagacagaacgtagtcaaggacctgtccgtcgagctggatagactgagcgaagaatctgtgaacaacgacatctcctcctggacaaagggcagaagcggagaagctctgagcctcctgaagaaaagattctcccatagacccgtgcaggagaagttcgtgtgcctgaactgcggcttcgagacacacgcagccgagcaagccgccctgaacatcgccagatcctggctgttcctgcggagccaggagtacaagaaataccagacaaacaagacaaccggcaacaccgataagagagccttcgtcgagacctggcagtccttttaccggaagaagcttaaggaggtgtggaaacctgccgtgcggtctggcggatctggcggaggctccaccagccccaagaaaaagagaaaagtctaagctgccttctgcggggcttgccttctggccatgcccttcttctctcccttgcacctgtacctcttggtctttgaataaagcctgagtaggaaggctagcaaaaaaaaaaaaaaaaaaaaaaaaaaaaaaaaaaaaaaaaaaaaaaaaaaaaaaaaaaaaaaaaaaaaaaaaaaaaaaaagcccagccggctccccaacctctaccgaggagggcacctctgagtccgccacccccgagagcggccctggcacctccaccgagcccagcgagggcagcgcacccggcagccctgccggcagccccacctccacagaggagggaaccagcaccgagcccagcgaaggcagcgccccaggcaccagcaccgagcctagtgagcaggagattaaacggatcaacaagatcagaagaagacttgtgaaagacagcaacaccaagaaggccggcaagacaggccccatgaaaaccctgctggttagagtgatgacacccgatctgagagagcggctggaaaacctgagaaagaagcctgaaaatatcccccagcccatcagcaatacatctagagccaacctgaataagctgctgaccgattacaccgaaatgaagaaggcgatcctgcatgtgtactgggaagagttccagaaggaccctgtgggcctgatgagccgggtggcccagcctgccagcaagaagatcgatcagaacaagctgaaacctgagatggacgagaagggcaacctgaccaccgccggctttgcctgctctcagtgtggccagcccctgttcgtgtacaagctggagcaggtgtctgagaagggcaaggcttacaccaactacttcggacggtgcaatgtggccgagcacgaaaagctgatcctgctggcccagctgaagcccgagaaggatagcgacgaagccgtgacatatagcctgggaaagtttgggcagagggccctggatttctacagcattcatgtgaccaaggagtccacccaccccgtgaagcccctggcccagatcgccggaaacagatacgcctccggacctgtgggaaaggccctgagcgacgcatgtatgggcacaatcgcctccttcctgtctaagtaccaggacatcatcatcgaacaccagaaggtggtgaagggcaaccagaagagactggagagcctgcgggagctggccggcaaggaaaacctggaataccctagcgtgaccctgccacctcagcctcacaccaaggagggcgttgatgcctacaacgaagtgatcgcccgggtgcgaatgtgggtgaacctgaacctgtggcagaagctgaagctaagcagagatgatgccaagcctctgctgagactgaagggattcccttcctttcctctggtcgagagacaggccaacgaagtggactggtgggacatggtgtgtaacgtgaagaagctgatcaacgagaaaaaggaggatggcaaggtgttttggcagaatctggctggctacaagagacaggaagccctgagaccatacctgagcagcgaggaagatcggaagaagggaaagaaattcgctcggtaccagctgggcgacctgctgctgcacctggaaaagaagcacggcgaggactggggaaaggtgtacgacgaggcctgggagcggattgacaagaaagtggaaggcctgagcaagcacatcaagctggaagaggaacggagaagcgaggacgcccagagcaaggccgccctgaccgactggctgcgggctaaggccagcttcgtgatcgagggcctgaaggaggccgacaaggacgagttctgcagatgcgagctgaagctgcagaagtggtacggggacctgcggggaaagcccttcgccatcgaagccgagaacagcatcctggacatcagcggcttcagcaagcagtacaactgtgccttcatctggcagaaggacggcgtgaagaagctgaacctgtacctgatcatcaactacttcaagggcggcaagctgcggttcaagaagatcaaacctgaagccttcgaagccaacagattctacaccgtgatcaacaaaaagagcggcgagatcgtgcccatggaggtgaacttcaacttcgacgaccccaacctgatcatcctgcctctggcctttggcaagagacagggcagagaattcatctggaacgacctgctgtccctggaaaccggcagcctgaagctggccaacggaagagtgatcgagaagacactgtacaacagaagaacccggcaggatgagcctgccctgttcgtggccctgaccttcgagcggcgggaggtcctggactcctccaatatcaaaccaatgaacctgatcggcgtggcaagaggcgaaaacatccccgccgtgatcgccctgaccgaccccgagggctgcccactgagccggtttaaggatagcctgggaaacccaacccacatcctgagaatcggcgagagctataaggagaagcagcggaccatccaggccaagaaggaggtggagcagcggagagccggcggctacagccggaagtacgccagcaaagccaagaatctggcagacgatatggtgagaaacaccgctagagatctgctgtactacgccgtgacccaggatgccatgctgatcttcgccaacctgagccggggcttcggccggcagggcaagcggaccttcatggccgagagacagtacacacggatggaggactggctgaccgccaagctggcctacgagggcctgagcaagacctacctgtccaagacactggcccagtacacctccaagacatgcagcaactgtgggtttaccatcaccagcgccgactacgacagggtgctggagaagctgaagaagacagcaacaggctggatgaccacaattaacggcaaggagctgaaggtggagggccagattacctactacaacagatacaagagacagaacgtagtcaaggacctgtccgtcgagctggatagactgagcgaagaatctgtgaacaacgacatctcctcctggacaaagggcagaagcggagaagctctgagcctcctgaagaaaagattctcccatagacccgtgcaggagaagttcgtgtgcctgaactgcggcttcgagacacacgcagccgagcaagccgccctgaacatcgccagatcctggctgttcctgcggagccaggagtacaagaaataccagacaaacaagacaaccggcaacaccgataagagagccttcgtcgagacctggcagtccttttaccggaagaagcttaaggaggtgtggaaacctgccgtgcggtctggcggatctggcggaggctccaccagccccaagaaaaagagaaaagtctaagctgccttctgcggggcttgccttctggccatgcccttcttctctcccttgcacctgtacctcttggtctttgaataaagcctgagtaggaaggctagcaaaaaaaaaaaaaaaaaaaaaaaaaaaaaaaaaaaaaaaaaaaaaaaaaaaaaaaaaaaaaaaaaaaaaaaaaaaaaaaa

SEQ ID NO: 10457 - RNA, 8787 nt, synthetic construct
  source 1..8787: mol_type = other RNA
aggaaataagagagaaaagaagagtaagaagaaatataagagccaccatggcccctaagaagaagcgtaaagtgagccggatgaaccacgaccaggagttcgacccccctaaggtgtaccctcccgtccccgccgagaagagaaagcccatccgggtcctgagcctgttcgatggcatcgccaccggtctgctggtgctgaaggacctgggcatccaggtggataggtacattgcctccgaggtgtgcgaggactccatcaccgtgggaatggtgcgtcatcagggcaagatcatgtacgtgggcgacgtgcggagcgtgacacagaagcatatccaggagtggggccctttcgacctggtgatcggcggcagcccttgcaatgacctgagcatcgtgaacccagcccggaagggcctgtacgagggaaccggcagactgttcttcgagttttacagactgctgcacgacgcccggcctaaggaaggcgacgaccggcccttcttttggctgttcgagaatgtggtggccatgggagtcagcgacaagcgggatattagccggttcctggagagcaaccccgtgatgatcgatgccaaggaagtgagcgccgcccaccgggccagatacttctggggcaatctgcctggcatgaacagacccctggccagcaccgtgaacgacaagctggagctgcaggagtgcctggagcacggccggatcgccaagttcagcaaggtgagaaccatcaccacccgaagcaacagcatcaaacaaggcaaggaccagcactttcctgtgttcatgaacgagaaggaggacatcctgtggtgtaccgagatggagagagtgttcgggttcccagtccactacacagatgtcagcaacatgtctagactggccagacagagactgctgggaagaagctggtccgtccctgtgatcagacacctgttcgcccctctgaaggagtacttcgcctgcgtgagcagcggcaacagcaacgccaacagccggggccccagcttctctagcggcctggtgccactgtccctgagagggagccacatgggccccatggagatctacaaaaccgtgagcgcctggaagcggcagcctgtgcgcgtgctgagcctgtttcggaatatcgataaagtcctgaaaagcctgggattcctggagagcggctctggctccggcggtggcaccctgaagtacgtggaggatgtgacaaacgtggtcagacgggatgtggagaagtggggccccttcgatctggtgtacggcagcacccaacccctgggcagctcttgtgaccggtgccctggctggtacatgtttcagttccaccggatcctgcagtacgccctgccgagacaggagtcccagcggccattcttttggattttcatggacaacttgctgctgaccgaggatgaccaggaaactaccactcggttcctgcagaccgaagccgtgaccctgcaggacgtgagaggccgggactaccagaacgccatgcgggtgtggtccaacatccctggactgaaaagcaagcacgcacctctgacccctaaagaagaggagtacctgcaggcccaggtgcggagcagaagcaagctggacgcccctaaggtggatctgctggtgaagaattgcctcctgcccctgagagagtacttcaagtatttcagccagaatagtctgcccctgggaggcagcggcggcggcgccaggggcctgatggccttcgaggacgtggccgtgtacttcagccaggaggagtggatgttcctgaacgccgcccagagggccctgtacaggcacgtgatgctggagaacttcgccctggtggacagcatcggccccagcgtgagcaggcccagggtgatcatccagctgcagaggggcgaggagccctgggtgcccaacaggaccatcgccggccccggcaggggcacccacaggaggagcggcggcccaagcagcggcgcccctcctcccagcggcggcaggcggcccaagcagcggcgcccctcctcccagcggcggcagcccagccggctccccaacctctaccgaggagggcacctctgagtccgccacccccgagagcggccctggcacctccaccgagcccagcgagggcagcgcacccggcagccctgccggcagccccacctccacagaggagggaaccagcaccgagcccagcgaaggcagcgccccaggcaccagcaccgagcctagtgagcaggagattaaacggatcaacaagatcagaagaagacttgtgaaagacagcaacaccaagaaggccggcaagacaggccccatgaaaaccctgctggttagagtgatgacacccgatctgagagagcggctggaaaacctgagaaagaagcctgaaaatatcccccagcccatcagcaatacatctagagccaacctgaataagctgctgaccgattacaccgaaatgaagaaggcgatcctgcatgtgtactgggaagagttccagaaggaccctgtgggcctgatgagccgggtggcccagcctgccagcaagaagatcgatcagaacaagctgaaacctgagatggacgagaagggcaacctgaccaccgccggctttgcctgctctcagtgtggccagcccctgttcgtgtacaagctggagcaggtgtctgagaagggcaaggcttacaccaactacttcggacggtgcaatgtggccgagcacgaaaagctgatcctgctggcccagctgaagcccgagaaggatagcgacgaagccgtgacatatagcctgggaaagtttgggcagagggccctggatttctacagcattcatgtgaccaaggagtccacccaccccgtgaagcccctggcccagatcgccggaaacagatacgcctccggacctgtgggaaaggccctgagcgacgcatgtatgggcacaatcgcctccttcctgtctaagtaccaggacatcatcatcgaacaccagaaggtggtgaagggcaaccagaagagactggagagcctgcgggagctggccggcaaggaaaacctggaataccctagcgtgaccctgccacctcagcctcacaccaaggagggcgttgatgcctacaacgaagtgatcgcccgggtgcgaatgtgggtgaacctgaacctgtggcagaagctgaagctaagcagagatgatgccaagcctctgctgagactgaagggattcccttcctttcctctggtcgagagacaggccaacgaagtggactggtgggacatggtgtgtaacgtgaagaagctgatcaacgagaaaaaggaggatggcaaggtgttttggcagaatctggctggctacaagagacaggaagccctgagaccatacctgagcagcgaggaagatcggaagaagggaaagaaattcgctcggtaccagctgggcgacctgctgctgcacctggaaaagaagcacggcgaggactggggaaaggtgtacgacgaggcctgggagcggattgacaagaaagtggaaggcctgagcaagcacatcaagctggaagaggaacggagaagcgaggacgcccagagcaaggccgccctgaccgactggctgcgggctaaggccagcttcgtgatcgagggcctgaaggaggccgacaaggacgagttctgcagatgcgagctgaagctgcagaagtggtacggggacctgcggggaaagcccttcgccatcgaagccgagaacagcatcctggacatcagcggcttcagcaagcagtacaactgtgccttcatctggcagaaggacggcgtgaagaagctgaacctgtacctgatcatcaactacttcaagggcggcaagctgcggttcaagaagatcaaacctgaagccttcgaagccaacagattctacaccgtgatcaacaaaaagagcggcgagatcgtgcccatggaggtgaacttcaacttcgacgaccccaacctgatcatcctgcctctggcctttggcaagagacagggcagagaattcatctggaacgacctgctgtccctggaaaccggcagcctgaagctggccaacggaagagtgatcgagaagacactgtacaacagaagaacccggcaggatgagcctgccctgttcgtggccctgaccttcgagcggcgggaggtcctggactcctccaatatcaaaccaatgaacctgatcggcgtggcaagaggcgaaaacatccccgccgtgatcgccctgaccgaccccgagggctgcccactgagccggtttaaggatagcctgggaaacccaacccacatcctgagaatcggcgagagctataaggagaagcagcggaccatccaggccaagaaggaggtggagcagcggagagccggcggctacagccggaagtacgccagcaaagccaagaatctggcagacgatatggtgagaaacaccgctagagatctgctgtactacgccgtgacccaggatgccatgctgatcttcgccaacctgagccggggcttcggccggcagggcaagcggaccttcatggccgagagacagtacacacggatggaggactggctgaccgccaagctggcctacgagggcctgagcaagacctacctgtccaagacactggcccagtacacctccaagacatgcagcaactgtgggtttaccatcaccagcgccgactacgacagggtgctggagaagctgaagaagacagcaacaggctggatgaccacaattaacggcaaggagctgaaggtggagggccagattacctactacaacagatacaagagacagaacgtagtcaaggacctgtccgtcgagctggatagactgagcgaagaatctgtgaacaacgacatctcctcctggacaaagggcagaagcggagaagctctgagcctcctgaagaaaagattctcccatagacccgtgcaggagaagttcgtgtgcctgaactgcggcttcgagacacacgcagccgagcaagccgccctgaacatcgccagatcctggctgttcctgcggagccaggagtacaagaaataccagacaaacaagacaaccggcaacaccgataagagagccttcgtcgagacctggcagtccttttaccggaagaagcttaaggaggtgtggaaacctgccgtgcggtctggcggatctggcggaggctccaccagccccaagaaaaagagaaaagtctaagctgccttctgcggggcttgccttctggccatgcccttcttctctcccttgcacctgtacctcttggtctttgaataaagcctgagtaggaaggctagcaaaaaaaaaaaaaaaaaaaaaaaaaaaaaaaaaaaaaaaaaaaaaaaaaaaaaaaaaaaaaaaaaaaaaaaaaaaaaaaagcccagccggctccccaacctctaccgaggagggcacctctgagtccgccacccccgagagcggccctggcacctccaccgagcccagcgagggcagcgcacccggcagccctgccggcagccccacctccacagaggagggaaccagcaccgagcccagcgaaggcagcgccccaggcaccagcaccgagcctagtgagcaggagattaaacggatcaacaagatcagaagaagacttgtgaaagacagcaacaccaagaaggccggcaagacaggccccatgaaaaccctgctggttagagtgatgacacccgatctgagagagcggctggaaaacctgagaaagaagcctgaaaatatcccccagcccatcagcaatacatctagagccaacctgaataagctgctgaccgattacaccgaaatgaagaaggcgatcctgcatgtgtactgggaagagttccagaaggaccctgtgggcctgatgagccgggtggcccagcctgccagcaagaagatcgatcagaacaagctgaaacctgagatggacgagaagggcaacctgaccaccgccggctttgcctgctctcagtgtggccagcccctgttcgtgtacaagctggagcaggtgtctgagaagggcaaggcttacaccaactacttcggacggtgcaatgtggccgagcacgaaaagctgatcctgctggcccagctgaagcccgagaaggatagcgacgaagccgtgacatatagcctgggaaagtttgggcagagggccctggatttctacagcattcatgtgaccaaggagtccacccaccccgtgaagcccctggcccagatcgccggaaacagatacgcctccggacctgtgggaaaggccctgagcgacgcatgtatgggcacaatcgcctccttcctgtctaagtaccaggacatcatcatcgaacaccagaaggtggtgaagggcaaccagaagagactggagagcctgcgggagctggccggcaaggaaaacctggaataccctagcgtgaccctgccacctcagcctcacaccaaggagggcgttgatgcctacaacgaagtgatcgcccgggtgcgaatgtgggtgaacctgaacctgtggcagaagctgaagctaagcagagatgatgccaagcctctgctgagactgaagggattcccttcctttcctctggtcgagagacaggccaacgaagtggactggtgggacatggtgtgtaacgtgaagaagctgatcaacgagaaaaaggaggatggcaaggtgttttggcagaatctggctggctacaagagacaggaagccctgagaccatacctgagcagcgaggaagatcggaagaagggaaagaaattcgctcggtaccagctgggcgacctgctgctgcacctggaaaagaagcacggcgaggactggggaaaggtgtacgacgaggcctgggagcggattgacaagaaagtggaaggcctgagcaagcacatcaagctggaagaggaacggagaagcgaggacgcccagagcaaggccgccctgaccgactggctgcgggctaaggccagcttcgtgatcgagggcctgaaggaggccgacaaggacgagttctgcagatgcgagctgaagctgcagaagtggtacggggacctgcggggaaagcccttcgccatcgaagccgagaacagcatcctggacatcagcggcttcagcaagcagtacaactgtgccttcatctggcagaaggacggcgtgaagaagctgaacctgtacctgatcatcaactacttcaagggcggcaagctgcggttcaagaagatcaaacctgaagccttcgaagccaacagattctacaccgtgatcaacaaaaagagcggcgagatcgtgcccatggaggtgaacttcaacttcgacgaccccaacctgatcatcctgcctctggcctttggcaagagacagggcagagaattcatctggaacgacctgctgtccctggaaaccggcagcctgaagctggccaacggaagagtgatcgagaagacactgtacaacagaagaacccggcaggatgagcctgccctgttcgtggccctgaccttcgagcggcgggaggtcctggactcctccaatatcaaaccaatgaacctgatcggcgtggcaagaggcgaaaacatccccgccgtgatcgccctgaccgaccccgagggctgcccactgagccggtttaaggatagcctgggaaacccaacccacatcctgagaatcggcgagagctataaggagaagcagcggaccatccaggccaagaaggaggtggagcagcggagagccggcggctacagccggaagtacgccagcaaagccaagaatctggcagacgatatggtgagaaacaccgctagagatctgctgtactacgccgtgacccaggatgccatgctgatcttcgccaacctgagccggggcttcggccggcagggcaagcggaccttcatggccgagagacagtacacacggatggaggactggctgaccgccaagctggcctacgagggcctgagcaagacctacctgtccaagacactggcccagtacacctccaagacatgcagcaactgtgggtttaccatcaccagcgccgactacgacagggtgctggagaagctgaagaagacagcaacaggctggatgaccacaattaacggcaaggagctgaaggtggagggccagattacctactacaacagatacaagagacagaacgtagtcaaggacctgtccgtcgagctggatagactgagcgaagaatctgtgaacaacgacatctcctcctggacaaagggcagaagcggagaagctctgagcctcctgaagaaaagattctcccatagacccgtgcaggagaagttcgtgtgcctgaactgcggcttcgagacacacgcagccgagcaagccgccctgaacatcgccagatcctggctgttcctgcggagccaggagtacaagaaataccagacaaacaagacaaccggcaacaccgataagagagccttcgtcgagacctggcagtccttttaccggaagaagcttaaggaggtgtggaaacctgccgtgcggtctggcggatctggcggaggctccaccagccccaagaaaaagagaaaagtctaagctgccttctgcggggcttgccttctggccatgcccttcttctctcccttgcacctgtacctcttggtctttgaataaagcctgagtaggaaggctagcaaaaaaaaaaaaaaaaaaaaaaaaaaaaaaaaaaaaaaaaaaaaaaaaaaaaaaaaaaaaaaaaaaaaaaaaaaaaaaaa

SEQ ID NO: 10458 - RNA, 8787 nt, synthetic construct
  source 1..8787: mol_type = other RNA
aggaaataagagagaaaagaagagtaagaagaaatataagagccaccatggcccctaagaagaagcgtaaagtgagccggatgaaccacgaccaggagttcgacccccctaaggtgtaccctcccgtccccgccgagaagagaaagcccatccgggtcctgagcctgttcgatggcatcgccaccggtctgctggtgctgaaggacctgggcatccaggtggataggtacattgcctccgaggtgtgcgaggactccatcaccgtgggaatggtgcgtcatcagggcaagatcatgtacgtgggcgacgtgcggagcgtgacacagaagcatatccaggagtggggccctttcgacctggtgatcggcggcagcccttgcaatgacctgagcatcgtgaacccagcccggaagggcctgtacgagggaaccggcagactgttcttcgagttttacagactgctgcacgacgcccggcctaaggaaggcgacgaccggcccttcttttggctgttcgagaatgtggtggccatgggagtcagcgacaagcgggatattagccggttcctggagagcaaccccgtgatgatcgatgccaaggaagtgagcgccgcccaccgggccagatacttctggggcaatctgcctggcatgaacagacccctggccagcaccgtgaacgacaagctggagctgcaggagtgcctggagcacggccggatcgccaagttcagcaaggtgagaaccatcaccacccgaagcaacagcatcaaacaaggcaaggaccagcactttcctgtgttcatgaacgagaaggaggacatcctgtggtgtaccgagatggagagagtgttcgggttcccagtccactacacagatgtcagcaacatgtctagactggccagacagagactgctgggaagaagctggtccgtccctgtgatcagacacctgttcgcccctctgaaggagtacttcgcctgcgtgagcagcggcaacagcaacgccaacagccggggccccagcttctctagcggcctggtgccactgtccctgagagggagccacatgggccccatggagatctacaaaaccgtgagcgcctggaagcggcagcctgtgcgcgtgctgagcctgtttcggaatatcgataaagtcctgaaaagcctgggattcctggagagcggctctggctccggcggtggcaccctgaagtacgtggaggatgtgacaaacgtggtcagacgggatgtggagaagtggggccccttcgatctggtgtacggcagcacccaacccctgggcagctcttgtgaccggtgccctggctggtacatgtttcagttccaccggatcctgcagtacgccctgccgagacaggagtcccagcggccattcttttggattttcatggacaacttgctgctgaccgaggatgaccaggaaactaccactcggttcctgcagaccgaagccgtgaccctgcaggacgtgagaggccgggactaccagaacgccatgcgggtgtggtccaacatccctggactgaaaagcaagcacgcacctctgacccctaaagaagaggagtacctgcaggcccaggtgcggagcagaagcaagctggacgcccctaaggtggatctgctggtgaagaattgcctcctgcccctgagagagtacttcaagtatttcagccagaatagtctgcccctgggaggcagcggcggcggcgcccaggagagcatgaccttcagggacgtggccgtgttcttcagccaggacgagtggctgcacctggacagcgcccagagggccctgtacagggaggtgatgctggagaactacagcaccctggtgagcctgggcatccccttcagcatgcccaaggtgatccaccagctgcagcagggccaggacccctgcaccgtggagggcgacgtgcccagcaacacctgcctgggcttcaagacctggggcggcccaagcagcggcgcccctcctcccagcggcggcaggcggcccaagcagcggcgcccctcctcccagcggcggcagcccagccggctccccaacctctaccgaggagggcacctctgagtccgccacccccgagagcggccctggcacctccaccgagcccagcgagggcagcgcacccggcagccctgccggcagccccacctccacagaggagggaaccagcaccgagcccagcgaaggcagcgccccaggcaccagcaccgagcctagtgagcaggagattaaacggatcaacaagatcagaagaagacttgtgaaagacagcaacaccaagaaggccggcaagacaggccccatgaaaaccctgctggttagagtgatgacacccgatctgagagagcggctggaaaacctgagaaagaagcctgaaaatatcccccagcccatcagcaatacatctagagccaacctgaataagctgctgaccgattacaccgaaatgaagaaggcgatcctgcatgtgtactgggaagagttccagaaggaccctgtgggcctgatgagccgggtggcccagcctgccagcaagaagatcgatcagaacaagctgaaacctgagatggacgagaagggcaacctgaccaccgccggctttgcctgctctcagtgtggccagcccctgttcgtgtacaagctggagcaggtgtctgagaagggcaaggcttacaccaactacttcggacggtgcaatgtggccgagcacgaaaagctgatcctgctggcccagctgaagcccgagaaggatagcgacgaagccgtgacatatagcctgggaaagtttgggcagagggccctggatttctacagcattcatgtgaccaaggagtccacccaccccgtgaagcccctggcccagatcgccggaaacagatacgcctccggacctgtgggaaaggccctgagcgacgcatgtatgggcacaatcgcctccttcctgtctaagtaccaggacatcatcatcgaacaccagaaggtggtgaagggcaaccagaagagactggagagcctgcgggagctggccggcaaggaaaacctggaataccctagcgtgaccctgccacctcagcctcacaccaaggagggcgttgatgcctacaacgaagtgatcgcccgggtgcgaatgtgggtgaacctgaacctgtggcagaagctgaagctaagcagagatgatgccaagcctctgctgagactgaagggattcccttcctttcctctggtcgagagacaggccaacgaagtggactggtgggacatggtgtgtaacgtgaagaagctgatcaacgagaaaaaggaggatggcaaggtgttttggcagaatctggctggctacaagagacaggaagccctgagaccatacctgagcagcgaggaagatcggaagaagggaaagaaattcgctcggtaccagctgggcgacctgctgctgcacctggaaaagaagcacggcgaggactggggaaaggtgtacgacgaggcctgggagcggattgacaagaaagtggaaggcctgagcaagcacatcaagctggaagaggaacggagaagcgaggacgcccagagcaaggccgccctgaccgactggctgcgggctaaggccagcttcgtgatcgagggcctgaaggaggccgacaaggacgagttctgcagatgcgagctgaagctgcagaagtggtacggggacctgcggggaaagcccttcgccatcgaagccgagaacagcatcctggacatcagcggcttcagcaagcagtacaactgtgccttcatctggcagaaggacggcgtgaagaagctgaacctgtacctgatcatcaactacttcaagggcggcaagctgcggttcaagaagatcaaacctgaagccttcgaagccaacagattctacaccgtgatcaacaaaaagagcggcgagatcgtgcccatggaggtgaacttcaacttcgacgaccccaacctgatcatcctgcctctggcctttggcaagagacagggcagagaattcatctggaacgacctgctgtccctggaaaccggcagcctgaagctggccaacggaagagtgatcgagaagacactgtacaacagaagaacccggcaggatgagcctgccctgttcgtggccctgaccttcgagcggcgggaggtcctggactcctccaatatcaaaccaatgaacctgatcggcgtggcaagaggcgaaaacatccccgccgtgatcgccctgaccgaccccgagggctgcccactgagccggtttaaggatagcctgggaaacccaacccacatcctgagaatcggcgagagctataaggagaagcagcggaccatccaggccaagaaggaggtggagcagcggagagccggcggctacagccggaagtacgccagcaaagccaagaatctggcagacgatatggtgagaaacaccgctagagatctgctgtactacgccgtgacccaggatgccatgctgatcttcgccaacctgagccggggcttcggccggcagggcaagcggaccttcatggccgagagacagtacacacggatggaggactggctgaccgccaagctggcctacgagggcctgagcaagacctacctgtccaagacactggcccagtacacctccaagacatgcagcaactgtgggtttaccatcaccagcgccgactacgacagggtgctggagaagctgaagaagacagcaacaggctggatgaccacaattaacggcaaggagctgaaggtggagggccagattacctactacaacagatacaagagacagaacgtagtcaaggacctgtccgtcgagctggatagactgagcgaagaatctgtgaacaacgacatctcctcctggacaaagggcagaagcggagaagctctgagcctcctgaagaaaagattctcccatagacccgtgcaggagaagttcgtgtgcctgaactgcggcttcgagacacacgcagccgagcaagccgccctgaacatcgccagatcctggctgttcctgcggagccaggagtacaagaaataccagacaaacaagacaaccggcaacaccgataagagagccttcgtcgagacctggcagtccttttaccggaagaagcttaaggaggtgtggaaacctgccgtgcggtctggcggatctggcggaggctccaccagccccaagaaaaagagaaaagtctaagctgccttctgcggggcttgccttctggccatgcccttcttctctcccttgcacctgtacctcttggtctttgaataaagcctgagtaggaaggctagcaaaaaaaaaaaaaaaaaaaaaaaaaaaaaaaaaaaaaaaaaaaaaaaaaaaaaaaaaaaaaaaaaaaaaaaaaaaaaaaagcccagccggctccccaacctctaccgaggagggcacctctgagtccgccacccccgagagcggccctggcacctccaccgagcccagcgagggcagcgcacccggcagccctgccggcagccccacctccacagaggagggaaccagcaccgagcccagcgaaggcagcgccccaggcaccagcaccgagcctagtgagcaggagattaaacggatcaacaagatcagaagaagacttgtgaaagacagcaacaccaagaaggccggcaagacaggccccatgaaaaccctgctggttagagtgatgacacccgatctgagagagcggctggaaaacctgagaaagaagcctgaaaatatcccccagcccatcagcaatacatctagagccaacctgaataagctgctgaccgattacaccgaaatgaagaaggcgatcctgcatgtgtactgggaagagttccagaaggaccctgtgggcctgatgagccgggtggcccagcctgccagcaagaagatcgatcagaacaagctgaaacctgagatggacgagaagggcaacctgaccaccgccggctttgcctgctctcagtgtggccagcccctgttcgtgtacaagctggagcaggtgtctgagaagggcaaggcttacaccaactacttcggacggtgcaatgtggccgagcacgaaaagctgatcctgctggcccagctgaagcccgagaaggatagcgacgaagccgtgacatatagcctgggaaagtttgggcagagggccctggatttctacagcattcatgtgaccaaggagtccacccaccccgtgaagcccctggcccagatcgccggaaacagatacgcctccggacctgtgggaaaggccctgagcgacgcatgtatgggcacaatcgcctccttcctgtctaagtaccaggacatcatcatcgaacaccagaaggtggtgaagggcaaccagaagagactggagagcctgcgggagctggccggcaaggaaaacctggaataccctagcgtgaccctgccacctcagcctcacaccaaggagggcgttgatgcctacaacgaagtgatcgcccgggtgcgaatgtgggtgaacctgaacctgtggcagaagctgaagctaagcagagatgatgccaagcctctgctgagactgaagggattcccttcctttcctctggtcgagagacaggccaacgaagtggactggtgggacatggtgtgtaacgtgaagaagctgatcaacgagaaaaaggaggatggcaaggtgttttggcagaatctggctggctacaagagacaggaagccctgagaccatacctgagcagcgaggaagatcggaagaagggaaagaaattcgctcggtaccagctgggcgacctgctgctgcacctggaaaagaagcacggcgaggactggggaaaggtgtacgacgaggcctgggagcggattgacaagaaagtggaaggcctgagcaagcacatcaagctggaagaggaacggagaagcgaggacgcccagagcaaggccgccctgaccgactggctgcgggctaaggccagcttcgtgatcgagggcctgaaggaggccgacaaggacgagttctgcagatgcgagctgaagctgcagaagtggtacggggacctgcggggaaagcccttcgccatcgaagccgagaacagcatcctggacatcagcggcttcagcaagcagtacaactgtgccttcatctggcagaaggacggcgtgaagaagctgaacctgtacctgatcatcaactacttcaagggcggcaagctgcggttcaagaagatcaaacctgaagccttcgaagccaacagattctacaccgtgatcaacaaaaagagcggcgagatcgtgcccatggaggtgaacttcaacttcgacgaccccaacctgatcatcctgcctctggcctttggcaagagacagggcagagaattcatctggaacgacctgctgtccctggaaaccggcagcctgaagctggccaacggaagagtgatcgagaagacactgtacaacagaagaacccggcaggatgagcctgccctgttcgtggccctgaccttcgagcggcgggaggtcctggactcctccaatatcaaaccaatgaacctgatcggcgtggcaagaggcgaaaacatccccgccgtgatcgccctgaccgaccccgagggctgcccactgagccggtttaaggatagcctgggaaacccaacccacatcctgagaatcggcgagagctataaggagaagcagcggaccatccaggccaagaaggaggtggagcagcggagagccggcggctacagccggaagtacgccagcaaagccaagaatctggcagacgatatggtgagaaacaccgctagagatctgctgtactacgccgtgacccaggatgccatgctgatcttcgccaacctgagccggggcttcggccggcagggcaagcggaccttcatggccgagagacagtacacacggatggaggactggctgaccgccaagctggcctacgagggcctgagcaagacctacctgtccaagacactggcccagtacacctccaagacatgcagcaactgtgggtttaccatcaccagcgccgactacgacagggtgctggagaagctgaagaagacagcaacaggctggatgaccacaattaacggcaaggagctgaaggtggagggccagattacctactacaacagatacaagagacagaacgtagtcaaggacctgtccgtcgagctggatagactgagcgaagaatctgtgaacaacgacatctcctcctggacaaagggcagaagcggagaagctctgagcctcctgaagaaaagattctcccatagacccgtgcaggagaagttcgtgtgcctgaactgcggcttcgagacacacgcagccgagcaagccgccctgaacatcgccagatcctggctgttcctgcggagccaggagtacaagaaataccagacaaacaagacaaccggcaacaccgataagagagccttcgtcgagacctggcagtccttttaccggaagaagcttaaggaggtgtggaaacctgccgtgcggtctggcggatctggcggaggctccaccagccccaagaaaaagagaaaagtctaagctgccttctgcggggcttgccttctggccatgcccttcttctctcccttgcacctgtacctcttggtctttgaataaagcctgagtaggaaggctagcaaaaaaaaaaaaaaaaaaaaaaaaaaaaaaaaaaaaaaaaaaaaaaaaaaaaaaaaaaaaaaaaaaaaaaaaaaaaaaaa

SEQ ID NO: 10459 - RNA, 8787 nt, synthetic construct
  source 1..8787: mol_type = other RNA
aggaaataagagagaaaagaagagtaagaagaaatataagagccaccatggcccctaagaagaagcgtaaagtgagccggatgaaccacgaccaggagttcgacccccctaaggtgtaccctcccgtccccgccgagaagagaaagcccatccgggtcctgagcctgttcgatggcatcgccaccggtctgctggtgctgaaggacctgggcatccaggtggataggtacattgcctccgaggtgtgcgaggactccatcaccgtgggaatggtgcgtcatcagggcaagatcatgtacgtgggcgacgtgcggagcgtgacacagaagcatatccaggagtggggccctttcgacctggtgatcggcggcagcccttgcaatgacctgagcatcgtgaacccagcccggaagggcctgtacgagggaaccggcagactgttcttcgagttttacagactgctgcacgacgcccggcctaaggaaggcgacgaccggcccttcttttggctgttcgagaatgtggtggccatgggagtcagcgacaagcgggatattagccggttcctggagagcaaccccgtgatgatcgatgccaaggaagtgagcgccgcccaccgggccagatacttctggggcaatctgcctggcatgaacagacccctggccagcaccgtgaacgacaagctggagctgcaggagtgcctggagcacggccggatcgccaagttcagcaaggtgagaaccatcaccacccgaagcaacagcatcaaacaaggcaaggaccagcactttcctgtgttcatgaacgagaaggaggacatcctgtggtgtaccgagatggagagagtgttcgggttcccagtccactacacagatgtcagcaacatgtctagactggccagacagagactgctgggaagaagctggtccgtccctgtgatcagacacctgttcgcccctctgaaggagtacttcgcctgcgtgagcagcggcaacagcaacgccaacagccggggccccagcttctctagcggcctggtgccactgtccctgagagggagccacatgggccccatggagatctacaaaaccgtgagcgcctggaagcggcagcctgtgcgcgtgctgagcctgtttcggaatatcgataaagtcctgaaaagcctgggattcctggagagcggctctggctccggcggtggcaccctgaagtacgtggaggatgtgacaaacgtggtcagacgggatgtggagaagtggggccccttcgatctggtgtacggcagcacccaacccctgggcagctcttgtgaccggtgccctggctggtacatgtttcagttccaccggatcctgcagtacgccctgccgagacaggagtcccagcggccattcttttggattttcatggacaacttgctgctgaccgaggatgaccaggaaactaccactcggttcctgcagaccgaagccgtgaccctgcaggacgtgagaggccgggactaccagaacgccatgcgggtgtggtccaacatccctggactgaaaagcaagcacgcacctctgacccctaaagaagaggagtacctgcaggcccaggtgcggagcagaagcaagctggacgcccctaaggtggatctgctggtgaagaattgcctcctgcccctgagagagtacttcaagtatttcagccagaatagtctgcccctgggaggcagcggcggcggcccccagggctgcgccatcagcgaggacgtgttcgtgtacttcagcagggaggagtgggtgctgctggacgaggaccagaggctgctgtacagggacgtgatgctggagaacttcgccctgctggccagcctgggcatcaccagcagcaggagctacctggtgacccagctggagcagggcgaggagccctggatgcccgcccaggtggacatgaccgccgccaccgagaaggaggcccagaagggcggcccaagcagcggcgcccctcctcccagcggcggcaggcggcccaagcagcggcgcccctcctcccagcggcggcagcccagccggctccccaacctctaccgaggagggcacctctgagtccgccacccccgagagcggccctggcacctccaccgagcccagcgagggcagcgcacccggcagccctgccggcagccccacctccacagaggagggaaccagcaccgagcccagcgaaggcagcgccccaggcaccagcaccgagcctagtgagcaggagattaaacggatcaacaagatcagaagaagacttgtgaaagacagcaacaccaagaaggccggcaagacaggccccatgaaaaccctgctggttagagtgatgacacccgatctgagagagcggctggaaaacctgagaaagaagcctgaaaatatcccccagcccatcagcaatacatctagagccaacctgaataagctgctgaccgattacaccgaaatgaagaaggcgatcctgcatgtgtactgggaagagttccagaaggaccctgtgggcctgatgagccgggtggcccagcctgccagcaagaagatcgatcagaacaagctgaaacctgagatggacgagaagggcaacctgaccaccgccggctttgcctgctctcagtgtggccagcccctgttcgtgtacaagctggagcaggtgtctgagaagggcaaggcttacaccaactacttcggacggtgcaatgtggccgagcacgaaaagctgatcctgctggcccagctgaagcccgagaaggatagcgacgaagccgtgacatatagcctgggaaagtttgggcagagggccctggatttctacagcattcatgtgaccaaggagtccacccaccccgtgaagcccctggcccagatcgccggaaacagatacgcctccggacctgtgggaaaggccctgagcgacgcatgtatgggcacaatcgcctccttcctgtctaagtaccaggacatcatcatcgaacaccagaaggtggtgaagggcaaccagaagagactggagagcctgcgggagctggccggcaaggaaaacctggaataccctagcgtgaccctgccacctcagcctcacaccaaggagggcgttgatgcctacaacgaagtgatcgcccgggtgcgaatgtgggtgaacctgaacctgtggcagaagctgaagctaagcagagatgatgccaagcctctgctgagactgaagggattcccttcctttcctctggtcgagagacaggccaacgaagtggactggtgggacatggtgtgtaacgtgaagaagctgatcaacgagaaaaaggaggatggcaaggtgttttggcagaatctggctggctacaagagacaggaagccctgagaccatacctgagcagcgaggaagatcggaagaagggaaagaaattcgctcggtaccagctgggcgacctgctgctgcacctggaaaagaagcacggcgaggactggggaaaggtgtacgacgaggcctgggagcggattgacaagaaagtggaaggcctgagcaagcacatcaagctggaagaggaacggagaagcgaggacgcccagagcaaggccgccctgaccgactggctgcgggctaaggccagcttcgtgatcgagggcctgaaggaggccgacaaggacgagttctgcagatgcgagctgaagctgcagaagtggtacggggacctgcggggaaagcccttcgccatcgaagccgagaacagcatcctggacatcagcggcttcagcaagcagtacaactgtgccttcatctggcagaaggacggcgtgaagaagctgaacctgtacctgatcatcaactacttcaagggcggcaagctgcggttcaagaagatcaaacctgaagccttcgaagccaacagattctacaccgtgatcaacaaaaagagcggcgagatcgtgcccatggaggtgaacttcaacttcgacgaccccaacctgatcatcctgcctctggcctttggcaagagacagggcagagaattcatctggaacgacctgctgtccctggaaaccggcagcctgaagctggccaacggaagagtgatcgagaagacactgtacaacagaagaacccggcaggatgagcctgccctgttcgtggccctgaccttcgagcggcgggaggtcctggactcctccaatatcaaaccaatgaacctgatcggcgtggcaagaggcgaaaacatccccgccgtgatcgccctgaccgaccccgagggctgcccactgagccggtttaaggatagcctgggaaacccaacccacatcctgagaatcggcgagagctataaggagaagcagcggaccatccaggccaagaaggaggtggagcagcggagagccggcggctacagccggaagtacgccagcaaagccaagaatctggcagacgatatggtgagaaacaccgctagagatctgctgtactacgccgtgacccaggatgccatgctgatcttcgccaacctgagccggggcttcggccggcagggcaagcggaccttcatggccgagagacagtacacacggatggaggactggctgaccgccaagctggcctacgagggcctgagcaagacctacctgtccaagacactggcccagtacacctccaagacatgcagcaactgtgggtttaccatcaccagcgccgactacgacagggtgctggagaagctgaagaagacagcaacaggctggatgaccacaattaacggcaaggagctgaaggtggagggccagattacctactacaacagatacaagagacagaacgtagtcaaggacctgtccgtcgagctggatagactgagcgaagaatctgtgaacaacgacatctcctcctggacaaagggcagaagcggagaagctctgagcctcctgaagaaaagattctcccatagacccgtgcaggagaagttcgtgtgcctgaactgcggcttcgagacacacgcagccgagcaagccgccctgaacatcgccagatcctggctgttcctgcggagccaggagtacaagaaataccagacaaacaagacaaccggcaacaccgataagagagccttcgtcgagacctggcagtccttttaccggaagaagcttaaggaggtgtggaaacctgccgtgcggtctggcggatctggcggaggctccaccagccccaagaaaaagagaaaagtctaagctgccttctgcggggcttgccttctggccatgcccttcttctctcccttgcacctgtacctcttggtctttgaataaagcctgagtaggaaggctagcaaaaaaaaaaaaaaaaaaaaaaaaaaaaaaaaaaaaaaaaaaaaaaaaaaaaaaaaaaaaaaaaaaaaaaaaaaaaaaaagcccagccggctccccaacctctaccgaggagggcacctctgagtccgccacccccgagagcggccctggcacctccaccgagcccagcgagggcagcgcacccggcagccctgccggcagccccacctccacagaggagggaaccagcaccgagcccagcgaaggcagcgccccaggcaccagcaccgagcctagtgagcaggagattaaacggatcaacaagatcagaagaagacttgtgaaagacagcaacaccaagaaggccggcaagacaggccccatgaaaaccctgctggttagagtgatgacacccgatctgagagagcggctggaaaacctgagaaagaagcctgaaaatatcccccagcccatcagcaatacatctagagccaacctgaataagctgctgaccgattacaccgaaatgaagaaggcgatcctgcatgtgtactgggaagagttccagaaggaccctgtgggcctgatgagccgggtggcccagcctgccagcaagaagatcgatcagaacaagctgaaacctgagatggacgagaagggcaacctgaccaccgccggctttgcctgctctcagtgtggccagcccctgttcgtgtacaagctggagcaggtgtctgagaagggcaaggcttacaccaactacttcggacggtgcaatgtggccgagcacgaaaagctgatcctgctggcccagctgaagcccgagaaggatagcgacgaagccgtgacatatagcctgggaaagtttgggcagagggccctggatttctacagcattcatgtgaccaaggagtccacccaccccgtgaagcccctggcccagatcgccggaaacagatacgcctccggacctgtgggaaaggccctgagcgacgcatgtatgggcacaatcgcctccttcctgtctaagtaccaggacatcatcatcgaacaccagaaggtggtgaagggcaaccagaagagactggagagcctgcgggagctggccggcaaggaaaacctggaataccctagcgtgaccctgccacctcagcctcacaccaaggagggcgttgatgcctacaacgaagtgatcgcccgggtgcgaatgtgggtgaacctgaacctgtggcagaagctgaagctaagcagagatgatgccaagcctctgctgagactgaagggattcccttcctttcctctggtcgagagacaggccaacgaagtggactggtgggacatggtgtgtaacgtgaagaagctgatcaacgagaaaaaggaggatggcaaggtgttttggcagaatctggctggctacaagagacaggaagccctgagaccatacctgagcagcgaggaagatcggaagaagggaaagaaattcgctcggtaccagctgggcgacctgctgctgcacctggaaaagaagcacggcgaggactggggaaaggtgtacgacgaggcctgggagcggattgacaagaaagtggaaggcctgagcaagcacatcaagctggaagaggaacggagaagcgaggacgcccagagcaaggccgccctgaccgactggctgcgggctaaggccagcttcgtgatcgagggcctgaaggaggccgacaaggacgagttctgcagatgcgagctgaagctgcagaagtggtacggggacctgcggggaaagcccttcgccatcgaagccgagaacagcatcctggacatcagcggcttcagcaagcagtacaactgtgccttcatctggcagaaggacggcgtgaagaagctgaacctgtacctgatcatcaactacttcaagggcggcaagctgcggttcaagaagatcaaacctgaagccttcgaagccaacagattctacaccgtgatcaacaaaaagagcggcgagatcgtgcccatggaggtgaacttcaacttcgacgaccccaacctgatcatcctgcctctggcctttggcaagagacagggcagagaattcatctggaacgacctgctgtccctggaaaccggcagcctgaagctggccaacggaagagtgatcgagaagacactgtacaacagaagaacccggcaggatgagcctgccctgttcgtggccctgaccttcgagcggcgggaggtcctggactcctccaatatcaaaccaatgaacctgatcggcgtggcaagaggcgaaaacatccccgccgtgatcgccctgaccgaccccgagggctgcccactgagccggtttaaggatagcctgggaaacccaacccacatcctgagaatcggcgagagctataaggagaagcagcggaccatccaggccaagaaggaggtggagcagcggagagccggcggctacagccggaagtacgccagcaaagccaagaatctggcagacgatatggtgagaaacaccgctagagatctgctgtactacgccgtgacccaggatgccatgctgatcttcgccaacctgagccggggcttcggccggcagggcaagcggaccttcatggccgagagacagtacacacggatggaggactggctgaccgccaagctggcctacgagggcctgagcaagacctacctgtccaagacactggcccagtacacctccaagacatgcagcaactgtgggtttaccatcaccagcgccgactacgacagggtgctggagaagctgaagaagacagcaacaggctggatgaccacaattaacggcaaggagctgaaggtggagggccagattacctactacaacagatacaagagacagaacgtagtcaaggacctgtccgtcgagctggatagactgagcgaagaatctgtgaacaacgacatctcctcctggacaaagggcagaagcggagaagctctgagcctcctgaagaaaagattctcccatagacccgtgcaggagaagttcgtgtgcctgaactgcggcttcgagacacacgcagccgagcaagccgccctgaacatcgccagatcctggctgttcctgcggagccaggagtacaagaaataccagacaaacaagacaaccggcaacaccgataagagagccttcgtcgagacctggcagtccttttaccggaagaagcttaaggaggtgtggaaacctgccgtgcggtctggcggatctggcggaggctccaccagccccaagaaaaagagaaaagtctaagctgccttctgcggggcttgccttctggccatgcccttcttctctcccttgcacctgtacctcttggtctttgaataaagcctgagtaggaaggctagcaaaaaaaaaaaaaaaaaaaaaaaaaaaaaaaaaaaaaaaaaaaaaaaaaaaaaaaaaaaaaaaaaaaaaaaaaaaaaaaa

SEQ ID NO: 10460 - RNA, 8787 nt, synthetic construct
  source 1..8787: mol_type = other RNA
aggaaataagagagaaaagaagagtaagaagaaatataagagccaccatggcccctaagaagaagcgtaaagtgagccggatgaaccacgaccaggagttcgacccccctaaggtgtaccctcccgtccccgccgagaagagaaagcccatccgggtcctgagcctgttcgatggcatcgccaccggtctgctggtgctgaaggacctgggcatccaggtggataggtacattgcctccgaggtgtgcgaggactccatcaccgtgggaatggtgcgtcatcagggcaagatcatgtacgtgggcgacgtgcggagcgtgacacagaagcatatccaggagtggggccctttcgacctggtgatcggcggcagcccttgcaatgacctgagcatcgtgaacccagcccggaagggcctgtacgagggaaccggcagactgttcttcgagttttacagactgctgcacgacgcccggcctaaggaaggcgacgaccggcccttcttttggctgttcgagaatgtggtggccatgggagtcagcgacaagcgggatattagccggttcctggagagcaaccccgtgatgatcgatgccaaggaagtgagcgccgcccaccgggccagatacttctggggcaatctgcctggcatgaacagacccctggccagcaccgtgaacgacaagctggagctgcaggagtgcctggagcacggccggatcgccaagttcagcaaggtgagaaccatcaccacccgaagcaacagcatcaaacaaggcaaggaccagcactttcctgtgttcatgaacgagaaggaggacatcctgtggtgtaccgagatggagagagtgttcgggttcccagtccactacacagatgtcagcaacatgtctagactggccagacagagactgctgggaagaagctggtccgtccctgtgatcagacacctgttcgcccctctgaaggagtacttcgcctgcgtgagcagcggcaacagcaacgccaacagccggggccccagcttctctagcggcctggtgccactgtccctgagagggagccacatgggccccatggagatctacaaaaccgtgagcgcctggaagcggcagcctgtgcgcgtgctgagcctgtttcggaatatcgataaagtcctgaaaagcctgggattcctggagagcggctctggctccggcggtggcaccctgaagtacgtggaggatgtgacaaacgtggtcagacgggatgtggagaagtggggccccttcgatctggtgtacggcagcacccaacccctgggcagctcttgtgaccggtgccctggctggtacatgtttcagttccaccggatcctgcagtacgccctgccgagacaggagtcccagcggccattcttttggattttcatggacaacttgctgctgaccgaggatgaccaggaaactaccactcggttcctgcagaccgaagccgtgaccctgcaggacgtgagaggccgggactaccagaacgccatgcgggtgtggtccaacatccctggactgaaaagcaagcacgcacctctgacccctaaagaagaggagtacctgcaggcccaggtgcggagcagaagcaagctggacgcccctaaggtggatctgctggtgaagaattgcctcctgcccctgagagagtacttcaagtatttcagccagaatagtctgcccctgggaggcagcggcggcggcgtgcacggcagcgtgaccttcagggacgtggccatcgacttcagccaggaggagtgggagtgcctgcagcccgaccagaggaccctgtacagggacgtgatgctggagaactacagccacctgatcagcctgggcagcagcatcagcaagcccgacgtgatcaccctgctggagcaggagcaggagccctggatggtggtgaggaaggagaccaacaggtggtaccccgacctggagagcaagggcggcccaagcagcggcgcccctcctcccagcggcggcaggcggcccaagcagcggcgcccctcctcccagcggcggcagcccagccggctccccaacctctaccgaggagggcacctctgagtccgccacccccgagagcggccctggcacctccaccgagcccagcgagggcagcgcacccggcagccctgccggcagccccacctccacagaggagggaaccagcaccgagcccagcgaaggcagcgccccaggcaccagcaccgagcctagtgagcaggagattaaacggatcaacaagatcagaagaagacttgtgaaagacagcaacaccaagaaggccggcaagacaggccccatgaaaaccctgctggttagagtgatgacacccgatctgagagagcggctggaaaacctgagaaagaagcctgaaaatatcccccagcccatcagcaatacatctagagccaacctgaataagctgctgaccgattacaccgaaatgaagaaggcgatcctgcatgtgtactgggaagagttccagaaggaccctgtgggcctgatgagccgggtggcccagcctgccagcaagaagatcgatcagaacaagctgaaacctgagatggacgagaagggcaacctgaccaccgccggctttgcctgctctcagtgtggccagcccctgttcgtgtacaagctggagcaggtgtctgagaagggcaaggcttacaccaactacttcggacggtgcaatgtggccgagcacgaaaagctgatcctgctggcccagctgaagcccgagaaggatagcgacgaagccgtgacatatagcctgggaaagtttgggcagagggccctggatttctacagcattcatgtgaccaaggagtccacccaccccgtgaagcccctggcccagatcgccggaaacagatacgcctccggacctgtgggaaaggccctgagcgacgcatgtatgggcacaatcgcctccttcctgtctaagtaccaggacatcatcatcgaacaccagaaggtggtgaagggcaaccagaagagactggagagcctgcgggagctggccggcaaggaaaacctggaataccctagcgtgaccctgccacctcagcctcacaccaaggagggcgttgatgcctacaacgaagtgatcgcccgggtgcgaatgtgggtgaacctgaacctgtggcagaagctgaagctaagcagagatgatgccaagcctctgctgagactgaagggattcccttcctttcctctggtcgagagacaggccaacgaagtggactggtgggacatggtgtgtaacgtgaagaagctgatcaacgagaaaaaggaggatggcaaggtgttttggcagaatctggctggctacaagagacaggaagccctgagaccatacctgagcagcgaggaagatcggaagaagggaaagaaattcgctcggtaccagctgggcgacctgctgctgcacctggaaaagaagcacggcgaggactggggaaaggtgtacgacgaggcctgggagcggattgacaagaaagtggaaggcctgagcaagcacatcaagctggaagaggaacggagaagcgaggacgcccagagcaaggccgccctgaccgactggctgcgggctaaggccagcttcgtgatcgagggcctgaaggaggccgacaaggacgagttctgcagatgcgagctgaagctgcagaagtggtacggggacctgcggggaaagcccttcgccatcgaagccgagaacagcatcctggacatcagcggcttcagcaagcagtacaactgtgccttcatctggcagaaggacggcgtgaagaagctgaacctgtacctgatcatcaactacttcaagggcggcaagctgcggttcaagaagatcaaacctgaagccttcgaagccaacagattctacaccgtgatcaacaaaaagagcggcgagatcgtgcccatggaggtgaacttcaacttcgacgaccccaacctgatcatcctgcctctggcctttggcaagagacagggcagagaattcatctggaacgacctgctgtccctggaaaccggcagcctgaagctggccaacggaagagtgatcgagaagacactgtacaacagaagaacccggcaggatgagcctgccctgttcgtggccctgaccttcgagcggcgggaggtcctggactcctccaatatcaaaccaatgaacctgatcggcgtggcaagaggcgaaaacatccccgccgtgatcgccctgaccgaccccgagggctgcccactgagccggtttaaggatagcctgggaaacccaacccacatcctgagaatcggcgagagctataaggagaagcagcggaccatccaggccaagaaggaggtggagcagcggagagccggcggctacagccggaagtacgccagcaaagccaagaatctggcagacgatatggtgagaaacaccgctagagatctgctgtactacgccgtgacccaggatgccatgctgatcttcgccaacctgagccggggcttcggccggcagggcaagcggaccttcatggccgagagacagtacacacggatggaggactggctgaccgccaagctggcctacgagggcctgagcaagacctacctgtccaagacactggcccagtacacctccaagacatgcagcaactgtgggtttaccatcaccagcgccgactacgacagggtgctggagaagctgaagaagacagcaacaggctggatgaccacaattaacggcaaggagctgaaggtggagggccagattacctactacaacagatacaagagacagaacgtagtcaaggacctgtccgtcgagctggatagactgagcgaagaatctgtgaacaacgacatctcctcctggacaaagggcagaagcggagaagctctgagcctcctgaagaaaagattctcccatagacccgtgcaggagaagttcgtgtgcctgaactgcggcttcgagacacacgcagccgagcaagccgccctgaacatcgccagatcctggctgttcctgcggagccaggagtacaagaaataccagacaaacaagacaaccggcaacaccgataagagagccttcgtcgagacctggcagtccttttaccggaagaagcttaaggaggtgtggaaacctgccgtgcggtctggcggatctggcggaggctccaccagccccaagaaaaagagaaaagtctaagctgccttctgcggggcttgccttctggccatgcccttcttctctcccttgcacctgtacctcttggtctttgaataaagcctgagtaggaaggctagcaaaaaaaaaaaaaaaaaaaaaaaaaaaaaaaaaaaaaaaaaaaaaaaaaaaaaaaaaaaaaaaaaaaaaaaaaaaaaaaagcccagccggctccccaacctctaccgaggagggcacctctgagtccgccacccccgagagcggccctggcacctccaccgagcccagcgagggcagcgcacccggcagccctgccggcagccccacctccacagaggagggaaccagcaccgagcccagcgaaggcagcgccccaggcaccagcaccgagcctagtgagcaggagattaaacggatcaacaagatcagaagaagacttgtgaaagacagcaacaccaagaaggccggcaagacaggccccatgaaaaccctgctggttagagtgatgacacccgatctgagagagcggctggaaaacctgagaaagaagcctgaaaatatcccccagcccatcagcaatacatctagagccaacctgaataagctgctgaccgattacaccgaaatgaagaaggcgatcctgcatgtgtactgggaagagttccagaaggaccctgtgggcctgatgagccgggtggcccagcctgccagcaagaagatcgatcagaacaagctgaaacctgagatggacgagaagggcaacctgaccaccgccggctttgcctgctctcagtgtggccagcccctgttcgtgtacaagctggagcaggtgtctgagaagggcaaggcttacaccaactacttcggacggtgcaatgtggccgagcacgaaaagctgatcctgctggcccagctgaagcccgagaaggatagcgacgaagccgtgacatatagcctgggaaagtttgggcagagggccctggatttctacagcattcatgtgaccaaggagtccacccaccccgtgaagcccctggcccagatcgccggaaacagatacgcctccggacctgtgggaaaggccctgagcgacgcatgtatgggcacaatcgcctccttcctgtctaagtaccaggacatcatcatcgaacaccagaaggtggtgaagggcaaccagaagagactggagagcctgcgggagctggccggcaaggaaaacctggaataccctagcgtgaccctgccacctcagcctcacaccaaggagggcgttgatgcctacaacgaagtgatcgcccgggtgcgaatgtgggtgaacctgaacctgtggcagaagctgaagctaagcagagatgatgccaagcctctgctgagactgaagggattcccttcctttcctctggtcgagagacaggccaacgaagtggactggtgggacatggtgtgtaacgtgaagaagctgatcaacgagaaaaaggaggatggcaaggtgttttggcagaatctggctggctacaagagacaggaagccctgagaccatacctgagcagcgaggaagatcggaagaagggaaagaaattcgctcggtaccagctgggcgacctgctgctgcacctggaaaagaagcacggcgaggactggggaaaggtgtacgacgaggcctgggagcggattgacaagaaagtggaaggcctgagcaagcacatcaagctggaagaggaacggagaagcgaggacgcccagagcaaggccgccctgaccgactggctgcgggctaaggccagcttcgtgatcgagggcctgaaggaggccgacaaggacgagttctgcagatgcgagctgaagctgcagaagtggtacggggacctgcggggaaagcccttcgccatcgaagccgagaacagcatcctggacatcagcggcttcagcaagcagtacaactgtgccttcatctggcagaaggacggcgtgaagaagctgaacctgtacctgatcatcaactacttcaagggcggcaagctgcggttcaagaagatcaaacctgaagccttcgaagccaacagattctacaccgtgatcaacaaaaagagcggcgagatcgtgcccatggaggtgaacttcaacttcgacgaccccaacctgatcatcctgcctctggcctttggcaagagacagggcagagaattcatctggaacgacctgctgtccctggaaaccggcagcctgaagctggccaacggaagagtgatcgagaagacactgtacaacagaagaacccggcaggatgagcctgccctgttcgtggccctgaccttcgagcggcgggaggtcctggactcctccaatatcaaaccaatgaacctgatcggcgtggcaagaggcgaaaacatccccgccgtgatcgccctgaccgaccccgagggctgcccactgagccggtttaaggatagcctgggaaacccaacccacatcctgagaatcggcgagagctataaggagaagcagcggaccatccaggccaagaaggaggtggagcagcggagagccggcggctacagccggaagtacgccagcaaagccaagaatctggcagacgatatggtgagaaacaccgctagagatctgctgtactacgccgtgacccaggatgccatgctgatcttcgccaacctgagccggggcttcggccggcagggcaagcggaccttcatggccgagagacagtacacacggatggaggactggctgaccgccaagctggcctacgagggcctgagcaagacctacctgtccaagacactggcccagtacacctccaagacatgcagcaactgtgggtttaccatcaccagcgccgactacgacagggtgctggagaagctgaagaagacagcaacaggctggatgaccacaattaacggcaaggagctgaaggtggagggccagattacctactacaacagatacaagagacagaacgtagtcaaggacctgtccgtcgagctggatagactgagcgaagaatctgtgaacaacgacatctcctcctggacaaagggcagaagcggagaagctctgagcctcctgaagaaaagattctcccatagacccgtgcaggagaagttcgtgtgcctgaactgcggcttcgagacacacgcagccgagcaagccgccctgaacatcgccagatcctggctgttcctgcggagccaggagtacaagaaataccagacaaacaagacaaccggcaacaccgataagagagccttcgtcgagacctggcagtccttttaccggaagaagcttaaggaggtgtggaaacctgccgtgcggtctggcggatctggcggaggctccaccagccccaagaaaaagagaaaagtctaagctgccttctgcggggcttgccttctggccatgcccttcttctctcccttgcacctgtacctcttggtctttgaataaagcctgagtaggaaggctagcaaaaaaaaaaaaaaaaaaaaaaaaaaaaaaaaaaaaaaaaaaaaaaaaaaaaaaaaaaaaaaaaaaaaaaaaaaaaaaaa

SEQ ID NO: 10461 - RNA, 8787 nt, synthetic construct
  source 1..8787: mol_type = other RNA
aggaaataagagagaaaagaagagtaagaagaaatataagagccaccatggcccctaagaagaagcgtaaagtgagccggatgaaccacgaccaggagttcgacccccctaaggtgtaccctcccgtccccgccgagaagagaaagcccatccgggtcctgagcctgttcgatggcatcgccaccggtctgctggtgctgaaggacctgggcatccaggtggataggtacattgcctccgaggtgtgcgaggactccatcaccgtgggaatggtgcgtcatcagggcaagatcatgtacgtgggcgacgtgcggagcgtgacacagaagcatatccaggagtggggccctttcgacctggtgatcggcggcagcccttgcaatgacctgagcatcgtgaacccagcccggaagggcctgtacgagggaaccggcagactgttcttcgagttttacagactgctgcacgacgcccggcctaaggaaggcgacgaccggcccttcttttggctgttcgagaatgtggtggccatgggagtcagcgacaagcgggatattagccggttcctggagagcaaccccgtgatgatcgatgccaaggaagtgagcgccgcccaccgggccagatacttctggggcaatctgcctggcatgaacagacccctggccagcaccgtgaacgacaagctggagctgcaggagtgcctggagcacggccggatcgccaagttcagcaaggtgagaaccatcaccacccgaagcaacagcatcaaacaaggcaaggaccagcactttcctgtgttcatgaacgagaaggaggacatcctgtggtgtaccgagatggagagagtgttcgggttcccagtccactacacagatgtcagcaacatgtctagactggccagacagagactgctgggaagaagctggtccgtccctgtgatcagacacctgttcgcccctctgaaggagtacttcgcctgcgtgagcagcggcaacagcaacgccaacagccggggccccagcttctctagcggcctggtgccactgtccctgagagggagccacatgggccccatggagatctacaaaaccgtgagcgcctggaagcggcagcctgtgcgcgtgctgagcctgtttcggaatatcgataaagtcctgaaaagcctgggattcctggagagcggctctggctccggcggtggcaccctgaagtacgtggaggatgtgacaaacgtggtcagacgggatgtggagaagtggggccccttcgatctggtgtacggcagcacccaacccctgggcagctcttgtgaccggtgccctggctggtacatgtttcagttccaccggatcctgcagtacgccctgccgagacaggagtcccagcggccattcttttggattttcatggacaacttgctgctgaccgaggatgaccaggaaactaccactcggttcctgcagaccgaagccgtgaccctgcaggacgtgagaggccgggactaccagaacgccatgcgggtgtggtccaacatccctggactgaaaagcaagcacgcacctctgacccctaaagaagaggagtacctgcaggcccaggtgcggagcagaagcaagctggacgcccctaaggtggatctgctggtgaagaattgcctcctgcccctgagagagtacttcaagtatttcagccagaatagtctgcccctgggaggcagcggcggcggcaggcccgagagcgtgaccttcgaggacgtggccatctacttcagcgagaacgagtggaccggcctggcccccgcccagagggccctgtacagggacgtgatgctggagaactacggcgccctggccagcctggccttccccttccccaagcccgccctgatcttccagctggagcagggcgaggccccctggagcagcgccccccagggcgccctggacggcgagggccccaggggcatcagcggcggcccaagcagcggcgcccctcctcccagcggcggcaggcggcccaagcagcggcgcccctcctcccagcggcggcagcccagccggctccccaacctctaccgaggagggcacctctgagtccgccacccccgagagcggccctggcacctccaccgagcccagcgagggcagcgcacccggcagccctgccggcagccccacctccacagaggagggaaccagcaccgagcccagcgaaggcagcgccccaggcaccagcaccgagcctagtgagcaggagattaaacggatcaacaagatcagaagaagacttgtgaaagacagcaacaccaagaaggccggcaagacaggccccatgaaaaccctgctggttagagtgatgacacccgatctgagagagcggctggaaaacctgagaaagaagcctgaaaatatcccccagcccatcagcaatacatctagagccaacctgaataagctgctgaccgattacaccgaaatgaagaaggcgatcctgcatgtgtactgggaagagttccagaaggaccctgtgggcctgatgagccgggtggcccagcctgccagcaagaagatcgatcagaacaagctgaaacctgagatggacgagaagggcaacctgaccaccgccggctttgcctgctctcagtgtggccagcccctgttcgtgtacaagctggagcaggtgtctgagaagggcaaggcttacaccaactacttcggacggtgcaatgtggccgagcacgaaaagctgatcctgctggcccagctgaagcccgagaaggatagcgacgaagccgtgacatatagcctgggaaagtttgggcagagggccctggatttctacagcattcatgtgaccaaggagtccacccaccccgtgaagcccctggcccagatcgccggaaacagatacgcctccggacctgtgggaaaggccctgagcgacgcatgtatgggcacaatcgcctccttcctgtctaagtaccaggacatcatcatcgaacaccagaaggtggtgaagggcaaccagaagagactggagagcctgcgggagctggccggcaaggaaaacctggaataccctagcgtgaccctgccacctcagcctcacaccaaggagggcgttgatgcctacaacgaagtgatcgcccgggtgcgaatgtgggtgaacctgaacctgtggcagaagctgaagctaagcagagatgatgccaagcctctgctgagactgaagggattcccttcctttcctctggtcgagagacaggccaacgaagtggactggtgggacatggtgtgtaacgtgaagaagctgatcaacgagaaaaaggaggatggcaaggtgttttggcagaatctggctggctacaagagacaggaagccctgagaccatacctgagcagcgaggaagatcggaagaagggaaagaaattcgctcggtaccagctgggcgacctgctgctgcacctggaaaagaagcacggcgaggactggggaaaggtgtacgacgaggcctgggagcggattgacaagaaagtggaaggcctgagcaagcacatcaagctggaagaggaacggagaagcgaggacgcccagagcaaggccgccctgaccgactggctgcgggctaaggccagcttcgtgatcgagggcctgaaggaggccgacaaggacgagttctgcagatgcgagctgaagctgcagaagtggtacggggacctgcggggaaagcccttcgccatcgaagccgagaacagcatcctggacatcagcggcttcagcaagcagtacaactgtgccttcatctggcagaaggacggcgtgaagaagctgaacctgtacctgatcatcaactacttcaagggcggcaagctgcggttcaagaagatcaaacctgaagccttcgaagccaacagattctacaccgtgatcaacaaaaagagcggcgagatcgtgcccatggaggtgaacttcaacttcgacgaccccaacctgatcatcctgcctctggcctttggcaagagacagggcagagaattcatctggaacgacctgctgtccctggaaaccggcagcctgaagctggccaacggaagagtgatcgagaagacactgtacaacagaagaacccggcaggatgagcctgccctgttcgtggccctgaccttcgagcggcgggaggtcctggactcctccaatatcaaaccaatgaacctgatcggcgtggcaagaggcgaaaacatccccgccgtgatcgccctgaccgaccccgagggctgcccactgagccggtttaaggatagcctgggaaacccaacccacatcctgagaatcggcgagagctataaggagaagcagcggaccatccaggccaagaaggaggtggagcagcggagagccggcggctacagccggaagtacgccagcaaagccaagaatctggcagacgatatggtgagaaacaccgctagagatctgctgtactacgccgtgacccaggatgccatgctgatcttcgccaacctgagccggggcttcggccggcagggcaagcggaccttcatggccgagagacagtacacacggatggaggactggctgaccgccaagctggcctacgagggcctgagcaagacctacctgtccaagacactggcccagtacacctccaagacatgcagcaactgtgggtttaccatcaccagcgccgactacgacagggtgctggagaagctgaagaagacagcaacaggctggatgaccacaattaacggcaaggagctgaaggtggagggccagattacctactacaacagatacaagagacagaacgtagtcaaggacctgtccgtcgagctggatagactgagcgaagaatctgtgaacaacgacatctcctcctggacaaagggcagaagcggagaagctctgagcctcctgaagaaaagattctcccatagacccgtgcaggagaagttcgtgtgcctgaactgcggcttcgagacacacgcagccgagcaagccgccctgaacatcgccagatcctggctgttcctgcggagccaggagtacaagaaataccagacaaacaagacaaccggcaacaccgataagagagccttcgtcgagacctggcagtccttttaccggaagaagcttaaggaggtgtggaaacctgccgtgcggtctggcggatctggcggaggctccaccagccccaagaaaaagagaaaagtctaagctgccttctgcggggcttgccttctggccatgcccttcttctctcccttgcacctgtacctcttggtctttgaataaagcctgagtaggaaggctagcaaaaaaaaaaaaaaaaaaaaaaaaaaaaaaaaaaaaaaaaaaaaaaaaaaaaaaaaaaaaaaaaaaaaaaaaaaaaaaaagcccagccggctccccaacctctaccgaggagggcacctctgagtccgccacccccgagagcggccctggcacctccaccgagcccagcgagggcagcgcacccggcagccctgccggcagccccacctccacagaggagggaaccagcaccgagcccagcgaaggcagcgccccaggcaccagcaccgagcctagtgagcaggagattaaacggatcaacaagatcagaagaagacttgtgaaagacagcaacaccaagaaggccggcaagacaggccccatgaaaaccctgctggttagagtgatgacacccgatctgagagagcggctggaaaacctgagaaagaagcctgaaaatatcccccagcccatcagcaatacatctagagccaacctgaataagctgctgaccgattacaccgaaatgaagaaggcgatcctgcatgtgtactgggaagagttccagaaggaccctgtgggcctgatgagccgggtggcccagcctgccagcaagaagatcgatcagaacaagctgaaacctgagatggacgagaagggcaacctgaccaccgccggctttgcctgctctcagtgtggccagcccctgttcgtgtacaagctggagcaggtgtctgagaagggcaaggcttacaccaactacttcggacggtgcaatgtggccgagcacgaaaagctgatcctgctggcccagctgaagcccgagaaggatagcgacgaagccgtgacatatagcctgggaaagtttgggcagagggccctggatttctacagcattcatgtgaccaaggagtccacccaccccgtgaagcccctggcccagatcgccggaaacagatacgcctccggacctgtgggaaaggccctgagcgacgcatgtatgggcacaatcgcctccttcctgtctaagtaccaggacatcatcatcgaacaccagaaggtggtgaagggcaaccagaagagactggagagcctgcgggagctggccggcaaggaaaacctggaataccctagcgtgaccctgccacctcagcctcacaccaaggagggcgttgatgcctacaacgaagtgatcgcccgggtgcgaatgtgggtgaacctgaacctgtggcagaagctgaagctaagcagagatgatgccaagcctctgctgagactgaagggattcccttcctttcctctggtcgagagacaggccaacgaagtggactggtgggacatggtgtgtaacgtgaagaagctgatcaacgagaaaaaggaggatggcaaggtgttttggcagaatctggctggctacaagagacaggaagccctgagaccatacctgagcagcgaggaagatcggaagaagggaaagaaattcgctcggtaccagctgggcgacctgctgctgcacctggaaaagaagcacggcgaggactggggaaaggtgtacgacgaggcctgggagcggattgacaagaaagtggaaggcctgagcaagcacatcaagctggaagaggaacggagaagcgaggacgcccagagcaaggccgccctgaccgactggctgcgggctaaggccagcttcgtgatcgagggcctgaaggaggccgacaaggacgagttctgcagatgcgagctgaagctgcagaagtggtacggggacctgcggggaaagcccttcgccatcgaagccgagaacagcatcctggacatcagcggcttcagcaagcagtacaactgtgccttcatctggcagaaggacggcgtgaagaagctgaacctgtacctgatcatcaactacttcaagggcggcaagctgcggttcaagaagatcaaacctgaagccttcgaagccaacagattctacaccgtgatcaacaaaaagagcggcgagatcgtgcccatggaggtgaacttcaacttcgacgaccccaacctgatcatcctgcctctggcctttggcaagagacagggcagagaattcatctggaacgacctgctgtccctggaaaccggcagcctgaagctggccaacggaagagtgatcgagaagacactgtacaacagaagaacccggcaggatgagcctgccctgttcgtggccctgaccttcgagcggcgggaggtcctggactcctccaatatcaaaccaatgaacctgatcggcgtggcaagaggcgaaaacatccccgccgtgatcgccctgaccgaccccgagggctgcccactgagccggtttaaggatagcctgggaaacccaacccacatcctgagaatcggcgagagctataaggagaagcagcggaccatccaggccaagaaggaggtggagcagcggagagccggcggctacagccggaagtacgccagcaaagccaagaatctggcagacgatatggtgagaaacaccgctagagatctgctgtactacgccgtgacccaggatgccatgctgatcttcgccaacctgagccggggcttcggccggcagggcaagcggaccttcatggccgagagacagtacacacggatggaggactggctgaccgccaagctggcctacgagggcctgagcaagacctacctgtccaagacactggcccagtacacctccaagacatgcagcaactgtgggtttaccatcaccagcgccgactacgacagggtgctggagaagctgaagaagacagcaacaggctggatgaccacaattaacggcaaggagctgaaggtggagggccagattacctactacaacagatacaagagacagaacgtagtcaaggacctgtccgtcgagctggatagactgagcgaagaatctgtgaacaacgacatctcctcctggacaaagggcagaagcggagaagctctgagcctcctgaagaaaagattctcccatagacccgtgcaggagaagttcgtgtgcctgaactgcggcttcgagacacacgcagccgagcaagccgccctgaacatcgccagatcctggctgttcctgcggagccaggagtacaagaaataccagacaaacaagacaaccggcaacaccgataagagagccttcgtcgagacctggcagtccttttaccggaagaagcttaaggaggtgtggaaacctgccgtgcggtctggcggatctggcggaggctccaccagccccaagaaaaagagaaaagtctaagctgccttctgcggggcttgccttctggccatgcccttcttctctcccttgcacctgtacctcttggtctttgaataaagcctgagtaggaaggctagcaaaaaaaaaaaaaaaaaaaaaaaaaaaaaaaaaaaaaaaaaaaaaaaaaaaaaaaaaaaaaaaaaaaaaaaaaaaaaaaa

SEQ ID NO: 10462 - RNA, 8787 nt, synthetic construct
  source 1..8787: mol_type = other RNA
aggaaataagagagaaaagaagagtaagaagaaatataagagccaccatggcccctaagaagaagcgtaaagtgagccggatgaaccacgaccaggagttcgacccccctaaggtgtaccctcccgtccccgccgagaagagaaagcccatccgggtcctgagcctgttcgatggcatcgccaccggtctgctggtgctgaaggacctgggcatccaggtggataggtacattgcctccgaggtgtgcgaggactccatcaccgtgggaatggtgcgtcatcagggcaagatcatgtacgtgggcgacgtgcggagcgtgacacagaagcatatccaggagtggggccctttcgacctggtgatcggcggcagcccttgcaatgacctgagcatcgtgaacccagcccggaagggcctgtacgagggaaccggcagactgttcttcgagttttacagactgctgcacgacgcccggcctaaggaaggcgacgaccggcccttcttttggctgttcgagaatgtggtggccatgggagtcagcgacaagcgggatattagccggttcctggagagcaaccccgtgatgatcgatgccaaggaagtgagcgccgcccaccgggccagatacttctggggcaatctgcctggcatgaacagacccctggccagcaccgtgaacgacaagctggagctgcaggagtgcctggagcacggccggatcgccaagttcagcaaggtgagaaccatcaccacccgaagcaacagcatcaaacaaggcaaggaccagcactttcctgtgttcatgaacgagaaggaggacatcctgtggtgtaccgagatggagagagtgttcgggttcccagtccactacacagatgtcagcaacatgtctagactggccagacagagactgctgggaagaagctggtccgtccctgtgatcagacacctgttcgcccctctgaaggagtacttcgcctgcgtgagcagcggcaacagcaacgccaacagccggggccccagcttctctagcggcctggtgccactgtccctgagagggagccacatgggccccatggagatctacaaaaccgtgagcgcctggaagcggcagcctgtgcgcgtgctgagcctgtttcggaatatcgataaagtcctgaaaagcctgggattcctggagagcggctctggctccggcggtggcaccctgaagtacgtggaggatgtgacaaacgtggtcagacgggatgtggagaagtggggccccttcgatctggtgtacggcagcacccaacccctgggcagctcttgtgaccggtgccctggctggtacatgtttcagttccaccggatcctgcagtacgccctgccgagacaggagtcccagcggccattcttttggattttcatggacaacttgctgctgaccgaggatgaccaggaaactaccactcggttcctgcagaccgaagccgtgaccctgcaggacgtgagaggccgggactaccagaacgccatgcgggtgtggtccaacatccctggactgaaaagcaagcacgcacctctgacccctaaagaagaggagtacctgcaggcccaggtgcggagcagaagcaagctggacgcccctaaggtggatctgctggtgaagaattgcctcctgcccctgagagagtacttcaagtatttcagccagaatagtctgcccctgggaggcagcggcggcggcagccagggcagcgtgaccttcggcgacgtggccatcgacttcagcagggaggagtgggagtggctgcagcccgcccagagggacctgtacaggatcgtgatgctggagaactacggccacctggtgagcctgggcctgaacgtgagcaagcccgacgtggtgagcctgctggagcagggcaaggagccctggctgggcaacggcgacgtgaggagggacctgttcagcgtgagcgagagcaacggcggcccaagcagcggcgcccctcctcccagcggcggcaggcggcccaagcagcggcgcccctcctcccagcggcggcagcccagccggctccccaacctctaccgaggagggcacctctgagtccgccacccccgagagcggccctggcacctccaccgagcccagcgagggcagcgcacccggcagccctgccggcagccccacctccacagaggagggaaccagcaccgagcccagcgaaggcagcgccccaggcaccagcaccgagcctagtgagcaggagattaaacggatcaacaagatcagaagaagacttgtgaaagacagcaacaccaagaaggccggcaagacaggccccatgaaaaccctgctggttagagtgatgacacccgatctgagagagcggctggaaaacctgagaaagaagcctgaaaatatcccccagcccatcagcaatacatctagagccaacctgaataagctgctgaccgattacaccgaaatgaagaaggcgatcctgcatgtgtactgggaagagttccagaaggaccctgtgggcctgatgagccgggtggcccagcctgccagcaagaagatcgatcagaacaagctgaaacctgagatggacgagaagggcaacctgaccaccgccggctttgcctgctctcagtgtggccagcccctgttcgtgtacaagctggagcaggtgtctgagaagggcaaggcttacaccaactacttcggacggtgcaatgtggccgagcacgaaaagctgatcctgctggcccagctgaagcccgagaaggatagcgacgaagccgtgacatatagcctgggaaagtttgggcagagggccctggatttctacagcattcatgtgaccaaggagtccacccaccccgtgaagcccctggcccagatcgccggaaacagatacgcctccggacctgtgggaaaggccctgagcgacgcatgtatgggcacaatcgcctccttcctgtctaagtaccaggacatcatcatcgaacaccagaaggtggtgaagggcaaccagaagagactggagagcctgcgggagctggccggcaaggaaaacctggaataccctagcgtgaccctgccacctcagcctcacaccaaggagggcgttgatgcctacaacgaagtgatcgcccgggtgcgaatgtgggtgaacctgaacctgtggcagaagctgaagctaagcagagatgatgccaagcctctgctgagactgaagggattcccttcctttcctctggtcgagagacaggccaacgaagtggactggtgggacatggtgtgtaacgtgaagaagctgatcaacgagaaaaaggaggatggcaaggtgttttggcagaatctggctggctacaagagacaggaagccctgagaccatacctgagcagcgaggaagatcggaagaagggaaagaaattcgctcggtaccagctgggcgacctgctgctgcacctggaaaagaagcacggcgaggactggggaaaggtgtacgacgaggcctgggagcggattgacaagaaagtggaaggcctgagcaagcacatcaagctggaagaggaacggagaagcgaggacgcccagagcaaggccgccctgaccgactggctgcgggctaaggccagcttcgtgatcgagggcctgaaggaggccgacaaggacgagttctgcagatgcgagctgaagctgcagaagtggtacggggacctgcggggaaagcccttcgccatcgaagccgagaacagcatcctggacatcagcggcttcagcaagcagtacaactgtgccttcatctggcagaaggacggcgtgaagaagctgaacctgtacctgatcatcaactacttcaagggcggcaagctgcggttcaagaagatcaaacctgaagccttcgaagccaacagattctacaccgtgatcaacaaaaagagcggcgagatcgtgcccatggaggtgaacttcaacttcgacgaccccaacctgatcatcctgcctctggcctttggcaagagacagggcagagaattcatctggaacgacctgctgtccctggaaaccggcagcctgaagctggccaacggaagagtgatcgagaagacactgtacaacagaagaacccggcaggatgagcctgccctgttcgtggccctgaccttcgagcggcgggaggtcctggactcctccaatatcaaaccaatgaacctgatcggcgtggcaagaggcgaaaacatccccgccgtgatcgccctgaccgaccccgagggctgcccactgagccggtttaaggatagcctgggaaacccaacccacatcctgagaatcggcgagagctataaggagaagcagcggaccatccaggccaagaaggaggtggagcagcggagagccggcggctacagccggaagtacgccagcaaagccaagaatctggcagacgatatggtgagaaacaccgctagagatctgctgtactacgccgtgacccaggatgccatgctgatcttcgccaacctgagccggggcttcggccggcagggcaagcggaccttcatggccgagagacagtacacacggatggaggactggctgaccgccaagctggcctacgagggcctgagcaagacctacctgtccaagacactggcccagtacacctccaagacatgcagcaactgtgggtttaccatcaccagcgccgactacgacagggtgctggagaagctgaagaagacagcaacaggctggatgaccacaattaacggcaaggagctgaaggtggagggccagattacctactacaacagatacaagagacagaacgtagtcaaggacctgtccgtcgagctggatagactgagcgaagaatctgtgaacaacgacatctcctcctggacaaagggcagaagcggagaagctctgagcctcctgaagaaaagattctcccatagacccgtgcaggagaagttcgtgtgcctgaactgcggcttcgagacacacgcagccgagcaagccgccctgaacatcgccagatcctggctgttcctgcggagccaggagtacaagaaataccagacaaacaagacaaccggcaacaccgataagagagccttcgtcgagacctggcagtccttttaccggaagaagcttaaggaggtgtggaaacctgccgtgcggtctggcggatctggcggaggctccaccagccccaagaaaaagagaaaagtctaagctgccttctgcggggcttgccttctggccatgcccttcttctctcccttgcacctgtacctcttggtctttgaataaagcctgagtaggaaggctagcaaaaaaaaaaaaaaaaaaaaaaaaaaaaaaaaaaaaaaaaaaaaaaaaaaaaaaaaaaaaaaaaaaaaaaaaaaaaaaaagcccagccggctccccaacctctaccgaggagggcacctctgagtccgccacccccgagagcggccctggcacctccaccgagcccagcgagggcagcgcacccggcagccctgccggcagccccacctccacagaggagggaaccagcaccgagcccagcgaaggcagcgccccaggcaccagcaccgagcctagtgagcaggagattaaacggatcaacaagatcagaagaagacttgtgaaagacagcaacaccaagaaggccggcaagacaggccccatgaaaaccctgctggttagagtgatgacacccgatctgagagagcggctggaaaacctgagaaagaagcctgaaaatatcccccagcccatcagcaatacatctagagccaacctgaataagctgctgaccgattacaccgaaatgaagaaggcgatcctgcatgtgtactgggaagagttccagaaggaccctgtgggcctgatgagccgggtggcccagcctgccagcaagaagatcgatcagaacaagctgaaacctgagatggacgagaagggcaacctgaccaccgccggctttgcctgctctcagtgtggccagcccctgttcgtgtacaagctggagcaggtgtctgagaagggcaaggcttacaccaactacttcggacggtgcaatgtggccgagcacgaaaagctgatcctgctggcccagctgaagcccgagaaggatagcgacgaagccgtgacatatagcctgggaaagtttgggcagagggccctggatttctacagcattcatgtgaccaaggagtccacccaccccgtgaagcccctggcccagatcgccggaaacagatacgcctccggacctgtgggaaaggccctgagcgacgcatgtatgggcacaatcgcctccttcctgtctaagtaccaggacatcatcatcgaacaccagaaggtggtgaagggcaaccagaagagactggagagcctgcgggagctggccggcaaggaaaacctggaataccctagcgtgaccctgccacctcagcctcacaccaaggagggcgttgatgcctacaacgaagtgatcgcccgggtgcgaatgtgggtgaacctgaacctgtggcagaagctgaagctaagcagagatgatgccaagcctctgctgagactgaagggattcccttcctttcctctggtcgagagacaggccaacgaagtggactggtgggacatggtgtgtaacgtgaagaagctgatcaacgagaaaaaggaggatggcaaggtgttttggcagaatctggctggctacaagagacaggaagccctgagaccatacctgagcagcgaggaagatcggaagaagggaaagaaattcgctcggtaccagctgggcgacctgctgctgcacctggaaaagaagcacggcgaggactggggaaaggtgtacgacgaggcctgggagcggattgacaagaaagtggaaggcctgagcaagcacatcaagctggaagaggaacggagaagcgaggacgcccagagcaaggccgccctgaccgactggctgcgggctaaggccagcttcgtgatcgagggcctgaaggaggccgacaaggacgagttctgcagatgcgagctgaagctgcagaagtggtacggggacctgcggggaaagcccttcgccatcgaagccgagaacagcatcctggacatcagcggcttcagcaagcagtacaactgtgccttcatctggcagaaggacggcgtgaagaagctgaacctgtacctgatcatcaactacttcaagggcggcaagctgcggttcaagaagatcaaacctgaagccttcgaagccaacagattctacaccgtgatcaacaaaaagagcggcgagatcgtgcccatggaggtgaacttcaacttcgacgaccccaacctgatcatcctgcctctggcctttggcaagagacagggcagagaattcatctggaacgacctgctgtccctggaaaccggcagcctgaagctggccaacggaagagtgatcgagaagacactgtacaacagaagaacccggcaggatgagcctgccctgttcgtggccctgaccttcgagcggcgggaggtcctggactcctccaatatcaaaccaatgaacctgatcggcgtggcaagaggcgaaaacatccccgccgtgatcgccctgaccgaccccgagggctgcccactgagccggtttaaggatagcctgggaaacccaacccacatcctgagaatcggcgagagctataaggagaagcagcggaccatccaggccaagaaggaggtggagcagcggagagccggcggctacagccggaagtacgccagcaaagccaagaatctggcagacgatatggtgagaaacaccgctagagatctgctgtactacgccgtgacccaggatgccatgctgatcttcgccaacctgagccggggcttcggccggcagggcaagcggaccttcatggccgagagacagtacacacggatggaggactggctgaccgccaagctggcctacgagggcctgagcaagacctacctgtccaagacactggcccagtacacctccaagacatgcagcaactgtgggtttaccatcaccagcgccgactacgacagggtgctggagaagctgaagaagacagcaacaggctggatgaccacaattaacggcaaggagctgaaggtggagggccagattacctactacaacagatacaagagacagaacgtagtcaaggacctgtccgtcgagctggatagactgagcgaagaatctgtgaacaacgacatctcctcctggacaaagggcagaagcggagaagctctgagcctcctgaagaaaagattctcccatagacccgtgcaggagaagttcgtgtgcctgaactgcggcttcgagacacacgcagccgagcaagccgccctgaacatcgccagatcctggctgttcctgcggagccaggagtacaagaaataccagacaaacaagacaaccggcaacaccgataagagagccttcgtcgagacctggcagtccttttaccggaagaagcttaaggaggtgtggaaacctgccgtgcggtctggcggatctggcggaggctccaccagccccaagaaaaagagaaaagtctaagctgccttctgcggggcttgccttctggccatgcccttcttctctcccttgcacctgtacctcttggtctttgaataaagcctgagtaggaaggctagcaaaaaaaaaaaaaaaaaaaaaaaaaaaaaaaaaaaaaaaaaaaaaaaaaaaaaaaaaaaaaaaaaaaaaaaaaaaaaaaa

SEQ ID NO: 10463 - RNA, 8787 nt, synthetic construct
  source 1..8787: mol_type = other RNA
aggaaataagagagaaaagaagagtaagaagaaatataagagccaccatggcccctaagaagaagcgtaaagtgagccggatgaaccacgaccaggagttcgacccccctaaggtgtaccctcccgtccccgccgagaagagaaagcccatccgggtcctgagcctgttcgatggcatcgccaccggtctgctggtgctgaaggacctgggcatccaggtggataggtacattgcctccgaggtgtgcgaggactccatcaccgtgggaatggtgcgtcatcagggcaagatcatgtacgtgggcgacgtgcggagcgtgacacagaagcatatccaggagtggggccctttcgacctggtgatcggcggcagcccttgcaatgacctgagcatcgtgaacccagcccggaagggcctgtacgagggaaccggcagactgttcttcgagttttacagactgctgcacgacgcccggcctaaggaaggcgacgaccggcccttcttttggctgttcgagaatgtggtggccatgggagtcagcgacaagcgggatattagccggttcctggagagcaaccccgtgatgatcgatgccaaggaagtgagcgccgcccaccgggccagatacttctggggcaatctgcctggcatgaacagacccctggccagcaccgtgaacgacaagctggagctgcaggagtgcctggagcacggccggatcgccaagttcagcaaggtgagaaccatcaccacccgaagcaacagcatcaaacaaggcaaggaccagcactttcctgtgttcatgaacgagaaggaggacatcctgtggtgtaccgagatggagagagtgttcgggttcccagtccactacacagatgtcagcaacatgtctagactggccagacagagactgctgggaagaagctggtccgtccctgtgatcagacacctgttcgcccctctgaaggagtacttcgcctgcgtgagcagcggcaacagcaacgccaacagccggggccccagcttctctagcggcctggtgccactgtccctgagagggagccacatgggccccatggagatctacaaaaccgtgagcgcctggaagcggcagcctgtgcgcgtgctgagcctgtttcggaatatcgataaagtcctgaaaagcctgggattcctggagagcggctctggctccggcggtggcaccctgaagtacgtggaggatgtgacaaacgtggtcagacgggatgtggagaagtggggccccttcgatctggtgtacggcagcacccaacccctgggcagctcttgtgaccggtgccctggctggtacatgtttcagttccaccggatcctgcagtacgccctgccgagacaggagtcccagcggccattcttttggattttcatggacaacttgctgctgaccgaggatgaccaggaaactaccactcggttcctgcagaccgaagccgtgaccctgcaggacgtgagaggccgggactaccagaacgccatgcgggtgtggtccaacatccctggactgaaaagcaagcacgcacctctgacccctaaagaagaggagtacctgcaggcccaggtgcggagcagaagcaagctggacgcccctaaggtggatctgctggtgaagaattgcctcctgcccctgagagagtacttcaagtatttcagccagaatagtctgcccctgggaggcagcggcggcggcgagcccggcgccgtgagcttcgccgacgtggccgtgtacttctgcagggaggagtggggctgcctgaggcccgcccagaggaccctgtacagggacgtgatgagggagacctacggccacctgagcgccctgggcatcggcggcaagaagcccgccctgatcagctgggtggaggaggaggccgagctgtggggccccgccgcccaggaccccgaggtggccaagtgccccacccagaccgacggcggcccaagcagcggcgcccctcctcccagcggcggcaggcggcccaagcagcggcgcccctcctcccagcggcggcagcccagccggctccccaacctctaccgaggagggcacctctgagtccgccacccccgagagcggccctggcacctccaccgagcccagcgagggcagcgcacccggcagccctgccggcagccccacctccacagaggagggaaccagcaccgagcccagcgaaggcagcgccccaggcaccagcaccgagcctagtgagcaggagattaaacggatcaacaagatcagaagaagacttgtgaaagacagcaacaccaagaaggccggcaagacaggccccatgaaaaccctgctggttagagtgatgacacccgatctgagagagcggctggaaaacctgagaaagaagcctgaaaatatcccccagcccatcagcaatacatctagagccaacctgaataagctgctgaccgattacaccgaaatgaagaaggcgatcctgcatgtgtactgggaagagttccagaaggaccctgtgggcctgatgagccgggtggcccagcctgccagcaagaagatcgatcagaacaagctgaaacctgagatggacgagaagggcaacctgaccaccgccggctttgcctgctctcagtgtggccagcccctgttcgtgtacaagctggagcaggtgtctgagaagggcaaggcttacaccaactacttcggacggtgcaatgtggccgagcacgaaaagctgatcctgctggcccagctgaagcccgagaaggatagcgacgaagccgtgacatatagcctgggaaagtttgggcagagggccctggatttctacagcattcatgtgaccaaggagtccacccaccccgtgaagcccctggcccagatcgccggaaacagatacgcctccggacctgtgggaaaggccctgagcgacgcatgtatgggcacaatcgcctccttcctgtctaagtaccaggacatcatcatcgaacaccagaaggtggtgaagggcaaccagaagagactggagagcctgcgggagctggccggcaaggaaaacctggaataccctagcgtgaccctgccacctcagcctcacaccaaggagggcgttgatgcctacaacgaagtgatcgcccgggtgcgaatgtgggtgaacctgaacctgtggcagaagctgaagctaagcagagatgatgccaagcctctgctgagactgaagggattcccttcctttcctctggtcgagagacaggccaacgaagtggactggtgggacatggtgtgtaacgtgaagaagctgatcaacgagaaaaaggaggatggcaaggtgttttggcagaatctggctggctacaagagacaggaagccctgagaccatacctgagcagcgaggaagatcggaagaagggaaagaaattcgctcggtaccagctgggcgacctgctgctgcacctggaaaagaagcacggcgaggactggggaaaggtgtacgacgaggcctgggagcggattgacaagaaagtggaaggcctgagcaagcacatcaagctggaagaggaacggagaagcgaggacgcccagagcaaggccgccctgaccgactggctgcgggctaaggccagcttcgtgatcgagggcctgaaggaggccgacaaggacgagttctgcagatgcgagctgaagctgcagaagtggtacggggacctgcggggaaagcccttcgccatcgaagccgagaacagcatcctggacatcagcggcttcagcaagcagtacaactgtgccttcatctggcagaaggacggcgtgaagaagctgaacctgtacctgatcatcaactacttcaagggcggcaagctgcggttcaagaagatcaaacctgaagccttcgaagccaacagattctacaccgtgatcaacaaaaagagcggcgagatcgtgcccatggaggtgaacttcaacttcgacgaccccaacctgatcatcctgcctctggcctttggcaagagacagggcagagaattcatctggaacgacctgctgtccctggaaaccggcagcctgaagctggccaacggaagagtgatcgagaagacactgtacaacagaagaacccggcaggatgagcctgccctgttcgtggccctgaccttcgagcggcgggaggtcctggactcctccaatatcaaaccaatgaacctgatcggcgtggcaagaggcgaaaacatccccgccgtgatcgccctgaccgaccccgagggctgcccactgagccggtttaaggatagcctgggaaacccaacccacatcctgagaatcggcgagagctataaggagaagcagcggaccatccaggccaagaaggaggtggagcagcggagagccggcggctacagccggaagtacgccagcaaagccaagaatctggcagacgatatggtgagaaacaccgctagagatctgctgtactacgccgtgacccaggatgccatgctgatcttcgccaacctgagccggggcttcggccggcagggcaagcggaccttcatggccgagagacagtacacacggatggaggactggctgaccgccaagctggcctacgagggcctgagcaagacctacctgtccaagacactggcccagtacacctccaagacatgcagcaactgtgggtttaccatcaccagcgccgactacgacagggtgctggagaagctgaagaagacagcaacaggctggatgaccacaattaacggcaaggagctgaaggtggagggccagattacctactacaacagatacaagagacagaacgtagtcaaggacctgtccgtcgagctggatagactgagcgaagaatctgtgaacaacgacatctcctcctggacaaagggcagaagcggagaagctctgagcctcctgaagaaaagattctcccatagacccgtgcaggagaagttcgtgtgcctgaactgcggcttcgagacacacgcagccgagcaagccgccctgaacatcgccagatcctggctgttcctgcggagccaggagtacaagaaataccagacaaacaagacaaccggcaacaccgataagagagccttcgtcgagacctggcagtccttttaccggaagaagcttaaggaggtgtggaaacctgccgtgcggtctggcggatctggcggaggctccaccagccccaagaaaaagagaaaagtctaagctgccttctgcggggcttgccttctggccatgcccttcttctctcccttgcacctgtacctcttggtctttgaataaagcctgagtaggaaggctagcaaaaaaaaaaaaaaaaaaaaaaaaaaaaaaaaaaaaaaaaaaaaaaaaaaaaaaaaaaaaaaaaaaaaaaaaaaaaaaaagcccagccggctccccaacctctaccgaggagggcacctctgagtccgccacccccgagagcggccctggcacctccaccgagcccagcgagggcagcgcacccggcagccctgccggcagccccacctccacagaggagggaaccagcaccgagcccagcgaaggcagcgccccaggcaccagcaccgagcctagtgagcaggagattaaacggatcaacaagatcagaagaagacttgtgaaagacagcaacaccaagaaggccggcaagacaggccccatgaaaaccctgctggttagagtgatgacacccgatctgagagagcggctggaaaacctgagaaagaagcctgaaaatatcccccagcccatcagcaatacatctagagccaacctgaataagctgctgaccgattacaccgaaatgaagaaggcgatcctgcatgtgtactgggaagagttccagaaggaccctgtgggcctgatgagccgggtggcccagcctgccagcaagaagatcgatcagaacaagctgaaacctgagatggacgagaagggcaacctgaccaccgccggctttgcctgctctcagtgtggccagcccctgttcgtgtacaagctggagcaggtgtctgagaagggcaaggcttacaccaactacttcggacggtgcaatgtggccgagcacgaaaagctgatcctgctggcccagctgaagcccgagaaggatagcgacgaagccgtgacatatagcctgggaaagtttgggcagagggccctggatttctacagcattcatgtgaccaaggagtccacccaccccgtgaagcccctggcccagatcgccggaaacagatacgcctccggacctgtgggaaaggccctgagcgacgcatgtatgggcacaatcgcctccttcctgtctaagtaccaggacatcatcatcgaacaccagaaggtggtgaagggcaaccagaagagactggagagcctgcgggagctggccggcaaggaaaacctggaataccctagcgtgaccctgccacctcagcctcacaccaaggagggcgttgatgcctacaacgaagtgatcgcccgggtgcgaatgtgggtgaacctgaacctgtggcagaagctgaagctaagcagagatgatgccaagcctctgctgagactgaagggattcccttcctttcctctggtcgagagacaggccaacgaagtggactggtgggacatggtgtgtaacgtgaagaagctgatcaacgagaaaaaggaggatggcaaggtgttttggcagaatctggctggctacaagagacaggaagccctgagaccatacctgagcagcgaggaagatcggaagaagggaaagaaattcgctcggtaccagctgggcgacctgctgctgcacctggaaaagaagcacggcgaggactggggaaaggtgtacgacgaggcctgggagcggattgacaagaaagtggaaggcctgagcaagcacatcaagctggaagaggaacggagaagcgaggacgcccagagcaaggccgccctgaccgactggctgcgggctaaggccagcttcgtgatcgagggcctgaaggaggccgacaaggacgagttctgcagatgcgagctgaagctgcagaagtggtacggggacctgcggggaaagcccttcgccatcgaagccgagaacagcatcctggacatcagcggcttcagcaagcagtacaactgtgccttcatctggcagaaggacggcgtgaagaagctgaacctgtacctgatcatcaactacttcaagggcggcaagctgcggttcaagaagatcaaacctgaagccttcgaagccaacagattctacaccgtgatcaacaaaaagagcggcgagatcgtgcccatggaggtgaacttcaacttcgacgaccccaacctgatcatcctgcctctggcctttggcaagagacagggcagagaattcatctggaacgacctgctgtccctggaaaccggcagcctgaagctggccaacggaagagtgatcgagaagacactgtacaacagaagaacccggcaggatgagcctgccctgttcgtggccctgaccttcgagcggcgggaggtcctggactcctccaatatcaaaccaatgaacctgatcggcgtggcaagaggcgaaaacatccccgccgtgatcgccctgaccgaccccgagggctgcccactgagccggtttaaggatagcctgggaaacccaacccacatcctgagaatcggcgagagctataaggagaagcagcggaccatccaggccaagaaggaggtggagcagcggagagccggcggctacagccggaagtacgccagcaaagccaagaatctggcagacgatatggtgagaaacaccgctagagatctgctgtactacgccgtgacccaggatgccatgctgatcttcgccaacctgagccggggcttcggccggcagggcaagcggaccttcatggccgagagacagtacacacggatggaggactggctgaccgccaagctggcctacgagggcctgagcaagacctacctgtccaagacactggcccagtacacctccaagacatgcagcaactgtgggtttaccatcaccagcgccgactacgacagggtgctggagaagctgaagaagacagcaacaggctggatgaccacaattaacggcaaggagctgaaggtggagggccagattacctactacaacagatacaagagacagaacgtagtcaaggacctgtccgtcgagctggatagactgagcgaagaatctgtgaacaacgacatctcctcctggacaaagggcagaagcggagaagctctgagcctcctgaagaaaagattctcccatagacccgtgcaggagaagttcgtgtgcctgaactgcggcttcgagacacacgcagccgagcaagccgccctgaacatcgccagatcctggctgttcctgcggagccaggagtacaagaaataccagacaaacaagacaaccggcaacaccgataagagagccttcgtcgagacctggcagtccttttaccggaagaagcttaaggaggtgtggaaacctgccgtgcggtctggcggatctggcggaggctccaccagccccaagaaaaagagaaaagtctaagctgccttctgcggggcttgccttctggccatgcccttcttctctcccttgcacctgtacctcttggtctttgaataaagcctgagtaggaaggctagcaaaaaaaaaaaaaaaaaaaaaaaaaaaaaaaaaaaaaaaaaaaaaaaaaaaaaaaaaaaaaaaaaaaaaaaaaaaaaaaa

SEQ ID NO: 10464 - RNA, 8787 nt, synthetic construct
  source 1..8787: mol_type = other RNA
aggaaataagagagaaaagaagagtaagaagaaatataagagccaccatggcccctaagaagaagcgtaaagtgagccggatgaaccacgaccaggagttcgacccccctaaggtgtaccctcccgtccccgccgagaagagaaagcccatccgggtcctgagcctgttcgatggcatcgccaccggtctgctggtgctgaaggacctgggcatccaggtggataggtacattgcctccgaggtgtgcgaggactccatcaccgtgggaatggtgcgtcatcagggcaagatcatgtacgtgggcgacgtgcggagcgtgacacagaagcatatccaggagtggggccctttcgacctggtgatcggcggcagcccttgcaatgacctgagcatcgtgaacccagcccggaagggcctgtacgagggaaccggcagactgttcttcgagttttacagactgctgcacgacgcccggcctaaggaaggcgacgaccggcccttcttttggctgttcgagaatgtggtggccatgggagtcagcgacaagcgggatattagccggttcctggagagcaaccccgtgatgatcgatgccaaggaagtgagcgccgcccaccgggccagatacttctggggcaatctgcctggcatgaacagacccctggccagcaccgtgaacgacaagctggagctgcaggagtgcctggagcacggccggatcgccaagttcagcaaggtgagaaccatcaccacccgaagcaacagcatcaaacaaggcaaggaccagcactttcctgtgttcatgaacgagaaggaggacatcctgtggtgtaccgagatggagagagtgttcgggttcccagtccactacacagatgtcagcaacatgtctagactggccagacagagactgctgggaagaagctggtccgtccctgtgatcagacacctgttcgcccctctgaaggagtacttcgcctgcgtgagcagcggcaacagcaacgccaacagccggggccccagcttctctagcggcctggtgccactgtccctgagagggagccacatgggccccatggagatctacaaaaccgtgagcgcctggaagcggcagcctgtgcgcgtgctgagcctgtttcggaatatcgataaagtcctgaaaagcctgggattcctggagagcggctctggctccggcggtggcaccctgaagtacgtggaggatgtgacaaacgtggtcagacgggatgtggagaagtggggccccttcgatctggtgtacggcagcacccaacccctgggcagctcttgtgaccggtgccctggctggtacatgtttcagttccaccggatcctgcagtacgccctgccgagacaggagtcccagcggccattcttttggattttcatggacaacttgctgctgaccgaggatgaccaggaaactaccactcggttcctgcagaccgaagccgtgaccctgcaggacgtgagaggccgggactaccagaacgccatgcgggtgtggtccaacatccctggactgaaaagcaagcacgcacctctgacccctaaagaagaggagtacctgcaggcccaggtgcggagcagaagcaagctggacgcccctaaggtggatctgctggtgaagaattgcctcctgcccctgagagagtacttcaagtatttcagccagaatagtctgcccctgggaggcagcggcggcggcgcccagatgctggtgaccttcgaggaggtggccgtgtacttcacccagggccagggcgccctgctgggccccgcccagagggccctgtacagggacgtgatgcaggagaactacgagatggtgaccagcctgggcttcagcctgcccaagcccgagctgatcagcaggctggagaggggcgaggagccctgggtgcccgacctgcaggcctgcgagaagagggagagcctgaggggcgccaggggcggcccaagcagcggcgcccctcctcccagcggcggcaggcggcccaagcagcggcgcccctcctcccagcggcggcagcccagccggctccccaacctctaccgaggagggcacctctgagtccgccacccccgagagcggccctggcacctccaccgagcccagcgagggcagcgcacccggcagccctgccggcagccccacctccacagaggagggaaccagcaccgagcccagcgaaggcagcgccccaggcaccagcaccgagcctagtgagcaggagattaaacggatcaacaagatcagaagaagacttgtgaaagacagcaacaccaagaaggccggcaagacaggccccatgaaaaccctgctggttagagtgatgacacccgatctgagagagcggctggaaaacctgagaaagaagcctgaaaatatcccccagcccatcagcaatacatctagagccaacctgaataagctgctgaccgattacaccgaaatgaagaaggcgatcctgcatgtgtactgggaagagttccagaaggaccctgtgggcctgatgagccgggtggcccagcctgccagcaagaagatcgatcagaacaagctgaaacctgagatggacgagaagggcaacctgaccaccgccggctttgcctgctctcagtgtggccagcccctgttcgtgtacaagctggagcaggtgtctgagaagggcaaggcttacaccaactacttcggacggtgcaatgtggccgagcacgaaaagctgatcctgctggcccagctgaagcccgagaaggatagcgacgaagccgtgacatatagcctgggaaagtttgggcagagggccctggatttctacagcattcatgtgaccaaggagtccacccaccccgtgaagcccctggcccagatcgccggaaacagatacgcctccggacctgtgggaaaggccctgagcgacgcatgtatgggcacaatcgcctccttcctgtctaagtaccaggacatcatcatcgaacaccagaaggtggtgaagggcaaccagaagagactggagagcctgcgggagctggccggcaaggaaaacctggaataccctagcgtgaccctgccacctcagcctcacaccaaggagggcgttgatgcctacaacgaagtgatcgcccgggtgcgaatgtgggtgaacctgaacctgtggcagaagctgaagctaagcagagatgatgccaagcctctgctgagactgaagggattcccttcctttcctctggtcgagagacaggccaacgaagtggactggtgggacatggtgtgtaacgtgaagaagctgatcaacgagaaaaaggaggatggcaaggtgttttggcagaatctggctggctacaagagacaggaagccctgagaccatacctgagcagcgaggaagatcggaagaagggaaagaaattcgctcggtaccagctgggcgacctgctgctgcacctggaaaagaagcacggcgaggactggggaaaggtgtacgacgaggcctgggagcggattgacaagaaagtggaaggcctgagcaagcacatcaagctggaagaggaacggagaagcgaggacgcccagagcaaggccgccctgaccgactggctgcgggctaaggccagcttcgtgatcgagggcctgaaggaggccgacaaggacgagttctgcagatgcgagctgaagctgcagaagtggtacggggacctgcggggaaagcccttcgccatcgaagccgagaacagcatcctggacatcagcggcttcagcaagcagtacaactgtgccttcatctggcagaaggacggcgtgaagaagctgaacctgtacctgatcatcaactacttcaagggcggcaagctgcggttcaagaagatcaaacctgaagccttcgaagccaacagattctacaccgtgatcaacaaaaagagcggcgagatcgtgcccatggaggtgaacttcaacttcgacgaccccaacctgatcatcctgcctctggcctttggcaagagacagggcagagaattcatctggaacgacctgctgtccctggaaaccggcagcctgaagctggccaacggaagagtgatcgagaagacactgtacaacagaagaacccggcaggatgagcctgccctgttcgtggccctgaccttcgagcggcgggaggtcctggactcctccaatatcaaaccaatgaacctgatcggcgtggcaagaggcgaaaacatccccgccgtgatcgccctgaccgaccccgagggctgcccactgagccggtttaaggatagcctgggaaacccaacccacatcctgagaatcggcgagagctataaggagaagcagcggaccatccaggccaagaaggaggtggagcagcggagagccggcggctacagccggaagtacgccagcaaagccaagaatctggcagacgatatggtgagaaacaccgctagagatctgctgtactacgccgtgacccaggatgccatgctgatcttcgccaacctgagccggggcttcggccggcagggcaagcggaccttcatggccgagagacagtacacacggatggaggactggctgaccgccaagctggcctacgagggcctgagcaagacctacctgtccaagacactggcccagtacacctccaagacatgcagcaactgtgggtttaccatcaccagcgccgactacgacagggtgctggagaagctgaagaagacagcaacaggctggatgaccacaattaacggcaaggagctgaaggtggagggccagattacctactacaacagatacaagagacagaacgtagtcaaggacctgtccgtcgagctggatagactgagcgaagaatctgtgaacaacgacatctcctcctggacaaagggcagaagcggagaagctctgagcctcctgaagaaaagattctcccatagacccgtgcaggagaagttcgtgtgcctgaactgcggcttcgagacacacgcagccgagcaagccgccctgaacatcgccagatcctggctgttcctgcggagccaggagtacaagaaataccagacaaacaagacaaccggcaacaccgataagagagccttcgtcgagacctggcagtccttttaccggaagaagcttaaggaggtgtggaaacctgccgtgcggtctggcggatctggcggaggctccaccagccccaagaaaaagagaaaagtctaagctgccttctgcggggcttgccttctggccatgcccttcttctctcccttgcacctgtacctcttggtctttgaataaagcctgagtaggaaggctagcaaaaaaaaaaaaaaaaaaaaaaaaaaaaaaaaaaaaaaaaaaaaaaaaaaaaaaaaaaaaaaaaaaaaaaaaaaaaaaaagcccagccggctccccaacctctaccgaggagggcacctctgagtccgccacccccgagagcggccctggcacctccaccgagcccagcgagggcagcgcacccggcagccctgccggcagccccacctccacagaggagggaaccagcaccgagcccagcgaaggcagcgccccaggcaccagcaccgagcctagtgagcaggagattaaacggatcaacaagatcagaagaagacttgtgaaagacagcaacaccaagaaggccggcaagacaggccccatgaaaaccctgctggttagagtgatgacacccgatctgagagagcggctggaaaacctgagaaagaagcctgaaaatatcccccagcccatcagcaatacatctagagccaacctgaataagctgctgaccgattacaccgaaatgaagaaggcgatcctgcatgtgtactgggaagagttccagaaggaccctgtgggcctgatgagccgggtggcccagcctgccagcaagaagatcgatcagaacaagctgaaacctgagatggacgagaagggcaacctgaccaccgccggctttgcctgctctcagtgtggccagcccctgttcgtgtacaagctggagcaggtgtctgagaagggcaaggcttacaccaactacttcggacggtgcaatgtggccgagcacgaaaagctgatcctgctggcccagctgaagcccgagaaggatagcgacgaagccgtgacatatagcctgggaaagtttgggcagagggccctggatttctacagcattcatgtgaccaaggagtccacccaccccgtgaagcccctggcccagatcgccggaaacagatacgcctccggacctgtgggaaaggccctgagcgacgcatgtatgggcacaatcgcctccttcctgtctaagtaccaggacatcatcatcgaacaccagaaggtggtgaagggcaaccagaagagactggagagcctgcgggagctggccggcaaggaaaacctggaataccctagcgtgaccctgccacctcagcctcacaccaaggagggcgttgatgcctacaacgaagtgatcgcccgggtgcgaatgtgggtgaacctgaacctgtggcagaagctgaagctaagcagagatgatgccaagcctctgctgagactgaagggattcccttcctttcctctggtcgagagacaggccaacgaagtggactggtgggacatggtgtgtaacgtgaagaagctgatcaacgagaaaaaggaggatggcaaggtgttttggcagaatctggctggctacaagagacaggaagccctgagaccatacctgagcagcgaggaagatcggaagaagggaaagaaattcgctcggtaccagctgggcgacctgctgctgcacctggaaaagaagcacggcgaggactggggaaaggtgtacgacgaggcctgggagcggattgacaagaaagtggaaggcctgagcaagcacatcaagctggaagaggaacggagaagcgaggacgcccagagcaaggccgccctgaccgactggctgcgggctaaggccagcttcgtgatcgagggcctgaaggaggccgacaaggacgagttctgcagatgcgagctgaagctgcagaagtggtacggggacctgcggggaaagcccttcgccatcgaagccgagaacagcatcctggacatcagcggcttcagcaagcagtacaactgtgccttcatctggcagaaggacggcgtgaagaagctgaacctgtacctgatcatcaactacttcaagggcggcaagctgcggttcaagaagatcaaacctgaagccttcgaagccaacagattctacaccgtgatcaacaaaaagagcggcgagatcgtgcccatggaggtgaacttcaacttcgacgaccccaacctgatcatcctgcctctggcctttggcaagagacagggcagagaattcatctggaacgacctgctgtccctggaaaccggcagcctgaagctggccaacggaagagtgatcgagaagacactgtacaacagaagaacccggcaggatgagcctgccctgttcgtggccctgaccttcgagcggcgggaggtcctggactcctccaatatcaaaccaatgaacctgatcggcgtggcaagaggcgaaaacatccccgccgtgatcgccctgaccgaccccgagggctgcccactgagccggtttaaggatagcctgggaaacccaacccacatcctgagaatcggcgagagctataaggagaagcagcggaccatccaggccaagaaggaggtggagcagcggagagccggcggctacagccggaagtacgccagcaaagccaagaatctggcagacgatatggtgagaaacaccgctagagatctgctgtactacgccgtgacccaggatgccatgctgatcttcgccaacctgagccggggcttcggccggcagggcaagcggaccttcatggccgagagacagtacacacggatggaggactggctgaccgccaagctggcctacgagggcctgagcaagacctacctgtccaagacactggcccagtacacctccaagacatgcagcaactgtgggtttaccatcaccagcgccgactacgacagggtgctggagaagctgaagaagacagcaacaggctggatgaccacaattaacggcaaggagctgaaggtggagggccagattacctactacaacagatacaagagacagaacgtagtcaaggacctgtccgtcgagctggatagactgagcgaagaatctgtgaacaacgacatctcctcctggacaaagggcagaagcggagaagctctgagcctcctgaagaaaagattctcccatagacccgtgcaggagaagttcgtgtgcctgaactgcggcttcgagacacacgcagccgagcaagccgccctgaacatcgccagatcctggctgttcctgcggagccaggagtacaagaaataccagacaaacaagacaaccggcaacaccgataagagagccttcgtcgagacctggcagtccttttaccggaagaagcttaaggaggtgtggaaacctgccgtgcggtctggcggatctggcggaggctccaccagccccaagaaaaagagaaaagtctaagctgccttctgcggggcttgccttctggccatgcccttcttctctcccttgcacctgtacctcttggtctttgaataaagcctgagtaggaaggctagcaaaaaaaaaaaaaaaaaaaaaaaaaaaaaaaaaaaaaaaaaaaaaaaaaaaaaaaaaaaaaaaaaaaaaaaaaaaaaaaa

SEQ ID NO: 10465 - RNA, 8787 nt, synthetic construct
  source 1..8787: mol_type = other RNA
aggaaataagagagaaaagaagagtaagaagaaatataagagccaccatggcccctaagaagaagcgtaaagtgagccggatgaaccacgaccaggagttcgacccccctaaggtgtaccctcccgtccccgccgagaagagaaagcccatccgggtcctgagcctgttcgatggcatcgccaccggtctgctggtgctgaaggacctgggcatccaggtggataggtacattgcctccgaggtgtgcgaggactccatcaccgtgggaatggtgcgtcatcagggcaagatcatgtacgtgggcgacgtgcggagcgtgacacagaagcatatccaggagtggggccctttcgacctggtgatcggcggcagcccttgcaatgacctgagcatcgtgaacccagcccggaagggcctgtacgagggaaccggcagactgttcttcgagttttacagactgctgcacgacgcccggcctaaggaaggcgacgaccggcccttcttttggctgttcgagaatgtggtggccatgggagtcagcgacaagcgggatattagccggttcctggagagcaaccccgtgatgatcgatgccaaggaagtgagcgccgcccaccgggccagatacttctggggcaatctgcctggcatgaacagacccctggccagcaccgtgaacgacaagctggagctgcaggagtgcctggagcacggccggatcgccaagttcagcaaggtgagaaccatcaccacccgaagcaacagcatcaaacaaggcaaggaccagcactttcctgtgttcatgaacgagaaggaggacatcctgtggtgtaccgagatggagagagtgttcgggttcccagtccactacacagatgtcagcaacatgtctagactggccagacagagactgctgggaagaagctggtccgtccctgtgatcagacacctgttcgcccctctgaaggagtacttcgcctgcgtgagcagcggcaacagcaacgccaacagccggggccccagcttctctagcggcctggtgccactgtccctgagagggagccacatgggccccatggagatctacaaaaccgtgagcgcctggaagcggcagcctgtgcgcgtgctgagcctgtttcggaatatcgataaagtcctgaaaagcctgggattcctggagagcggctctggctccggcggtggcaccctgaagtacgtggaggatgtgacaaacgtggtcagacgggatgtggagaagtggggccccttcgatctggtgtacggcagcacccaacccctgggcagctcttgtgaccggtgccctggctggtacatgtttcagttccaccggatcctgcagtacgccctgccgagacaggagtcccagcggccattcttttggattttcatggacaacttgctgctgaccgaggatgaccaggaaactaccactcggttcctgcagaccgaagccgtgaccctgcaggacgtgagaggccgggactaccagaacgccatgcgggtgtggtccaacatccctggactgaaaagcaagcacgcacctctgacccctaaagaagaggagtacctgcaggcccaggtgcggagcagaagcaagctggacgcccctaaggtggatctgctggtgaagaattgcctcctgcccctgagagagtacttcaagtatttcagccagaatagtctgcccctgggaggcagcggcggcggcggcgccagggtgctggtgagcttcgccgacgtggccgtgtacttcagccccgaggagtggggcaggctgaggcccgagcagagggccctgtacagggacgtgatgagggagacctacggccacctgggcgccctgggcttccccggccccaagcccgccctgatcagctggatggaggaggccgcctgggacagcgaggccaagcccgtgatcaagaggctggaggacgtgggccagccccccggcggcccaagcagcggcgcccctcctcccagcggcggcaggcggcccaagcagcggcgcccctcctcccagcggcggcagcccagccggctccccaacctctaccgaggagggcacctctgagtccgccacccccgagagcggccctggcacctccaccgagcccagcgagggcagcgcacccggcagccctgccggcagccccacctccacagaggagggaaccagcaccgagcccagcgaaggcagcgccccaggcaccagcaccgagcctagtgagcaggagattaaacggatcaacaagatcagaagaagacttgtgaaagacagcaacaccaagaaggccggcaagacaggccccatgaaaaccctgctggttagagtgatgacacccgatctgagagagcggctggaaaacctgagaaagaagcctgaaaatatcccccagcccatcagcaatacatctagagccaacctgaataagctgctgaccgattacaccgaaatgaagaaggcgatcctgcatgtgtactgggaagagttccagaaggaccctgtgggcctgatgagccgggtggcccagcctgccagcaagaagatcgatcagaacaagctgaaacctgagatggacgagaagggcaacctgaccaccgccggctttgcctgctctcagtgtggccagcccctgttcgtgtacaagctggagcaggtgtctgagaagggcaaggcttacaccaactacttcggacggtgcaatgtggccgagcacgaaaagctgatcctgctggcccagctgaagcccgagaaggatagcgacgaagccgtgacatatagcctgggaaagtttgggcagagggccctggatttctacagcattcatgtgaccaaggagtccacccaccccgtgaagcccctggcccagatcgccggaaacagatacgcctccggacctgtgggaaaggccctgagcgacgcatgtatgggcacaatcgcctccttcctgtctaagtaccaggacatcatcatcgaacaccagaaggtggtgaagggcaaccagaagagactggagagcctgcgggagctggccggcaaggaaaacctggaataccctagcgtgaccctgccacctcagcctcacaccaaggagggcgttgatgcctacaacgaagtgatcgcccgggtgcgaatgtgggtgaacctgaacctgtggcagaagctgaagctaagcagagatgatgccaagcctctgctgagactgaagggattcccttcctttcctctggtcgagagacaggccaacgaagtggactggtgggacatggtgtgtaacgtgaagaagctgatcaacgagaaaaaggaggatggcaaggtgttttggcagaatctggctggctacaagagacaggaagccctgagaccatacctgagcagcgaggaagatcggaagaagggaaagaaattcgctcggtaccagctgggcgacctgctgctgcacctggaaaagaagcacggcgaggactggggaaaggtgtacgacgaggcctgggagcggattgacaagaaagtggaaggcctgagcaagcacatcaagctggaagaggaacggagaagcgaggacgcccagagcaaggccgccctgaccgactggctgcgggctaaggccagcttcgtgatcgagggcctgaaggaggccgacaaggacgagttctgcagatgcgagctgaagctgcagaagtggtacggggacctgcggggaaagcccttcgccatcgaagccgagaacagcatcctggacatcagcggcttcagcaagcagtacaactgtgccttcatctggcagaaggacggcgtgaagaagctgaacctgtacctgatcatcaactacttcaagggcggcaagctgcggttcaagaagatcaaacctgaagccttcgaagccaacagattctacaccgtgatcaacaaaaagagcggcgagatcgtgcccatggaggtgaacttcaacttcgacgaccccaacctgatcatcctgcctctggcctttggcaagagacagggcagagaattcatctggaacgacctgctgtccctggaaaccggcagcctgaagctggccaacggaagagtgatcgagaagacactgtacaacagaagaacccggcaggatgagcctgccctgttcgtggccctgaccttcgagcggcgggaggtcctggactcctccaatatcaaaccaatgaacctgatcggcgtggcaagaggcgaaaacatccccgccgtgatcgccctgaccgaccccgagggctgcccactgagccggtttaaggatagcctgggaaacccaacccacatcctgagaatcggcgagagctataaggagaagcagcggaccatccaggccaagaaggaggtggagcagcggagagccggcggctacagccggaagtacgccagcaaagccaagaatctggcagacgatatggtgagaaacaccgctagagatctgctgtactacgccgtgacccaggatgccatgctgatcttcgccaacctgagccggggcttcggccggcagggcaagcggaccttcatggccgagagacagtacacacggatggaggactggctgaccgccaagctggcctacgagggcctgagcaagacctacctgtccaagacactggcccagtacacctccaagacatgcagcaactgtgggtttaccatcaccagcgccgactacgacagggtgctggagaagctgaagaagacagcaacaggctggatgaccacaattaacggcaaggagctgaaggtggagggccagattacctactacaacagatacaagagacagaacgtagtcaaggacctgtccgtcgagctggatagactgagcgaagaatctgtgaacaacgacatctcctcctggacaaagggcagaagcggagaagctctgagcctcctgaagaaaagattctcccatagacccgtgcaggagaagttcgtgtgcctgaactgcggcttcgagacacacgcagccgagcaagccgccctgaacatcgccagatcctggctgttcctgcggagccaggagtacaagaaataccagacaaacaagacaaccggcaacaccgataagagagccttcgtcgagacctggcagtccttttaccggaagaagcttaaggaggtgtggaaacctgccgtgcggtctggcggatctggcggaggctccaccagccccaagaaaaagagaaaagtctaagctgccttctgcggggcttgccttctggccatgcccttcttctctcccttgcacctgtacctcttggtctttgaataaagcctgagtaggaaggctagcaaaaaaaaaaaaaaaaaaaaaaaaaaaaaaaaaaaaaaaaaaaaaaaaaaaaaaaaaaaaaaaaaaaaaaaaaaaaaaaagcccagccggctccccaacctctaccgaggagggcacctctgagtccgccacccccgagagcggccctggcacctccaccgagcccagcgagggcagcgcacccggcagccctgccggcagccccacctccacagaggagggaaccagcaccgagcccagcgaaggcagcgccccaggcaccagcaccgagcctagtgagcaggagattaaacggatcaacaagatcagaagaagacttgtgaaagacagcaacaccaagaaggccggcaagacaggccccatgaaaaccctgctggttagagtgatgacacccgatctgagagagcggctggaaaacctgagaaagaagcctgaaaatatcccccagcccatcagcaatacatctagagccaacctgaataagctgctgaccgattacaccgaaatgaagaaggcgatcctgcatgtgtactgggaagagttccagaaggaccctgtgggcctgatgagccgggtggcccagcctgccagcaagaagatcgatcagaacaagctgaaacctgagatggacgagaagggcaacctgaccaccgccggctttgcctgctctcagtgtggccagcccctgttcgtgtacaagctggagcaggtgtctgagaagggcaaggcttacaccaactacttcggacggtgcaatgtggccgagcacgaaaagctgatcctgctggcccagctgaagcccgagaaggatagcgacgaagccgtgacatatagcctgggaaagtttgggcagagggccctggatttctacagcattcatgtgaccaaggagtccacccaccccgtgaagcccctggcccagatcgccggaaacagatacgcctccggacctgtgggaaaggccctgagcgacgcatgtatgggcacaatcgcctccttcctgtctaagtaccaggacatcatcatcgaacaccagaaggtggtgaagggcaaccagaagagactggagagcctgcgggagctggccggcaaggaaaacctggaataccctagcgtgaccctgccacctcagcctcacaccaaggagggcgttgatgcctacaacgaagtgatcgcccgggtgcgaatgtgggtgaacctgaacctgtggcagaagctgaagctaagcagagatgatgccaagcctctgctgagactgaagggattcccttcctttcctctggtcgagagacaggccaacgaagtggactggtgggacatggtgtgtaacgtgaagaagctgatcaacgagaaaaaggaggatggcaaggtgttttggcagaatctggctggctacaagagacaggaagccctgagaccatacctgagcagcgaggaagatcggaagaagggaaagaaattcgctcggtaccagctgggcgacctgctgctgcacctggaaaagaagcacggcgaggactggggaaaggtgtacgacgaggcctgggagcggattgacaagaaagtggaaggcctgagcaagcacatcaagctggaagaggaacggagaagcgaggacgcccagagcaaggccgccctgaccgactggctgcgggctaaggccagcttcgtgatcgagggcctgaaggaggccgacaaggacgagttctgcagatgcgagctgaagctgcagaagtggtacggggacctgcggggaaagcccttcgccatcgaagccgagaacagcatcctggacatcagcggcttcagcaagcagtacaactgtgccttcatctggcagaaggacggcgtgaagaagctgaacctgtacctgatcatcaactacttcaagggcggcaagctgcggttcaagaagatcaaacctgaagccttcgaagccaacagattctacaccgtgatcaacaaaaagagcggcgagatcgtgcccatggaggtgaacttcaacttcgacgaccccaacctgatcatcctgcctctggcctttggcaagagacagggcagagaattcatctggaacgacctgctgtccctggaaaccggcagcctgaagctggccaacggaagagtgatcgagaagacactgtacaacagaagaacccggcaggatgagcctgccctgttcgtggccctgaccttcgagcggcgggaggtcctggactcctccaatatcaaaccaatgaacctgatcggcgtggcaagaggcgaaaacatccccgccgtgatcgccctgaccgaccccgagggctgcccactgagccggtttaaggatagcctgggaaacccaacccacatcctgagaatcggcgagagctataaggagaagcagcggaccatccaggccaagaaggaggtggagcagcggagagccggcggctacagccggaagtacgccagcaaagccaagaatctggcagacgatatggtgagaaacaccgctagagatctgctgtactacgccgtgacccaggatgccatgctgatcttcgccaacctgagccggggcttcggccggcagggcaagcggaccttcatggccgagagacagtacacacggatggaggactggctgaccgccaagctggcctacgagggcctgagcaagacctacctgtccaagacactggcccagtacacctccaagacatgcagcaactgtgggtttaccatcaccagcgccgactacgacagggtgctggagaagctgaagaagacagcaacaggctggatgaccacaattaacggcaaggagctgaaggtggagggccagattacctactacaacagatacaagagacagaacgtagtcaaggacctgtccgtcgagctggatagactgagcgaagaatctgtgaacaacgacatctcctcctggacaaagggcagaagcggagaagctctgagcctcctgaagaaaagattctcccatagacccgtgcaggagaagttcgtgtgcctgaactgcggcttcgagacacacgcagccgagcaagccgccctgaacatcgccagatcctggctgttcctgcggagccaggagtacaagaaataccagacaaacaagacaaccggcaacaccgataagagagccttcgtcgagacctggcagtccttttaccggaagaagcttaaggaggtgtggaaacctgccgtgcggtctggcggatctggcggaggctccaccagccccaagaaaaagagaaaagtctaagctgccttctgcggggcttgccttctggccatgcccttcttctctcccttgcacctgtacctcttggtctttgaataaagcctgagtaggaaggctagcaaaaaaaaaaaaaaaaaaaaaaaaaaaaaaaaaaaaaaaaaaaaaaaaaaaaaaaaaaaaaaaaaaaaaaaaaaaaaaaa

SEQ ID NO: 10466 - RNA, 8787 nt, synthetic construct
  source 1..8787: mol_type = other RNA
aggaaataagagagaaaagaagagtaagaagaaatataagagccaccatggcccctaagaagaagcgtaaagtgagccggatgaaccacgaccaggagttcgacccccctaaggtgtaccctcccgtccccgccgagaagagaaagcccatccgggtcctgagcctgttcgatggcatcgccaccggtctgctggtgctgaaggacctgggcatccaggtggataggtacattgcctccgaggtgtgcgaggactccatcaccgtgggaatggtgcgtcatcagggcaagatcatgtacgtgggcgacgtgcggagcgtgacacagaagcatatccaggagtggggccctttcgacctggtgatcggcggcagcccttgcaatgacctgagcatcgtgaacccagcccggaagggcctgtacgagggaaccggcagactgttcttcgagttttacagactgctgcacgacgcccggcctaaggaaggcgacgaccggcccttcttttggctgttcgagaatgtggtggccatgggagtcagcgacaagcgggatattagccggttcctggagagcaaccccgtgatgatcgatgccaaggaagtgagcgccgcccaccgggccagatacttctggggcaatctgcctggcatgaacagacccctggccagcaccgtgaacgacaagctggagctgcaggagtgcctggagcacggccggatcgccaagttcagcaaggtgagaaccatcaccacccgaagcaacagcatcaaacaaggcaaggaccagcactttcctgtgttcatgaacgagaaggaggacatcctgtggtgtaccgagatggagagagtgttcgggttcccagtccactacacagatgtcagcaacatgtctagactggccagacagagactgctgggaagaagctggtccgtccctgtgatcagacacctgttcgcccctctgaaggagtacttcgcctgcgtgagcagcggcaacagcaacgccaacagccggggccccagcttctctagcggcctggtgccactgtccctgagagggagccacatgggccccatggagatctacaaaaccgtgagcgcctggaagcggcagcctgtgcgcgtgctgagcctgtttcggaatatcgataaagtcctgaaaagcctgggattcctggagagcggctctggctccggcggtggcaccctgaagtacgtggaggatgtgacaaacgtggtcagacgggatgtggagaagtggggccccttcgatctggtgtacggcagcacccaacccctgggcagctcttgtgaccggtgccctggctggtacatgtttcagttccaccggatcctgcagtacgccctgccgagacaggagtcccagcggccattcttttggattttcatggacaacttgctgctgaccgaggatgaccaggaaactaccactcggttcctgcagaccgaagccgtgaccctgcaggacgtgagaggccgggactaccagaacgccatgcgggtgtggtccaacatccctggactgaaaagcaagcacgcacctctgacccctaaagaagaggagtacctgcaggcccaggtgcggagcagaagcaagctggacgcccctaaggtggatctgctggtgaagaattgcctcctgcccctgagagagtacttcaagtatttcagccagaatagtctgcccctgggaggcagcggcggcggcgcccagaaggtgctgaccttcagggacgtggccatcgagttcagcctggaggagtggaagttcctggaccccgcccagcagaacctgtacagggacgtgatgctggagaactacaggaacctgttcagcatcggcctgaccgtgagcaagcccggcctgatcacctgcctggagcagaggaaggccccctggaacctgaagaggagggaggccgtggacggccaccccgccatgagcagccacggcggcccaagcagcggcgcccctcctcccagcggcggcaggcggcccaagcagcggcgcccctcctcccagcggcggcagcccagccggctccccaacctctaccgaggagggcacctctgagtccgccacccccgagagcggccctggcacctccaccgagcccagcgagggcagcgcacccggcagccctgccggcagccccacctccacagaggagggaaccagcaccgagcccagcgaaggcagcgccccaggcaccagcaccgagcctagtgagcaggagattaaacggatcaacaagatcagaagaagacttgtgaaagacagcaacaccaagaaggccggcaagacaggccccatgaaaaccctgctggttagagtgatgacacccgatctgagagagcggctggaaaacctgagaaagaagcctgaaaatatcccccagcccatcagcaatacatctagagccaacctgaataagctgctgaccgattacaccgaaatgaagaaggcgatcctgcatgtgtactgggaagagttccagaaggaccctgtgggcctgatgagccgggtggcccagcctgccagcaagaagatcgatcagaacaagctgaaacctgagatggacgagaagggcaacctgaccaccgccggctttgcctgctctcagtgtggccagcccctgttcgtgtacaagctggagcaggtgtctgagaagggcaaggcttacaccaactacttcggacggtgcaatgtggccgagcacgaaaagctgatcctgctggcccagctgaagcccgagaaggatagcgacgaagccgtgacatatagcctgggaaagtttgggcagagggccctggatttctacagcattcatgtgaccaaggagtccacccaccccgtgaagcccctggcccagatcgccggaaacagatacgcctccggacctgtgggaaaggccctgagcgacgcatgtatgggcacaatcgcctccttcctgtctaagtaccaggacatcatcatcgaacaccagaaggtggtgaagggcaaccagaagagactggagagcctgcgggagctggccggcaaggaaaacctggaataccctagcgtgaccctgccacctcagcctcacaccaaggagggcgttgatgcctacaacgaagtgatcgcccgggtgcgaatgtgggtgaacctgaacctgtggcagaagctgaagctaagcagagatgatgccaagcctctgctgagactgaagggattcccttcctttcctctggtcgagagacaggccaacgaagtggactggtgggacatggtgtgtaacgtgaagaagctgatcaacgagaaaaaggaggatggcaaggtgttttggcagaatctggctggctacaagagacaggaagccctgagaccatacctgagcagcgaggaagatcggaagaagggaaagaaattcgctcggtaccagctgggcgacctgctgctgcacctggaaaagaagcacggcgaggactggggaaaggtgtacgacgaggcctgggagcggattgacaagaaagtggaaggcctgagcaagcacatcaagctggaagaggaacggagaagcgaggacgcccagagcaaggccgccctgaccgactggctgcgggctaaggccagcttcgtgatcgagggcctgaaggaggccgacaaggacgagttctgcagatgcgagctgaagctgcagaagtggtacggggacctgcggggaaagcccttcgccatcgaagccgagaacagcatcctggacatcagcggcttcagcaagcagtacaactgtgccttcatctggcagaaggacggcgtgaagaagctgaacctgtacctgatcatcaactacttcaagggcggcaagctgcggttcaagaagatcaaacctgaagccttcgaagccaacagattctacaccgtgatcaacaaaaagagcggcgagatcgtgcccatggaggtgaacttcaacttcgacgaccccaacctgatcatcctgcctctggcctttggcaagagacagggcagagaattcatctggaacgacctgctgtccctggaaaccggcagcctgaagctggccaacggaagagtgatcgagaagacactgtacaacagaagaacccggcaggatgagcctgccctgttcgtggccctgaccttcgagcggcgggaggtcctggactcctccaatatcaaaccaatgaacctgatcggcgtggcaagaggcgaaaacatccccgccgtgatcgccctgaccgaccccgagggctgcccactgagccggtttaaggatagcctgggaaacccaacccacatcctgagaatcggcgagagctataaggagaagcagcggaccatccaggccaagaaggaggtggagcagcggagagccggcggctacagccggaagtacgccagcaaagccaagaatctggcagacgatatggtgagaaacaccgctagagatctgctgtactacgccgtgacccaggatgccatgctgatcttcgccaacctgagccggggcttcggccggcagggcaagcggaccttcatggccgagagacagtacacacggatggaggactggctgaccgccaagctggcctacgagggcctgagcaagacctacctgtccaagacactggcccagtacacctccaagacatgcagcaactgtgggtttaccatcaccagcgccgactacgacagggtgctggagaagctgaagaagacagcaacaggctggatgaccacaattaacggcaaggagctgaaggtggagggccagattacctactacaacagatacaagagacagaacgtagtcaaggacctgtccgtcgagctggatagactgagcgaagaatctgtgaacaacgacatctcctcctggacaaagggcagaagcggagaagctctgagcctcctgaagaaaagattctcccatagacccgtgcaggagaagttcgtgtgcctgaactgcggcttcgagacacacgcagccgagcaagccgccctgaacatcgccagatcctggctgttcctgcggagccaggagtacaagaaataccagacaaacaagacaaccggcaacaccgataagagagccttcgtcgagacctggcagtccttttaccggaagaagcttaaggaggtgtggaaacctgccgtgcggtctggcggatctggcggaggctccaccagccccaagaaaaagagaaaagtctaagctgccttctgcggggcttgccttctggccatgcccttcttctctcccttgcacctgtacctcttggtctttgaataaagcctgagtaggaaggctagcaaaaaaaaaaaaaaaaaaaaaaaaaaaaaaaaaaaaaaaaaaaaaaaaaaaaaaaaaaaaaaaaaaaaaaaaaaaaaaaagcccagccggctccccaacctctaccgaggagggcacctctgagtccgccacccccgagagcggccctggcacctccaccgagcccagcgagggcagcgcacccggcagccctgccggcagccccacctccacagaggagggaaccagcaccgagcccagcgaaggcagcgccccaggcaccagcaccgagcctagtgagcaggagattaaacggatcaacaagatcagaagaagacttgtgaaagacagcaacaccaagaaggccggcaagacaggccccatgaaaaccctgctggttagagtgatgacacccgatctgagagagcggctggaaaacctgagaaagaagcctgaaaatatcccccagcccatcagcaatacatctagagccaacctgaataagctgctgaccgattacaccgaaatgaagaaggcgatcctgcatgtgtactgggaagagttccagaaggaccctgtgggcctgatgagccgggtggcccagcctgccagcaagaagatcgatcagaacaagctgaaacctgagatggacgagaagggcaacctgaccaccgccggctttgcctgctctcagtgtggccagcccctgttcgtgtacaagctggagcaggtgtctgagaagggcaaggcttacaccaactacttcggacggtgcaatgtggccgagcacgaaaagctgatcctgctggcccagctgaagcccgagaaggatagcgacgaagccgtgacatatagcctgggaaagtttgggcagagggccctggatttctacagcattcatgtgaccaaggagtccacccaccccgtgaagcccctggcccagatcgccggaaacagatacgcctccggacctgtgggaaaggccctgagcgacgcatgtatgggcacaatcgcctccttcctgtctaagtaccaggacatcatcatcgaacaccagaaggtggtgaagggcaaccagaagagactggagagcctgcgggagctggccggcaaggaaaacctggaataccctagcgtgaccctgccacctcagcctcacaccaaggagggcgttgatgcctacaacgaagtgatcgcccgggtgcgaatgtgggtgaacctgaacctgtggcagaagctgaagctaagcagagatgatgccaagcctctgctgagactgaagggattcccttcctttcctctggtcgagagacaggccaacgaagtggactggtgggacatggtgtgtaacgtgaagaagctgatcaacgagaaaaaggaggatggcaaggtgttttggcagaatctggctggctacaagagacaggaagccctgagaccatacctgagcagcgaggaagatcggaagaagggaaagaaattcgctcggtaccagctgggcgacctgctgctgcacctggaaaagaagcacggcgaggactggggaaaggtgtacgacgaggcctgggagcggattgacaagaaagtggaaggcctgagcaagcacatcaagctggaagaggaacggagaagcgaggacgcccagagcaaggccgccctgaccgactggctgcgggctaaggccagcttcgtgatcgagggcctgaaggaggccgacaaggacgagttctgcagatgcgagctgaagctgcagaagtggtacggggacctgcggggaaagcccttcgccatcgaagccgagaacagcatcctggacatcagcggcttcagcaagcagtacaactgtgccttcatctggcagaaggacggcgtgaagaagctgaacctgtacctgatcatcaactacttcaagggcggcaagctgcggttcaagaagatcaaacctgaagccttcgaagccaacagattctacaccgtgatcaacaaaaagagcggcgagatcgtgcccatggaggtgaacttcaacttcgacgaccccaacctgatcatcctgcctctggcctttggcaagagacagggcagagaattcatctggaacgacctgctgtccctggaaaccggcagcctgaagctggccaacggaagagtgatcgagaagacactgtacaacagaagaacccggcaggatgagcctgccctgttcgtggccctgaccttcgagcggcgggaggtcctggactcctccaatatcaaaccaatgaacctgatcggcgtggcaagaggcgaaaacatccccgccgtgatcgccctgaccgaccccgagggctgcccactgagccggtttaaggatagcctgggaaacccaacccacatcctgagaatcggcgagagctataaggagaagcagcggaccatccaggccaagaaggaggtggagcagcggagagccggcggctacagccggaagtacgccagcaaagccaagaatctggcagacgatatggtgagaaacaccgctagagatctgctgtactacgccgtgacccaggatgccatgctgatcttcgccaacctgagccggggcttcggccggcagggcaagcggaccttcatggccgagagacagtacacacggatggaggactggctgaccgccaagctggcctacgagggcctgagcaagacctacctgtccaagacactggcccagtacacctccaagacatgcagcaactgtgggtttaccatcaccagcgccgactacgacagggtgctggagaagctgaagaagacagcaacaggctggatgaccacaattaacggcaaggagctgaaggtggagggccagattacctactacaacagatacaagagacagaacgtagtcaaggacctgtccgtcgagctggatagactgagcgaagaatctgtgaacaacgacatctcctcctggacaaagggcagaagcggagaagctctgagcctcctgaagaaaagattctcccatagacccgtgcaggagaagttcgtgtgcctgaactgcggcttcgagacacacgcagccgagcaagccgccctgaacatcgccagatcctggctgttcctgcggagccaggagtacaagaaataccagacaaacaagacaaccggcaacaccgataagagagccttcgtcgagacctggcagtccttttaccggaagaagcttaaggaggtgtggaaacctgccgtgcggtctggcggatctggcggaggctccaccagccccaagaaaaagagaaaagtctaagctgccttctgcggggcttgccttctggccatgcccttcttctctcccttgcacctgtacctcttggtctttgaataaagcctgagtaggaaggctagcaaaaaaaaaaaaaaaaaaaaaaaaaaaaaaaaaaaaaaaaaaaaaaaaaaaaaaaaaaaaaaaaaaaaaaaaaaaaaaaa

SEQ ID NO: 10467 - RNA, 8787 nt, synthetic construct
  source 1..8787: mol_type = other RNA
aggaaataagagagaaaagaagagtaagaagaaatataagagccaccatggcccctaagaagaagcgtaaagtgagccggatgaaccacgaccaggagttcgacccccctaaggtgtaccctcccgtccccgccgagaagagaaagcccatccgggtcctgagcctgttcgatggcatcgccaccggtctgctggtgctgaaggacctgggcatccaggtggataggtacattgcctccgaggtgtgcgaggactccatcaccgtgggaatggtgcgtcatcagggcaagatcatgtacgtgggcgacgtgcggagcgtgacacagaagcatatccaggagtggggccctttcgacctggtgatcggcggcagcccttgcaatgacctgagcatcgtgaacccagcccggaagggcctgtacgagggaaccggcagactgttcttcgagttttacagactgctgcacgacgcccggcctaaggaaggcgacgaccggcccttcttttggctgttcgagaatgtggtggccatgggagtcagcgacaagcgggatattagccggttcctggagagcaaccccgtgatgatcgatgccaaggaagtgagcgccgcccaccgggccagatacttctggggcaatctgcctggcatgaacagacccctggccagcaccgtgaacgacaagctggagctgcaggagtgcctggagcacggccggatcgccaagttcagcaaggtgagaaccatcaccacccgaagcaacagcatcaaacaaggcaaggaccagcactttcctgtgttcatgaacgagaaggaggacatcctgtggtgtaccgagatggagagagtgttcgggttcccagtccactacacagatgtcagcaacatgtctagactggccagacagagactgctgggaagaagctggtccgtccctgtgatcagacacctgttcgcccctctgaaggagtacttcgcctgcgtgagcagcggcaacagcaacgccaacagccggggccccagcttctctagcggcctggtgccactgtccctgagagggagccacatgggccccatggagatctacaaaaccgtgagcgcctggaagcggcagcctgtgcgcgtgctgagcctgtttcggaatatcgataaagtcctgaaaagcctgggattcctggagagcggctctggctccggcggtggcaccctgaagtacgtggaggatgtgacaaacgtggtcagacgggatgtggagaagtggggccccttcgatctggtgtacggcagcacccaacccctgggcagctcttgtgaccggtgccctggctggtacatgtttcagttccaccggatcctgcagtacgccctgccgagacaggagtcccagcggccattcttttggattttcatggacaacttgctgctgaccgaggatgaccaggaaactaccactcggttcctgcagaccgaagccgtgaccctgcaggacgtgagaggccgggactaccagaacgccatgcgggtgtggtccaacatccctggactgaaaagcaagcacgcacctctgacccctaaagaagaggagtacctgcaggcccaggtgcggagcagaagcaagctggacgcccctaaggtggatctgctggtgaagaattgcctcctgcccctgagagagtacttcaagtatttcagccagaatagtctgcccctgggaggcagcggcggcggcccccaggacctgatgaccttcgaggacgtggccgtggagttcacccagtgggagtggggccagctggaccccgcccagaaggacctgtacagggtggtgatgctggagaacttcaagaacctggccagcctgggcttccccgtggccaagccctacgtgatcagccagctggagaagggcaaggagccctgcgtgctggagggcgagatcagcaccgactgggagaagaggcccaaggccaagggcggcccaagcagcggcgcccctcctcccagcggcggcaggcggcccaagcagcggcgcccctcctcccagcggcggcagcccagccggctccccaacctctaccgaggagggcacctctgagtccgccacccccgagagcggccctggcacctccaccgagcccagcgagggcagcgcacccggcagccctgccggcagccccacctccacagaggagggaaccagcaccgagcccagcgaaggcagcgccccaggcaccagcaccgagcctagtgagcaggagattaaacggatcaacaagatcagaagaagacttgtgaaagacagcaacaccaagaaggccggcaagacaggccccatgaaaaccctgctggttagagtgatgacacccgatctgagagagcggctggaaaacctgagaaagaagcctgaaaatatcccccagcccatcagcaatacatctagagccaacctgaataagctgctgaccgattacaccgaaatgaagaaggcgatcctgcatgtgtactgggaagagttccagaaggaccctgtgggcctgatgagccgggtggcccagcctgccagcaagaagatcgatcagaacaagctgaaacctgagatggacgagaagggcaacctgaccaccgccggctttgcctgctctcagtgtggccagcccctgttcgtgtacaagctggagcaggtgtctgagaagggcaaggcttacaccaactacttcggacggtgcaatgtggccgagcacgaaaagctgatcctgctggcccagctgaagcccgagaaggatagcgacgaagccgtgacatatagcctgggaaagtttgggcagagggccctggatttctacagcattcatgtgaccaaggagtccacccaccccgtgaagcccctggcccagatcgccggaaacagatacgcctccggacctgtgggaaaggccctgagcgacgcatgtatgggcacaatcgcctccttcctgtctaagtaccaggacatcatcatcgaacaccagaaggtggtgaagggcaaccagaagagactggagagcctgcgggagctggccggcaaggaaaacctggaataccctagcgtgaccctgccacctcagcctcacaccaaggagggcgttgatgcctacaacgaagtgatcgcccgggtgcgaatgtgggtgaacctgaacctgtggcagaagctgaagctaagcagagatgatgccaagcctctgctgagactgaagggattcccttcctttcctctggtcgagagacaggccaacgaagtggactggtgggacatggtgtgtaacgtgaagaagctgatcaacgagaaaaaggaggatggcaaggtgttttggcagaatctggctggctacaagagacaggaagccctgagaccatacctgagcagcgaggaagatcggaagaagggaaagaaattcgctcggtaccagctgggcgacctgctgctgcacctggaaaagaagcacggcgaggactggggaaaggtgtacgacgaggcctgggagcggattgacaagaaagtggaaggcctgagcaagcacatcaagctggaagaggaacggagaagcgaggacgcccagagcaaggccgccctgaccgactggctgcgggctaaggccagcttcgtgatcgagggcctgaaggaggccgacaaggacgagttctgcagatgcgagctgaagctgcagaagtggtacggggacctgcggggaaagcccttcgccatcgaagccgagaacagcatcctggacatcagcggcttcagcaagcagtacaactgtgccttcatctggcagaaggacggcgtgaagaagctgaacctgtacctgatcatcaactacttcaagggcggcaagctgcggttcaagaagatcaaacctgaagccttcgaagccaacagattctacaccgtgatcaacaaaaagagcggcgagatcgtgcccatggaggtgaacttcaacttcgacgaccccaacctgatcatcctgcctctggcctttggcaagagacagggcagagaattcatctggaacgacctgctgtccctggaaaccggcagcctgaagctggccaacggaagagtgatcgagaagacactgtacaacagaagaacccggcaggatgagcctgccctgttcgtggccctgaccttcgagcggcgggaggtcctggactcctccaatatcaaaccaatgaacctgatcggcgtggcaagaggcgaaaacatccccgccgtgatcgccctgaccgaccccgagggctgcccactgagccggtttaaggatagcctgggaaacccaacccacatcctgagaatcggcgagagctataaggagaagcagcggaccatccaggccaagaaggaggtggagcagcggagagccggcggctacagccggaagtacgccagcaaagccaagaatctggcagacgatatggtgagaaacaccgctagagatctgctgtactacgccgtgacccaggatgccatgctgatcttcgccaacctgagccggggcttcggccggcagggcaagcggaccttcatggccgagagacagtacacacggatggaggactggctgaccgccaagctggcctacgagggcctgagcaagacctacctgtccaagacactggcccagtacacctccaagacatgcagcaactgtgggtttaccatcaccagcgccgactacgacagggtgctggagaagctgaagaagacagcaacaggctggatgaccacaattaacggcaaggagctgaaggtggagggccagattacctactacaacagatacaagagacagaacgtagtcaaggacctgtccgtcgagctggatagactgagcgaagaatctgtgaacaacgacatctcctcctggacaaagggcagaagcggagaagctctgagcctcctgaagaaaagattctcccatagacccgtgcaggagaagttcgtgtgcctgaactgcggcttcgagacacacgcagccgagcaagccgccctgaacatcgccagatcctggctgttcctgcggagccaggagtacaagaaataccagacaaacaagacaaccggcaacaccgataagagagccttcgtcgagacctggcagtccttttaccggaagaagcttaaggaggtgtggaaacctgccgtgcggtctggcggatctggcggaggctccaccagccccaagaaaaagagaaaagtctaagctgccttctgcggggcttgccttctggccatgcccttcttctctcccttgcacctgtacctcttggtctttgaataaagcctgagtaggaaggctagcaaaaaaaaaaaaaaaaaaaaaaaaaaaaaaaaaaaaaaaaaaaaaaaaaaaaaaaaaaaaaaaaaaaaaaaaaaaaaaaagcccagccggctccccaacctctaccgaggagggcacctctgagtccgccacccccgagagcggccctggcacctccaccgagcccagcgagggcagcgcacccggcagccctgccggcagccccacctccacagaggagggaaccagcaccgagcccagcgaaggcagcgccccaggcaccagcaccgagcctagtgagcaggagattaaacggatcaacaagatcagaagaagacttgtgaaagacagcaacaccaagaaggccggcaagacaggccccatgaaaaccctgctggttagagtgatgacacccgatctgagagagcggctggaaaacctgagaaagaagcctgaaaatatcccccagcccatcagcaatacatctagagccaacctgaataagctgctgaccgattacaccgaaatgaagaaggcgatcctgcatgtgtactgggaagagttccagaaggaccctgtgggcctgatgagccgggtggcccagcctgccagcaagaagatcgatcagaacaagctgaaacctgagatggacgagaagggcaacctgaccaccgccggctttgcctgctctcagtgtggccagcccctgttcgtgtacaagctggagcaggtgtctgagaagggcaaggcttacaccaactacttcggacggtgcaatgtggccgagcacgaaaagctgatcctgctggcccagctgaagcccgagaaggatagcgacgaagccgtgacatatagcctgggaaagtttgggcagagggccctggatttctacagcattcatgtgaccaaggagtccacccaccccgtgaagcccctggcccagatcgccggaaacagatacgcctccggacctgtgggaaaggccctgagcgacgcatgtatgggcacaatcgcctccttcctgtctaagtaccaggacatcatcatcgaacaccagaaggtggtgaagggcaaccagaagagactggagagcctgcgggagctggccggcaaggaaaacctggaataccctagcgtgaccctgccacctcagcctcacaccaaggagggcgttgatgcctacaacgaagtgatcgcccgggtgcgaatgtgggtgaacctgaacctgtggcagaagctgaagctaagcagagatgatgccaagcctctgctgagactgaagggattcccttcctttcctctggtcgagagacaggccaacgaagtggactggtgggacatggtgtgtaacgtgaagaagctgatcaacgagaaaaaggaggatggcaaggtgttttggcagaatctggctggctacaagagacaggaagccctgagaccatacctgagcagcgaggaagatcggaagaagggaaagaaattcgctcggtaccagctgggcgacctgctgctgcacctggaaaagaagcacggcgaggactggggaaaggtgtacgacgaggcctgggagcggattgacaagaaagtggaaggcctgagcaagcacatcaagctggaagaggaacggagaagcgaggacgcccagagcaaggccgccctgaccgactggctgcgggctaaggccagcttcgtgatcgagggcctgaaggaggccgacaaggacgagttctgcagatgcgagctgaagctgcagaagtggtacggggacctgcggggaaagcccttcgccatcgaagccgagaacagcatcctggacatcagcggcttcagcaagcagtacaactgtgccttcatctggcagaaggacggcgtgaagaagctgaacctgtacctgatcatcaactacttcaagggcggcaagctgcggttcaagaagatcaaacctgaagccttcgaagccaacagattctacaccgtgatcaacaaaaagagcggcgagatcgtgcccatggaggtgaacttcaacttcgacgaccccaacctgatcatcctgcctctggcctttggcaagagacagggcagagaattcatctggaacgacctgctgtccctggaaaccggcagcctgaagctggccaacggaagagtgatcgagaagacactgtacaacagaagaacccggcaggatgagcctgccctgttcgtggccctgaccttcgagcggcgggaggtcctggactcctccaatatcaaaccaatgaacctgatcggcgtggcaagaggcgaaaacatccccgccgtgatcgccctgaccgaccccgagggctgcccactgagccggtttaaggatagcctgggaaacccaacccacatcctgagaatcggcgagagctataaggagaagcagcggaccatccaggccaagaaggaggtggagcagcggagagccggcggctacagccggaagtacgccagcaaagccaagaatctggcagacgatatggtgagaaacaccgctagagatctgctgtactacgccgtgacccaggatgccatgctgatcttcgccaacctgagccggggcttcggccggcagggcaagcggaccttcatggccgagagacagtacacacggatggaggactggctgaccgccaagctggcctacgagggcctgagcaagacctacctgtccaagacactggcccagtacacctccaagacatgcagcaactgtgggtttaccatcaccagcgccgactacgacagggtgctggagaagctgaagaagacagcaacaggctggatgaccacaattaacggcaaggagctgaaggtggagggccagattacctactacaacagatacaagagacagaacgtagtcaaggacctgtccgtcgagctggatagactgagcgaagaatctgtgaacaacgacatctcctcctggacaaagggcagaagcggagaagctctgagcctcctgaagaaaagattctcccatagacccgtgcaggagaagttcgtgtgcctgaactgcggcttcgagacacacgcagccgagcaagccgccctgaacatcgccagatcctggctgttcctgcggagccaggagtacaagaaataccagacaaacaagacaaccggcaacaccgataagagagccttcgtcgagacctggcagtccttttaccggaagaagcttaaggaggtgtggaaacctgccgtgcggtctggcggatctggcggaggctccaccagccccaagaaaaagagaaaagtctaagctgccttctgcggggcttgccttctggccatgcccttcttctctcccttgcacctgtacctcttggtctttgaataaagcctgagtaggaaggctagcaaaaaaaaaaaaaaaaaaaaaaaaaaaaaaaaaaaaaaaaaaaaaaaaaaaaaaaaaaaaaaaaaaaaaaaaaaaaaaaa

SEQ ID NO: 10468 - RNA, 8787 nt, synthetic construct
  source 1..8787: mol_type = other RNA
aggaaataagagagaaaagaagagtaagaagaaatataagagccaccatggcccctaagaagaagcgtaaagtgagccggatgaaccacgaccaggagttcgacccccctaaggtgtaccctcccgtccccgccgagaagagaaagcccatccgggtcctgagcctgttcgatggcatcgccaccggtctgctggtgctgaaggacctgggcatccaggtggataggtacattgcctccgaggtgtgcgaggactccatcaccgtgggaatggtgcgtcatcagggcaagatcatgtacgtgggcgacgtgcggagcgtgacacagaagcatatccaggagtggggccctttcgacctggtgatcggcggcagcccttgcaatgacctgagcatcgtgaacccagcccggaagggcctgtacgagggaaccggcagactgttcttcgagttttacagactgctgcacgacgcccggcctaaggaaggcgacgaccggcccttcttttggctgttcgagaatgtggtggccatgggagtcagcgacaagcgggatattagccggttcctggagagcaaccccgtgatgatcgatgccaaggaagtgagcgccgcccaccgggccagatacttctggggcaatctgcctggcatgaacagacccctggccagcaccgtgaacgacaagctggagctgcaggagtgcctggagcacggccggatcgccaagttcagcaaggtgagaaccatcaccacccgaagcaacagcatcaaacaaggcaaggaccagcactttcctgtgttcatgaacgagaaggaggacatcctgtggtgtaccgagatggagagagtgttcgggttcccagtccactacacagatgtcagcaacatgtctagactggccagacagagactgctgggaagaagctggtccgtccctgtgatcagacacctgttcgcccctctgaaggagtacttcgcctgcgtgagcagcggcaacagcaacgccaacagccggggccccagcttctctagcggcctggtgccactgtccctgagagggagccacatgggccccatggagatctacaaaaccgtgagcgcctggaagcggcagcctgtgcgcgtgctgagcctgtttcggaatatcgataaagtcctgaaaagcctgggattcctggagagcggctctggctccggcggtggcaccctgaagtacgtggaggatgtgacaaacgtggtcagacgggatgtggagaagtggggccccttcgatctggtgtacggcagcacccaacccctgggcagctcttgtgaccggtgccctggctggtacatgtttcagttccaccggatcctgcagtacgccctgccgagacaggagtcccagcggccattcttttggattttcatggacaacttgctgctgaccgaggatgaccaggaaactaccactcggttcctgcagaccgaagccgtgaccctgcaggacgtgagaggccgggactaccagaacgccatgcgggtgtggtccaacatccctggactgaaaagcaagcacgcacctctgacccctaaagaagaggagtacctgcaggcccaggtgcggagcagaagcaagctggacgcccctaaggtggatctgctggtgaagaattgcctcctgcccctgagagagtacttcaagtatttcagccagaatagtctgcccctgggaggcagcggcggcggcagcctggagagcgacctgttcagggacgtggccatcgtgttcagccaggaggagtgggagcagctggcccccgcccagagggacctgtacagggacgtgatgctggagacctacagcaacctggtgagcctgggcctggccatcgccaagcccgacgtgatcagcttcctggagcagggcaaggagccctgggtggtggagaagatgagcaggggcggcctgtgccccgtgctggagagcaggggcggcccaagcagcggcgcccctcctcccagcggcggcaggcggcccaagcagcggcgcccctcctcccagcggcggcagcccagccggctccccaacctctaccgaggagggcacctctgagtccgccacccccgagagcggccctggcacctccaccgagcccagcgagggcagcgcacccggcagccctgccggcagccccacctccacagaggagggaaccagcaccgagcccagcgaaggcagcgccccaggcaccagcaccgagcctagtgagcaggagattaaacggatcaacaagatcagaagaagacttgtgaaagacagcaacaccaagaaggccggcaagacaggccccatgaaaaccctgctggttagagtgatgacacccgatctgagagagcggctggaaaacctgagaaagaagcctgaaaatatcccccagcccatcagcaatacatctagagccaacctgaataagctgctgaccgattacaccgaaatgaagaaggcgatcctgcatgtgtactgggaagagttccagaaggaccctgtgggcctgatgagccgggtggcccagcctgccagcaagaagatcgatcagaacaagctgaaacctgagatggacgagaagggcaacctgaccaccgccggctttgcctgctctcagtgtggccagcccctgttcgtgtacaagctggagcaggtgtctgagaagggcaaggcttacaccaactacttcggacggtgcaatgtggccgagcacgaaaagctgatcctgctggcccagctgaagcccgagaaggatagcgacgaagccgtgacatatagcctgggaaagtttgggcagagggccctggatttctacagcattcatgtgaccaaggagtccacccaccccgtgaagcccctggcccagatcgccggaaacagatacgcctccggacctgtgggaaaggccctgagcgacgcatgtatgggcacaatcgcctccttcctgtctaagtaccaggacatcatcatcgaacaccagaaggtggtgaagggcaaccagaagagactggagagcctgcgggagctggccggcaaggaaaacctggaataccctagcgtgaccctgccacctcagcctcacaccaaggagggcgttgatgcctacaacgaagtgatcgcccgggtgcgaatgtgggtgaacctgaacctgtggcagaagctgaagctaagcagagatgatgccaagcctctgctgagactgaagggattcccttcctttcctctggtcgagagacaggccaacgaagtggactggtgggacatggtgtgtaacgtgaagaagctgatcaacgagaaaaaggaggatggcaaggtgttttggcagaatctggctggctacaagagacaggaagccctgagaccatacctgagcagcgaggaagatcggaagaagggaaagaaattcgctcggtaccagctgggcgacctgctgctgcacctggaaaagaagcacggcgaggactggggaaaggtgtacgacgaggcctgggagcggattgacaagaaagtggaaggcctgagcaagcacatcaagctggaagaggaacggagaagcgaggacgcccagagcaaggccgccctgaccgactggctgcgggctaaggccagcttcgtgatcgagggcctgaaggaggccgacaaggacgagttctgcagatgcgagctgaagctgcagaagtggtacggggacctgcggggaaagcccttcgccatcgaagccgagaacagcatcctggacatcagcggcttcagcaagcagtacaactgtgccttcatctggcagaaggacggcgtgaagaagctgaacctgtacctgatcatcaactacttcaagggcggcaagctgcggttcaagaagatcaaacctgaagccttcgaagccaacagattctacaccgtgatcaacaaaaagagcggcgagatcgtgcccatggaggtgaacttcaacttcgacgaccccaacctgatcatcctgcctctggcctttggcaagagacagggcagagaattcatctggaacgacctgctgtccctggaaaccggcagcctgaagctggccaacggaagagtgatcgagaagacactgtacaacagaagaacccggcaggatgagcctgccctgttcgtggccctgaccttcgagcggcgggaggtcctggactcctccaatatcaaaccaatgaacctgatcggcgtggcaagaggcgaaaacatccccgccgtgatcgccctgaccgaccccgagggctgcccactgagccggtttaaggatagcctgggaaacccaacccacatcctgagaatcggcgagagctataaggagaagcagcggaccatccaggccaagaaggaggtggagcagcggagagccggcggctacagccggaagtacgccagcaaagccaagaatctggcagacgatatggtgagaaacaccgctagagatctgctgtactacgccgtgacccaggatgccatgctgatcttcgccaacctgagccggggcttcggccggcagggcaagcggaccttcatggccgagagacagtacacacggatggaggactggctgaccgccaagctggcctacgagggcctgagcaagacctacctgtccaagacactggcccagtacacctccaagacatgcagcaactgtgggtttaccatcaccagcgccgactacgacagggtgctggagaagctgaagaagacagcaacaggctggatgaccacaattaacggcaaggagctgaaggtggagggccagattacctactacaacagatacaagagacagaacgtagtcaaggacctgtccgtcgagctggatagactgagcgaagaatctgtgaacaacgacatctcctcctggacaaagggcagaagcggagaagctctgagcctcctgaagaaaagattctcccatagacccgtgcaggagaagttcgtgtgcctgaactgcggcttcgagacacacgcagccgagcaagccgccctgaacatcgccagatcctggctgttcctgcggagccaggagtacaagaaataccagacaaacaagacaaccggcaacaccgataagagagccttcgtcgagacctggcagtccttttaccggaagaagcttaaggaggtgtggaaacctgccgtgcggtctggcggatctggcggaggctccaccagccccaagaaaaagagaaaagtctaagctgccttctgcggggcttgccttctggccatgcccttcttctctcccttgcacctgtacctcttggtctttgaataaagcctgagtaggaaggctagcaaaaaaaaaaaaaaaaaaaaaaaaaaaaaaaaaaaaaaaaaaaaaaaaaaaaaaaaaaaaaaaaaaaaaaaaaaaaaaaagcccagccggctccccaacctctaccgaggagggcacctctgagtccgccacccccgagagcggccctggcacctccaccgagcccagcgagggcagcgcacccggcagccctgccggcagccccacctccacagaggagggaaccagcaccgagcccagcgaaggcagcgccccaggcaccagcaccgagcctagtgagcaggagattaaacggatcaacaagatcagaagaagacttgtgaaagacagcaacaccaagaaggccggcaagacaggccccatgaaaaccctgctggttagagtgatgacacccgatctgagagagcggctggaaaacctgagaaagaagcctgaaaatatcccccagcccatcagcaatacatctagagccaacctgaataagctgctgaccgattacaccgaaatgaagaaggcgatcctgcatgtgtactgggaagagttccagaaggaccctgtgggcctgatgagccgggtggcccagcctgccagcaagaagatcgatcagaacaagctgaaacctgagatggacgagaagggcaacctgaccaccgccggctttgcctgctctcagtgtggccagcccctgttcgtgtacaagctggagcaggtgtctgagaagggcaaggcttacaccaactacttcggacggtgcaatgtggccgagcacgaaaagctgatcctgctggcccagctgaagcccgagaaggatagcgacgaagccgtgacatatagcctgggaaagtttgggcagagggccctggatttctacagcattcatgtgaccaaggagtccacccaccccgtgaagcccctggcccagatcgccggaaacagatacgcctccggacctgtgggaaaggccctgagcgacgcatgtatgggcacaatcgcctccttcctgtctaagtaccaggacatcatcatcgaacaccagaaggtggtgaagggcaaccagaagagactggagagcctgcgggagctggccggcaaggaaaacctggaataccctagcgtgaccctgccacctcagcctcacaccaaggagggcgttgatgcctacaacgaagtgatcgcccgggtgcgaatgtgggtgaacctgaacctgtggcagaagctgaagctaagcagagatgatgccaagcctctgctgagactgaagggattcccttcctttcctctggtcgagagacaggccaacgaagtggactggtgggacatggtgtgtaacgtgaagaagctgatcaacgagaaaaaggaggatggcaaggtgttttggcagaatctggctggctacaagagacaggaagccctgagaccatacctgagcagcgaggaagatcggaagaagggaaagaaattcgctcggtaccagctgggcgacctgctgctgcacctggaaaagaagcacggcgaggactggggaaaggtgtacgacgaggcctgggagcggattgacaagaaagtggaaggcctgagcaagcacatcaagctggaagaggaacggagaagcgaggacgcccagagcaaggccgccctgaccgactggctgcgggctaaggccagcttcgtgatcgagggcctgaaggaggccgacaaggacgagttctgcagatgcgagctgaagctgcagaagtggtacggggacctgcggggaaagcccttcgccatcgaagccgagaacagcatcctggacatcagcggcttcagcaagcagtacaactgtgccttcatctggcagaaggacggcgtgaagaagctgaacctgtacctgatcatcaactacttcaagggcggcaagctgcggttcaagaagatcaaacctgaagccttcgaagccaacagattctacaccgtgatcaacaaaaagagcggcgagatcgtgcccatggaggtgaacttcaacttcgacgaccccaacctgatcatcctgcctctggcctttggcaagagacagggcagagaattcatctggaacgacctgctgtccctggaaaccggcagcctgaagctggccaacggaagagtgatcgagaagacactgtacaacagaagaacccggcaggatgagcctgccctgttcgtggccctgaccttcgagcggcgggaggtcctggactcctccaatatcaaaccaatgaacctgatcggcgtggcaagaggcgaaaacatccccgccgtgatcgccctgaccgaccccgagggctgcccactgagccggtttaaggatagcctgggaaacccaacccacatcctgagaatcggcgagagctataaggagaagcagcggaccatccaggccaagaaggaggtggagcagcggagagccggcggctacagccggaagtacgccagcaaagccaagaatctggcagacgatatggtgagaaacaccgctagagatctgctgtactacgccgtgacccaggatgccatgctgatcttcgccaacctgagccggggcttcggccggcagggcaagcggaccttcatggccgagagacagtacacacggatggaggactggctgaccgccaagctggcctacgagggcctgagcaagacctacctgtccaagacactggcccagtacacctccaagacatgcagcaactgtgggtttaccatcaccagcgccgactacgacagggtgctggagaagctgaagaagacagcaacaggctggatgaccacaattaacggcaaggagctgaaggtggagggccagattacctactacaacagatacaagagacagaacgtagtcaaggacctgtccgtcgagctggatagactgagcgaagaatctgtgaacaacgacatctcctcctggacaaagggcagaagcggagaagctctgagcctcctgaagaaaagattctcccatagacccgtgcaggagaagttcgtgtgcctgaactgcggcttcgagacacacgcagccgagcaagccgccctgaacatcgccagatcctggctgttcctgcggagccaggagtacaagaaataccagacaaacaagacaaccggcaacaccgataagagagccttcgtcgagacctggcagtccttttaccggaagaagcttaaggaggtgtggaaacctgccgtgcggtctggcggatctggcggaggctccaccagccccaagaaaaagagaaaagtctaagctgccttctgcggggcttgccttctggccatgcccttcttctctcccttgcacctgtacctcttggtctttgaataaagcctgagtaggaaggctagcaaaaaaaaaaaaaaaaaaaaaaaaaaaaaaaaaaaaaaaaaaaaaaaaaaaaaaaaaaaaaaaaaaaaaaaaaaaaaaaa

SEQ ID NO: 10469 - RNA, 8787 nt, synthetic construct
  source 1..8787: mol_type = other RNA
aggaaataagagagaaaagaagagtaagaagaaatataagagccaccatggcccctaagaagaagcgtaaagtgagccggatgaaccacgaccaggagttcgacccccctaaggtgtaccctcccgtccccgccgagaagagaaagcccatccgggtcctgagcctgttcgatggcatcgccaccggtctgctggtgctgaaggacctgggcatccaggtggataggtacattgcctccgaggtgtgcgaggactccatcaccgtgggaatggtgcgtcatcagggcaagatcatgtacgtgggcgacgtgcggagcgtgacacagaagcatatccaggagtggggccctttcgacctggtgatcggcggcagcccttgcaatgacctgagcatcgtgaacccagcccggaagggcctgtacgagggaaccggcagactgttcttcgagttttacagactgctgcacgacgcccggcctaaggaaggcgacgaccggcccttcttttggctgttcgagaatgtggtggccatgggagtcagcgacaagcgggatattagccggttcctggagagcaaccccgtgatgatcgatgccaaggaagtgagcgccgcccaccgggccagatacttctggggcaatctgcctggcatgaacagacccctggccagcaccgtgaacgacaagctggagctgcaggagtgcctggagcacggccggatcgccaagttcagcaaggtgagaaccatcaccacccgaagcaacagcatcaaacaaggcaaggaccagcactttcctgtgttcatgaacgagaaggaggacatcctgtggtgtaccgagatggagagagtgttcgggttcccagtccactacacagatgtcagcaacatgtctagactggccagacagagactgctgggaagaagctggtccgtccctgtgatcagacacctgttcgcccctctgaaggagtacttcgcctgcgtgagcagcggcaacagcaacgccaacagccggggccccagcttctctagcggcctggtgccactgtccctgagagggagccacatgggccccatggagatctacaaaaccgtgagcgcctggaagcggcagcctgtgcgcgtgctgagcctgtttcggaatatcgataaagtcctgaaaagcctgggattcctggagagcggctctggctccggcggtggcaccctgaagtacgtggaggatgtgacaaacgtggtcagacgggatgtggagaagtggggccccttcgatctggtgtacggcagcacccaacccctgggcagctcttgtgaccggtgccctggctggtacatgtttcagttccaccggatcctgcagtacgccctgccgagacaggagtcccagcggccattcttttggattttcatggacaacttgctgctgaccgaggatgaccaggaaactaccactcggttcctgcagaccgaagccgtgaccctgcaggacgtgagaggccgggactaccagaacgccatgcgggtgtggtccaacatccctggactgaaaagcaagcacgcacctctgacccctaaagaagaggagtacctgcaggcccaggtgcggagcagaagcaagctggacgcccctaaggtggatctgctggtgaagaattgcctcctgcccctgagagagtacttcaagtatttcagccagaatagtctgcccctgggaggcagcggcggcggcatgatgaccgccgtgagcctgaccaccaggccccaggagagcgtggccttcgaggacgtggccgtgtacttcaccaccaaggagtgggccatcatggtgcccgccgagagggccctgtacagggacgtgatgctggagaactacgaggccgtggccttcgtggtgagccccaccagcaagcccgccctggtgagccacctggagcagggcaaggagagctgcttcaccaggccccagggcgtgggcggcccaagcagcggcgcccctcctcccagcggcggcaggcggcccaagcagcggcgcccctcctcccagcggcggcagcccagccggctccccaacctctaccgaggagggcacctctgagtccgccacccccgagagcggccctggcacctccaccgagcccagcgagggcagcgcacccggcagccctgccggcagccccacctccacagaggagggaaccagcaccgagcccagcgaaggcagcgccccaggcaccagcaccgagcctagtgagcaggagattaaacggatcaacaagatcagaagaagacttgtgaaagacagcaacaccaagaaggccggcaagacaggccccatgaaaaccctgctggttagagtgatgacacccgatctgagagagcggctggaaaacctgagaaagaagcctgaaaatatcccccagcccatcagcaatacatctagagccaacctgaataagctgctgaccgattacaccgaaatgaagaaggcgatcctgcatgtgtactgggaagagttccagaaggaccctgtgggcctgatgagccgggtggcccagcctgccagcaagaagatcgatcagaacaagctgaaacctgagatggacgagaagggcaacctgaccaccgccggctttgcctgctctcagtgtggccagcccctgttcgtgtacaagctggagcaggtgtctgagaagggcaaggcttacaccaactacttcggacggtgcaatgtggccgagcacgaaaagctgatcctgctggcccagctgaagcccgagaaggatagcgacgaagccgtgacatatagcctgggaaagtttgggcagagggccctggatttctacagcattcatgtgaccaaggagtccacccaccccgtgaagcccctggcccagatcgccggaaacagatacgcctccggacctgtgggaaaggccctgagcgacgcatgtatgggcacaatcgcctccttcctgtctaagtaccaggacatcatcatcgaacaccagaaggtggtgaagggcaaccagaagagactggagagcctgcgggagctggccggcaaggaaaacctggaataccctagcgtgaccctgccacctcagcctcacaccaaggagggcgttgatgcctacaacgaagtgatcgcccgggtgcgaatgtgggtgaacctgaacctgtggcagaagctgaagctaagcagagatgatgccaagcctctgctgagactgaagggattcccttcctttcctctggtcgagagacaggccaacgaagtggactggtgggacatggtgtgtaacgtgaagaagctgatcaacgagaaaaaggaggatggcaaggtgttttggcagaatctggctggctacaagagacaggaagccctgagaccatacctgagcagcgaggaagatcggaagaagggaaagaaattcgctcggtaccagctgggcgacctgctgctgcacctggaaaagaagcacggcgaggactggggaaaggtgtacgacgaggcctgggagcggattgacaagaaagtggaaggcctgagcaagcacatcaagctggaagaggaacggagaagcgaggacgcccagagcaaggccgccctgaccgactggctgcgggctaaggccagcttcgtgatcgagggcctgaaggaggccgacaaggacgagttctgcagatgcgagctgaagctgcagaagtggtacggggacctgcggggaaagcccttcgccatcgaagccgagaacagcatcctggacatcagcggcttcagcaagcagtacaactgtgccttcatctggcagaaggacggcgtgaagaagctgaacctgtacctgatcatcaactacttcaagggcggcaagctgcggttcaagaagatcaaacctgaagccttcgaagccaacagattctacaccgtgatcaacaaaaagagcggcgagatcgtgcccatggaggtgaacttcaacttcgacgaccccaacctgatcatcctgcctctggcctttggcaagagacagggcagagaattcatctggaacgacctgctgtccctggaaaccggcagcctgaagctggccaacggaagagtgatcgagaagacactgtacaacagaagaacccggcaggatgagcctgccctgttcgtggccctgaccttcgagcggcgggaggtcctggactcctccaatatcaaaccaatgaacctgatcggcgtggcaagaggcgaaaacatccccgccgtgatcgccctgaccgaccccgagggctgcccactgagccggtttaaggatagcctgggaaacccaacccacatcctgagaatcggcgagagctataaggagaagcagcggaccatccaggccaagaaggaggtggagcagcggagagccggcggctacagccggaagtacgccagcaaagccaagaatctggcagacgatatggtgagaaacaccgctagagatctgctgtactacgccgtgacccaggatgccatgctgatcttcgccaacctgagccggggcttcggccggcagggcaagcggaccttcatggccgagagacagtacacacggatggaggactggctgaccgccaagctggcctacgagggcctgagcaagacctacctgtccaagacactggcccagtacacctccaagacatgcagcaactgtgggtttaccatcaccagcgccgactacgacagggtgctggagaagctgaagaagacagcaacaggctggatgaccacaattaacggcaaggagctgaaggtggagggccagattacctactacaacagatacaagagacagaacgtagtcaaggacctgtccgtcgagctggatagactgagcgaagaatctgtgaacaacgacatctcctcctggacaaagggcagaagcggagaagctctgagcctcctgaagaaaagattctcccatagacccgtgcaggagaagttcgtgtgcctgaactgcggcttcgagacacacgcagccgagcaagccgccctgaacatcgccagatcctggctgttcctgcggagccaggagtacaagaaataccagacaaacaagacaaccggcaacaccgataagagagccttcgtcgagacctggcagtccttttaccggaagaagcttaaggaggtgtggaaacctgccgtgcggtctggcggatctggcggaggctccaccagccccaagaaaaagagaaaagtctaagctgccttctgcggggcttgccttctggccatgcccttcttctctcccttgcacctgtacctcttggtctttgaataaagcctgagtaggaaggctagcaaaaaaaaaaaaaaaaaaaaaaaaaaaaaaaaaaaaaaaaaaaaaaaaaaaaaaaaaaaaaaaaaaaaaaaaaaaaaaaagcccagccggctccccaacctctaccgaggagggcacctctgagtccgccacccccgagagcggccctggcacctccaccgagcccagcgagggcagcgcacccggcagccctgccggcagccccacctccacagaggagggaaccagcaccgagcccagcgaaggcagcgccccaggcaccagcaccgagcctagtgagcaggagattaaacggatcaacaagatcagaagaagacttgtgaaagacagcaacaccaagaaggccggcaagacaggccccatgaaaaccctgctggttagagtgatgacacccgatctgagagagcggctggaaaacctgagaaagaagcctgaaaatatcccccagcccatcagcaatacatctagagccaacctgaataagctgctgaccgattacaccgaaatgaagaaggcgatcctgcatgtgtactgggaagagttccagaaggaccctgtgggcctgatgagccgggtggcccagcctgccagcaagaagatcgatcagaacaagctgaaacctgagatggacgagaagggcaacctgaccaccgccggctttgcctgctctcagtgtggccagcccctgttcgtgtacaagctggagcaggtgtctgagaagggcaaggcttacaccaactacttcggacggtgcaatgtggccgagcacgaaaagctgatcctgctggcccagctgaagcccgagaaggatagcgacgaagccgtgacatatagcctgggaaagtttgggcagagggccctggatttctacagcattcatgtgaccaaggagtccacccaccccgtgaagcccctggcccagatcgccggaaacagatacgcctccggacctgtgggaaaggccctgagcgacgcatgtatgggcacaatcgcctccttcctgtctaagtaccaggacatcatcatcgaacaccagaaggtggtgaagggcaaccagaagagactggagagcctgcgggagctggccggcaaggaaaacctggaataccctagcgtgaccctgccacctcagcctcacaccaaggagggcgttgatgcctacaacgaagtgatcgcccgggtgcgaatgtgggtgaacctgaacctgtggcagaagctgaagctaagcagagatgatgccaagcctctgctgagactgaagggattcccttcctttcctctggtcgagagacaggccaacgaagtggactggtgggacatggtgtgtaacgtgaagaagctgatcaacgagaaaaaggaggatggcaaggtgttttggcagaatctggctggctacaagagacaggaagccctgagaccatacctgagcagcgaggaagatcggaagaagggaaagaaattcgctcggtaccagctgggcgacctgctgctgcacctggaaaagaagcacggcgaggactggggaaaggtgtacgacgaggcctgggagcggattgacaagaaagtggaaggcctgagcaagcacatcaagctggaagaggaacggagaagcgaggacgcccagagcaaggccgccctgaccgactggctgcgggctaaggccagcttcgtgatcgagggcctgaaggaggccgacaaggacgagttctgcagatgcgagctgaagctgcagaagtggtacggggacctgcggggaaagcccttcgccatcgaagccgagaacagcatcctggacatcagcggcttcagcaagcagtacaactgtgccttcatctggcagaaggacggcgtgaagaagctgaacctgtacctgatcatcaactacttcaagggcggcaagctgcggttcaagaagatcaaacctgaagccttcgaagccaacagattctacaccgtgatcaacaaaaagagcggcgagatcgtgcccatggaggtgaacttcaacttcgacgaccccaacctgatcatcctgcctctggcctttggcaagagacagggcagagaattcatctggaacgacctgctgtccctggaaaccggcagcctgaagctggccaacggaagagtgatcgagaagacactgtacaacagaagaacccggcaggatgagcctgccctgttcgtggccctgaccttcgagcggcgggaggtcctggactcctccaatatcaaaccaatgaacctgatcggcgtggcaagaggcgaaaacatccccgccgtgatcgccctgaccgaccccgagggctgcccactgagccggtttaaggatagcctgggaaacccaacccacatcctgagaatcggcgagagctataaggagaagcagcggaccatccaggccaagaaggaggtggagcagcggagagccggcggctacagccggaagtacgccagcaaagccaagaatctggcagacgatatggtgagaaacaccgctagagatctgctgtactacgccgtgacccaggatgccatgctgatcttcgccaacctgagccggggcttcggccggcagggcaagcggaccttcatggccgagagacagtacacacggatggaggactggctgaccgccaagctggcctacgagggcctgagcaagacctacctgtccaagacactggcccagtacacctccaagacatgcagcaactgtgggtttaccatcaccagcgccgactacgacagggtgctggagaagctgaagaagacagcaacaggctggatgaccacaattaacggcaaggagctgaaggtggagggccagattacctactacaacagatacaagagacagaacgtagtcaaggacctgtccgtcgagctggatagactgagcgaagaatctgtgaacaacgacatctcctcctggacaaagggcagaagcggagaagctctgagcctcctgaagaaaagattctcccatagacccgtgcaggagaagttcgtgtgcctgaactgcggcttcgagacacacgcagccgagcaagccgccctgaacatcgccagatcctggctgttcctgcggagccaggagtacaagaaataccagacaaacaagacaaccggcaacaccgataagagagccttcgtcgagacctggcagtccttttaccggaagaagcttaaggaggtgtggaaacctgccgtgcggtctggcggatctggcggaggctccaccagccccaagaaaaagagaaaagtctaagctgccttctgcggggcttgccttctggccatgcccttcttctctcccttgcacctgtacctcttggtctttgaataaagcctgagtaggaaggctagcaaaaaaaaaaaaaaaaaaaaaaaaaaaaaaaaaaaaaaaaaaaaaaaaaaaaaaaaaaaaaaaaaaaaaaaaaaaaaaaa

SEQ ID NO: 10470 - RNA, 8787 nt, synthetic construct
  source 1..8787: mol_type = other RNA
aggaaataagagagaaaagaagagtaagaagaaatataagagccaccatggcccctaagaagaagcgtaaagtgagccggatgaaccacgaccaggagttcgacccccctaaggtgtaccctcccgtccccgccgagaagagaaagcccatccgggtcctgagcctgttcgatggcatcgccaccggtctgctggtgctgaaggacctgggcatccaggtggataggtacattgcctccgaggtgtgcgaggactccatcaccgtgggaatggtgcgtcatcagggcaagatcatgtacgtgggcgacgtgcggagcgtgacacagaagcatatccaggagtggggccctttcgacctggtgatcggcggcagcccttgcaatgacctgagcatcgtgaacccagcccggaagggcctgtacgagggaaccggcagactgttcttcgagttttacagactgctgcacgacgcccggcctaaggaaggcgacgaccggcccttcttttggctgttcgagaatgtggtggccatgggagtcagcgacaagcgggatattagccggttcctggagagcaaccccgtgatgatcgatgccaaggaagtgagcgccgcccaccgggccagatacttctggggcaatctgcctggcatgaacagacccctggccagcaccgtgaacgacaagctggagctgcaggagtgcctggagcacggccggatcgccaagttcagcaaggtgagaaccatcaccacccgaagcaacagcatcaaacaaggcaaggaccagcactttcctgtgttcatgaacgagaaggaggacatcctgtggtgtaccgagatggagagagtgttcgggttcccagtccactacacagatgtcagcaacatgtctagactggccagacagagactgctgggaagaagctggtccgtccctgtgatcagacacctgttcgcccctctgaaggagtacttcgcctgcgtgagcagcggcaacagcaacgccaacagccggggccccagcttctctagcggcctggtgccactgtccctgagagggagccacatgggccccatggagatctacaaaaccgtgagcgcctggaagcggcagcctgtgcgcgtgctgagcctgtttcggaatatcgataaagtcctgaaaagcctgggattcctggagagcggctctggctccggcggtggcaccctgaagtacgtggaggatgtgacaaacgtggtcagacgggatgtggagaagtggggccccttcgatctggtgtacggcagcacccaacccctgggcagctcttgtgaccggtgccctggctggtacatgtttcagttccaccggatcctgcagtacgccctgccgagacaggagtcccagcggccattcttttggattttcatggacaacttgctgctgaccgaggatgaccaggaaactaccactcggttcctgcagaccgaagccgtgaccctgcaggacgtgagaggccgggactaccagaacgccatgcgggtgtggtccaacatccctggactgaaaagcaagcacgcacctctgacccctaaagaagaggagtacctgcaggcccaggtgcggagcagaagcaagctggacgcccctaaggtggatctgctggtgaagaattgcctcctgcccctgagagagtacttcaagtatttcagccagaatagtctgcccctgggaggcagcggcggcggcctgaaggccagcgtgagcttcaaggacgtggccgtggagctgacccaggaggagtggcagcacatgggccccgcccagaggaccctgtacagggacgtgatgctggagaactacagccacctggtgagcgtgggctactgcatcttcaagcccgaggtgatcttcaagctggagcagggcgagcagccctggttcctggagcaggagttcagcaaccagagctaccccgaggactacaacatcggcggcccaagcagcggcgcccctcctcccagcggcggcaggcggcccaagcagcggcgcccctcctcccagcggcggcagcccagccggctccccaacctctaccgaggagggcacctctgagtccgccacccccgagagcggccctggcacctccaccgagcccagcgagggcagcgcacccggcagccctgccggcagccccacctccacagaggagggaaccagcaccgagcccagcgaaggcagcgccccaggcaccagcaccgagcctagtgagcaggagattaaacggatcaacaagatcagaagaagacttgtgaaagacagcaacaccaagaaggccggcaagacaggccccatgaaaaccctgctggttagagtgatgacacccgatctgagagagcggctggaaaacctgagaaagaagcctgaaaatatcccccagcccatcagcaatacatctagagccaacctgaataagctgctgaccgattacaccgaaatgaagaaggcgatcctgcatgtgtactgggaagagttccagaaggaccctgtgggcctgatgagccgggtggcccagcctgccagcaagaagatcgatcagaacaagctgaaacctgagatggacgagaagggcaacctgaccaccgccggctttgcctgctctcagtgtggccagcccctgttcgtgtacaagctggagcaggtgtctgagaagggcaaggcttacaccaactacttcggacggtgcaatgtggccgagcacgaaaagctgatcctgctggcccagctgaagcccgagaaggatagcgacgaagccgtgacatatagcctgggaaagtttgggcagagggccctggatttctacagcattcatgtgaccaaggagtccacccaccccgtgaagcccctggcccagatcgccggaaacagatacgcctccggacctgtgggaaaggccctgagcgacgcatgtatgggcacaatcgcctccttcctgtctaagtaccaggacatcatcatcgaacaccagaaggtggtgaagggcaaccagaagagactggagagcctgcgggagctggccggcaaggaaaacctggaataccctagcgtgaccctgccacctcagcctcacaccaaggagggcgttgatgcctacaacgaagtgatcgcccgggtgcgaatgtgggtgaacctgaacctgtggcagaagctgaagctaagcagagatgatgccaagcctctgctgagactgaagggattcccttcctttcctctggtcgagagacaggccaacgaagtggactggtgggacatggtgtgtaacgtgaagaagctgatcaacgagaaaaaggaggatggcaaggtgttttggcagaatctggctggctacaagagacaggaagccctgagaccatacctgagcagcgaggaagatcggaagaagggaaagaaattcgctcggtaccagctgggcgacctgctgctgcacctggaaaagaagcacggcgaggactggggaaaggtgtacgacgaggcctgggagcggattgacaagaaagtggaaggcctgagcaagcacatcaagctggaagaggaacggagaagcgaggacgcccagagcaaggccgccctgaccgactggctgcgggctaaggccagcttcgtgatcgagggcctgaaggaggccgacaaggacgagttctgcagatgcgagctgaagctgcagaagtggtacggggacctgcggggaaagcccttcgccatcgaagccgagaacagcatcctggacatcagcggcttcagcaagcagtacaactgtgccttcatctggcagaaggacggcgtgaagaagctgaacctgtacctgatcatcaactacttcaagggcggcaagctgcggttcaagaagatcaaacctgaagccttcgaagccaacagattctacaccgtgatcaacaaaaagagcggcgagatcgtgcccatggaggtgaacttcaacttcgacgaccccaacctgatcatcctgcctctggcctttggcaagagacagggcagagaattcatctggaacgacctgctgtccctggaaaccggcagcctgaagctggccaacggaagagtgatcgagaagacactgtacaacagaagaacccggcaggatgagcctgccctgttcgtggccctgaccttcgagcggcgggaggtcctggactcctccaatatcaaaccaatgaacctgatcggcgtggcaagaggcgaaaacatccccgccgtgatcgccctgaccgaccccgagggctgcccactgagccggtttaaggatagcctgggaaacccaacccacatcctgagaatcggcgagagctataaggagaagcagcggaccatccaggccaagaaggaggtggagcagcggagagccggcggctacagccggaagtacgccagcaaagccaagaatctggcagacgatatggtgagaaacaccgctagagatctgctgtactacgccgtgacccaggatgccatgctgatcttcgccaacctgagccggggcttcggccggcagggcaagcggaccttcatggccgagagacagtacacacggatggaggactggctgaccgccaagctggcctacgagggcctgagcaagacctacctgtccaagacactggcccagtacacctccaagacatgcagcaactgtgggtttaccatcaccagcgccgactacgacagggtgctggagaagctgaagaagacagcaacaggctggatgaccacaattaacggcaaggagctgaaggtggagggccagattacctactacaacagatacaagagacagaacgtagtcaaggacctgtccgtcgagctggatagactgagcgaagaatctgtgaacaacgacatctcctcctggacaaagggcagaagcggagaagctctgagcctcctgaagaaaagattctcccatagacccgtgcaggagaagttcgtgtgcctgaactgcggcttcgagacacacgcagccgagcaagccgccctgaacatcgccagatcctggctgttcctgcggagccaggagtacaagaaataccagacaaacaagacaaccggcaacaccgataagagagccttcgtcgagacctggcagtccttttaccggaagaagcttaaggaggtgtggaaacctgccgtgcggtctggcggatctggcggaggctccaccagccccaagaaaaagagaaaagtctaagctgccttctgcggggcttgccttctggccatgcccttcttctctcccttgcacctgtacctcttggtctttgaataaagcctgagtaggaaggctagcaaaaaaaaaaaaaaaaaaaaaaaaaaaaaaaaaaaaaaaaaaaaaaaaaaaaaaaaaaaaaaaaaaaaaaaaaaaaaaaagcccagccggctccccaacctctaccgaggagggcacctctgagtccgccacccccgagagcggccctggcacctccaccgagcccagcgagggcagcgcacccggcagccctgccggcagccccacctccacagaggagggaaccagcaccgagcccagcgaaggcagcgccccaggcaccagcaccgagcctagtgagcaggagattaaacggatcaacaagatcagaagaagacttgtgaaagacagcaacaccaagaaggccggcaagacaggccccatgaaaaccctgctggttagagtgatgacacccgatctgagagagcggctggaaaacctgagaaagaagcctgaaaatatcccccagcccatcagcaatacatctagagccaacctgaataagctgctgaccgattacaccgaaatgaagaaggcgatcctgcatgtgtactgggaagagttccagaaggaccctgtgggcctgatgagccgggtggcccagcctgccagcaagaagatcgatcagaacaagctgaaacctgagatggacgagaagggcaacctgaccaccgccggctttgcctgctctcagtgtggccagcccctgttcgtgtacaagctggagcaggtgtctgagaagggcaaggcttacaccaactacttcggacggtgcaatgtggccgagcacgaaaagctgatcctgctggcccagctgaagcccgagaaggatagcgacgaagccgtgacatatagcctgggaaagtttgggcagagggccctggatttctacagcattcatgtgaccaaggagtccacccaccccgtgaagcccctggcccagatcgccggaaacagatacgcctccggacctgtgggaaaggccctgagcgacgcatgtatgggcacaatcgcctccttcctgtctaagtaccaggacatcatcatcgaacaccagaaggtggtgaagggcaaccagaagagactggagagcctgcgggagctggccggcaaggaaaacctggaataccctagcgtgaccctgccacctcagcctcacaccaaggagggcgttgatgcctacaacgaagtgatcgcccgggtgcgaatgtgggtgaacctgaacctgtggcagaagctgaagctaagcagagatgatgccaagcctctgctgagactgaagggattcccttcctttcctctggtcgagagacaggccaacgaagtggactggtgggacatggtgtgtaacgtgaagaagctgatcaacgagaaaaaggaggatggcaaggtgttttggcagaatctggctggctacaagagacaggaagccctgagaccatacctgagcagcgaggaagatcggaagaagggaaagaaattcgctcggtaccagctgggcgacctgctgctgcacctggaaaagaagcacggcgaggactggggaaaggtgtacgacgaggcctgggagcggattgacaagaaagtggaaggcctgagcaagcacatcaagctggaagaggaacggagaagcgaggacgcccagagcaaggccgccctgaccgactggctgcgggctaaggccagcttcgtgatcgagggcctgaaggaggccgacaaggacgagttctgcagatgcgagctgaagctgcagaagtggtacggggacctgcggggaaagcccttcgccatcgaagccgagaacagcatcctggacatcagcggcttcagcaagcagtacaactgtgccttcatctggcagaaggacggcgtgaagaagctgaacctgtacctgatcatcaactacttcaagggcggcaagctgcggttcaagaagatcaaacctgaagccttcgaagccaacagattctacaccgtgatcaacaaaaagagcggcgagatcgtgcccatggaggtgaacttcaacttcgacgaccccaacctgatcatcctgcctctggcctttggcaagagacagggcagagaattcatctggaacgacctgctgtccctggaaaccggcagcctgaagctggccaacggaagagtgatcgagaagacactgtacaacagaagaacccggcaggatgagcctgccctgttcgtggccctgaccttcgagcggcgggaggtcctggactcctccaatatcaaaccaatgaacctgatcggcgtggcaagaggcgaaaacatccccgccgtgatcgccctgaccgaccccgagggctgcccactgagccggtttaaggatagcctgggaaacccaacccacatcctgagaatcggcgagagctataaggagaagcagcggaccatccaggccaagaaggaggtggagcagcggagagccggcggctacagccggaagtacgccagcaaagccaagaatctggcagacgatatggtgagaaacaccgctagagatctgctgtactacgccgtgacccaggatgccatgctgatcttcgccaacctgagccggggcttcggccggcagggcaagcggaccttcatggccgagagacagtacacacggatggaggactggctgaccgccaagctggcctacgagggcctgagcaagacctacctgtccaagacactggcccagtacacctccaagacatgcagcaactgtgggtttaccatcaccagcgccgactacgacagggtgctggagaagctgaagaagacagcaacaggctggatgaccacaattaacggcaaggagctgaaggtggagggccagattacctactacaacagatacaagagacagaacgtagtcaaggacctgtccgtcgagctggatagactgagcgaagaatctgtgaacaacgacatctcctcctggacaaagggcagaagcggagaagctctgagcctcctgaagaaaagattctcccatagacccgtgcaggagaagttcgtgtgcctgaactgcggcttcgagacacacgcagccgagcaagccgccctgaacatcgccagatcctggctgttcctgcggagccaggagtacaagaaataccagacaaacaagacaaccggcaacaccgataagagagccttcgtcgagacctggcagtccttttaccggaagaagcttaaggaggtgtggaaacctgccgtgcggtctggcggatctggcggaggctccaccagccccaagaaaaagagaaaagtctaagctgccttctgcggggcttgccttctggccatgcccttcttctctcccttgcacctgtacctcttggtctttgaataaagcctgagtaggaaggctagcaaaaaaaaaaaaaaaaaaaaaaaaaaaaaaaaaaaaaaaaaaaaaaaaaaaaaaaaaaaaaaaaaaaaaaaaaaaaaaaa

SEQ ID NO: 10471 - RNA, 8787 nt, synthetic construct
  source 1..8787: mol_type = other RNA
aggaaataagagagaaaagaagagtaagaagaaatataagagccaccatggcccctaagaagaagcgtaaagtgagccggatgaaccacgaccaggagttcgacccccctaaggtgtaccctcccgtccccgccgagaagagaaagcccatccgggtcctgagcctgttcgatggcatcgccaccggtctgctggtgctgaaggacctgggcatccaggtggataggtacattgcctccgaggtgtgcgaggactccatcaccgtgggaatggtgcgtcatcagggcaagatcatgtacgtgggcgacgtgcggagcgtgacacagaagcatatccaggagtggggccctttcgacctggtgatcggcggcagcccttgcaatgacctgagcatcgtgaacccagcccggaagggcctgtacgagggaaccggcagactgttcttcgagttttacagactgctgcacgacgcccggcctaaggaaggcgacgaccggcccttcttttggctgttcgagaatgtggtggccatgggagtcagcgacaagcgggatattagccggttcctggagagcaaccccgtgatgatcgatgccaaggaagtgagcgccgcccaccgggccagatacttctggggcaatctgcctggcatgaacagacccctggccagcaccgtgaacgacaagctggagctgcaggagtgcctggagcacggccggatcgccaagttcagcaaggtgagaaccatcaccacccgaagcaacagcatcaaacaaggcaaggaccagcactttcctgtgttcatgaacgagaaggaggacatcctgtggtgtaccgagatggagagagtgttcgggttcccagtccactacacagatgtcagcaacatgtctagactggccagacagagactgctgggaagaagctggtccgtccctgtgatcagacacctgttcgcccctctgaaggagtacttcgcctgcgtgagcagcggcaacagcaacgccaacagccggggccccagcttctctagcggcctggtgccactgtccctgagagggagccacatgggccccatggagatctacaaaaccgtgagcgcctggaagcggcagcctgtgcgcgtgctgagcctgtttcggaatatcgataaagtcctgaaaagcctgggattcctggagagcggctctggctccggcggtggcaccctgaagtacgtggaggatgtgacaaacgtggtcagacgggatgtggagaagtggggccccttcgatctggtgtacggcagcacccaacccctgggcagctcttgtgaccggtgccctggctggtacatgtttcagttccaccggatcctgcagtacgccctgccgagacaggagtcccagcggccattcttttggattttcatggacaacttgctgctgaccgaggatgaccaggaaactaccactcggttcctgcagaccgaagccgtgaccctgcaggacgtgagaggccgggactaccagaacgccatgcgggtgtggtccaacatccctggactgaaaagcaagcacgcacctctgacccctaaagaagaggagtacctgcaggcccaggtgcggagcagaagcaagctggacgcccctaaggtggatctgctggtgaagaattgcctcctgcccctgagagagtacttcaagtatttcagccagaatagtctgcccctgggaggcagcggcggcggcagccagccccccgtgagcttcaaggacgtggtggtgagcttcaccagggaggagtggggccagctggacaccgtgcagaggaccctgtacagggacgtgaccctggagacctgcggccacctggtgagcctgggcctgctgctgcccaacctggacgtgatcagccacctggagaacggcgaggacccctggagggccgagcaggagccccccacccaggactggaagaccaccctggagaagggcggcccaagcagcggcgcccctcctcccagcggcggcaggcggcccaagcagcggcgcccctcctcccagcggcggcagcccagccggctccccaacctctaccgaggagggcacctctgagtccgccacccccgagagcggccctggcacctccaccgagcccagcgagggcagcgcacccggcagccctgccggcagccccacctccacagaggagggaaccagcaccgagcccagcgaaggcagcgccccaggcaccagcaccgagcctagtgagcaggagattaaacggatcaacaagatcagaagaagacttgtgaaagacagcaacaccaagaaggccggcaagacaggccccatgaaaaccctgctggttagagtgatgacacccgatctgagagagcggctggaaaacctgagaaagaagcctgaaaatatcccccagcccatcagcaatacatctagagccaacctgaataagctgctgaccgattacaccgaaatgaagaaggcgatcctgcatgtgtactgggaagagttccagaaggaccctgtgggcctgatgagccgggtggcccagcctgccagcaagaagatcgatcagaacaagctgaaacctgagatggacgagaagggcaacctgaccaccgccggctttgcctgctctcagtgtggccagcccctgttcgtgtacaagctggagcaggtgtctgagaagggcaaggcttacaccaactacttcggacggtgcaatgtggccgagcacgaaaagctgatcctgctggcccagctgaagcccgagaaggatagcgacgaagccgtgacatatagcctgggaaagtttgggcagagggccctggatttctacagcattcatgtgaccaaggagtccacccaccccgtgaagcccctggcccagatcgccggaaacagatacgcctccggacctgtgggaaaggccctgagcgacgcatgtatgggcacaatcgcctccttcctgtctaagtaccaggacatcatcatcgaacaccagaaggtggtgaagggcaaccagaagagactggagagcctgcgggagctggccggcaaggaaaacctggaataccctagcgtgaccctgccacctcagcctcacaccaaggagggcgttgatgcctacaacgaagtgatcgcccgggtgcgaatgtgggtgaacctgaacctgtggcagaagctgaagctaagcagagatgatgccaagcctctgctgagactgaagggattcccttcctttcctctggtcgagagacaggccaacgaagtggactggtgggacatggtgtgtaacgtgaagaagctgatcaacgagaaaaaggaggatggcaaggtgttttggcagaatctggctggctacaagagacaggaagccctgagaccatacctgagcagcgaggaagatcggaagaagggaaagaaattcgctcggtaccagctgggcgacctgctgctgcacctggaaaagaagcacggcgaggactggggaaaggtgtacgacgaggcctgggagcggattgacaagaaagtggaaggcctgagcaagcacatcaagctggaagaggaacggagaagcgaggacgcccagagcaaggccgccctgaccgactggctgcgggctaaggccagcttcgtgatcgagggcctgaaggaggccgacaaggacgagttctgcagatgcgagctgaagctgcagaagtggtacggggacctgcggggaaagcccttcgccatcgaagccgagaacagcatcctggacatcagcggcttcagcaagcagtacaactgtgccttcatctggcagaaggacggcgtgaagaagctgaacctgtacctgatcatcaactacttcaagggcggcaagctgcggttcaagaagatcaaacctgaagccttcgaagccaacagattctacaccgtgatcaacaaaaagagcggcgagatcgtgcccatggaggtgaacttcaacttcgacgaccccaacctgatcatcctgcctctggcctttggcaagagacagggcagagaattcatctggaacgacctgctgtccctggaaaccggcagcctgaagctggccaacggaagagtgatcgagaagacactgtacaacagaagaacccggcaggatgagcctgccctgttcgtggccctgaccttcgagcggcgggaggtcctggactcctccaatatcaaaccaatgaacctgatcggcgtggcaagaggcgaaaacatccccgccgtgatcgccctgaccgaccccgagggctgcccactgagccggtttaaggatagcctgggaaacccaacccacatcctgagaatcggcgagagctataaggagaagcagcggaccatccaggccaagaaggaggtggagcagcggagagccggcggctacagccggaagtacgccagcaaagccaagaatctggcagacgatatggtgagaaacaccgctagagatctgctgtactacgccgtgacccaggatgccatgctgatcttcgccaacctgagccggggcttcggccggcagggcaagcggaccttcatggccgagagacagtacacacggatggaggactggctgaccgccaagctggcctacgagggcctgagcaagacctacctgtccaagacactggcccagtacacctccaagacatgcagcaactgtgggtttaccatcaccagcgccgactacgacagggtgctggagaagctgaagaagacagcaacaggctggatgaccacaattaacggcaaggagctgaaggtggagggccagattacctactacaacagatacaagagacagaacgtagtcaaggacctgtccgtcgagctggatagactgagcgaagaatctgtgaacaacgacatctcctcctggacaaagggcagaagcggagaagctctgagcctcctgaagaaaagattctcccatagacccgtgcaggagaagttcgtgtgcctgaactgcggcttcgagacacacgcagccgagcaagccgccctgaacatcgccagatcctggctgttcctgcggagccaggagtacaagaaataccagacaaacaagacaaccggcaacaccgataagagagccttcgtcgagacctggcagtccttttaccggaagaagcttaaggaggtgtggaaacctgccgtgcggtctggcggatctggcggaggctccaccagccccaagaaaaagagaaaagtctaagctgccttctgcggggcttgccttctggccatgcccttcttctctcccttgcacctgtacctcttggtctttgaataaagcctgagtaggaaggctagcaaaaaaaaaaaaaaaaaaaaaaaaaaaaaaaaaaaaaaaaaaaaaaaaaaaaaaaaaaaaaaaaaaaaaaaaaaaaaaaagcccagccggctccccaacctctaccgaggagggcacctctgagtccgccacccccgagagcggccctggcacctccaccgagcccagcgagggcagcgcacccggcagccctgccggcagccccacctccacagaggagggaaccagcaccgagcccagcgaaggcagcgccccaggcaccagcaccgagcctagtgagcaggagattaaacggatcaacaagatcagaagaagacttgtgaaagacagcaacaccaagaaggccggcaagacaggccccatgaaaaccctgctggttagagtgatgacacccgatctgagagagcggctggaaaacctgagaaagaagcctgaaaatatcccccagcccatcagcaatacatctagagccaacctgaataagctgctgaccgattacaccgaaatgaagaaggcgatcctgcatgtgtactgggaagagttccagaaggaccctgtgggcctgatgagccgggtggcccagcctgccagcaagaagatcgatcagaacaagctgaaacctgagatggacgagaagggcaacctgaccaccgccggctttgcctgctctcagtgtggccagcccctgttcgtgtacaagctggagcaggtgtctgagaagggcaaggcttacaccaactacttcggacggtgcaatgtggccgagcacgaaaagctgatcctgctggcccagctgaagcccgagaaggatagcgacgaagccgtgacatatagcctgggaaagtttgggcagagggccctggatttctacagcattcatgtgaccaaggagtccacccaccccgtgaagcccctggcccagatcgccggaaacagatacgcctccggacctgtgggaaaggccctgagcgacgcatgtatgggcacaatcgcctccttcctgtctaagtaccaggacatcatcatcgaacaccagaaggtggtgaagggcaaccagaagagactggagagcctgcgggagctggccggcaaggaaaacctggaataccctagcgtgaccctgccacctcagcctcacaccaaggagggcgttgatgcctacaacgaagtgatcgcccgggtgcgaatgtgggtgaacctgaacctgtggcagaagctgaagctaagcagagatgatgccaagcctctgctgagactgaagggattcccttcctttcctctggtcgagagacaggccaacgaagtggactggtgggacatggtgtgtaacgtgaagaagctgatcaacgagaaaaaggaggatggcaaggtgttttggcagaatctggctggctacaagagacaggaagccctgagaccatacctgagcagcgaggaagatcggaagaagggaaagaaattcgctcggtaccagctgggcgacctgctgctgcacctggaaaagaagcacggcgaggactggggaaaggtgtacgacgaggcctgggagcggattgacaagaaagtggaaggcctgagcaagcacatcaagctggaagaggaacggagaagcgaggacgcccagagcaaggccgccctgaccgactggctgcgggctaaggccagcttcgtgatcgagggcctgaaggaggccgacaaggacgagttctgcagatgcgagctgaagctgcagaagtggtacggggacctgcggggaaagcccttcgccatcgaagccgagaacagcatcctggacatcagcggcttcagcaagcagtacaactgtgccttcatctggcagaaggacggcgtgaagaagctgaacctgtacctgatcatcaactacttcaagggcggcaagctgcggttcaagaagatcaaacctgaagccttcgaagccaacagattctacaccgtgatcaacaaaaagagcggcgagatcgtgcccatggaggtgaacttcaacttcgacgaccccaacctgatcatcctgcctctggcctttggcaagagacagggcagagaattcatctggaacgacctgctgtccctggaaaccggcagcctgaagctggccaacggaagagtgatcgagaagacactgtacaacagaagaacccggcaggatgagcctgccctgttcgtggccctgaccttcgagcggcgggaggtcctggactcctccaatatcaaaccaatgaacctgatcggcgtggcaagaggcgaaaacatccccgccgtgatcgccctgaccgaccccgagggctgcccactgagccggtttaaggatagcctgggaaacccaacccacatcctgagaatcggcgagagctataaggagaagcagcggaccatccaggccaagaaggaggtggagcagcggagagccggcggctacagccggaagtacgccagcaaagccaagaatctggcagacgatatggtgagaaacaccgctagagatctgctgtactacgccgtgacccaggatgccatgctgatcttcgccaacctgagccggggcttcggccggcagggcaagcggaccttcatggccgagagacagtacacacggatggaggactggctgaccgccaagctggcctacgagggcctgagcaagacctacctgtccaagacactggcccagtacacctccaagacatgcagcaactgtgggtttaccatcaccagcgccgactacgacagggtgctggagaagctgaagaagacagcaacaggctggatgaccacaattaacggcaaggagctgaaggtggagggccagattacctactacaacagatacaagagacagaacgtagtcaaggacctgtccgtcgagctggatagactgagcgaagaatctgtgaacaacgacatctcctcctggacaaagggcagaagcggagaagctctgagcctcctgaagaaaagattctcccatagacccgtgcaggagaagttcgtgtgcctgaactgcggcttcgagacacacgcagccgagcaagccgccctgaacatcgccagatcctggctgttcctgcggagccaggagtacaagaaataccagacaaacaagacaaccggcaacaccgataagagagccttcgtcgagacctggcagtccttttaccggaagaagcttaaggaggtgtggaaacctgccgtgcggtctggcggatctggcggaggctccaccagccccaagaaaaagagaaaagtctaagctgccttctgcggggcttgccttctggccatgcccttcttctctcccttgcacctgtacctcttggtctttgaataaagcctgagtaggaaggctagcaaaaaaaaaaaaaaaaaaaaaaaaaaaaaaaaaaaaaaaaaaaaaaaaaaaaaaaaaaaaaaaaaaaaaaaaaaaaaaaa

SEQ ID NO: 10472 - RNA, 8787 nt, synthetic construct
  source 1..8787: mol_type = other RNA
aggaaataagagagaaaagaagagtaagaagaaatataagagccaccatggcccctaagaagaagcgtaaagtgagccggatgaaccacgaccaggagttcgacccccctaaggtgtaccctcccgtccccgccgagaagagaaagcccatccgggtcctgagcctgttcgatggcatcgccaccggtctgctggtgctgaaggacctgggcatccaggtggataggtacattgcctccgaggtgtgcgaggactccatcaccgtgggaatggtgcgtcatcagggcaagatcatgtacgtgggcgacgtgcggagcgtgacacagaagcatatccaggagtggggccctttcgacctggtgatcggcggcagcccttgcaatgacctgagcatcgtgaacccagcccggaagggcctgtacgagggaaccggcagactgttcttcgagttttacagactgctgcacgacgcccggcctaaggaaggcgacgaccggcccttcttttggctgttcgagaatgtggtggccatgggagtcagcgacaagcgggatattagccggttcctggagagcaaccccgtgatgatcgatgccaaggaagtgagcgccgcccaccgggccagatacttctggggcaatctgcctggcatgaacagacccctggccagcaccgtgaacgacaagctggagctgcaggagtgcctggagcacggccggatcgccaagttcagcaaggtgagaaccatcaccacccgaagcaacagcatcaaacaaggcaaggaccagcactttcctgtgttcatgaacgagaaggaggacatcctgtggtgtaccgagatggagagagtgttcgggttcccagtccactacacagatgtcagcaacatgtctagactggccagacagagactgctgggaagaagctggtccgtccctgtgatcagacacctgttcgcccctctgaaggagtacttcgcctgcgtgagcagcggcaacagcaacgccaacagccggggccccagcttctctagcggcctggtgccactgtccctgagagggagccacatgggccccatggagatctacaaaaccgtgagcgcctggaagcggcagcctgtgcgcgtgctgagcctgtttcggaatatcgataaagtcctgaaaagcctgggattcctggagagcggctctggctccggcggtggcaccctgaagtacgtggaggatgtgacaaacgtggtcagacgggatgtggagaagtggggccccttcgatctggtgtacggcagcacccaacccctgggcagctcttgtgaccggtgccctggctggtacatgtttcagttccaccggatcctgcagtacgccctgccgagacaggagtcccagcggccattcttttggattttcatggacaacttgctgctgaccgaggatgaccaggaaactaccactcggttcctgcagaccgaagccgtgaccctgcaggacgtgagaggccgggactaccagaacgccatgcgggtgtggtccaacatccctggactgaaaagcaagcacgcacctctgacccctaaagaagaggagtacctgcaggcccaggtgcggagcagaagcaagctggacgcccctaaggtggatctgctggtgaagaattgcctcctgcccctgagagagtacttcaagtatttcagccagaatagtctgcccctgggaggcagcggcggcggcgcccagggccaggtgaccttcgaggacgtggccgtgtgcttcagccaggaggagtggggcctgctggacgagacccagaggctgctgtacaggagcgtgatgctggagaccttcagcctgatggccagcctgggcctgaccagcagcaggacccacgacatcagccagctggagaggtggggcgagcccttcctgagcgccagcggcgccatgagggccaccaggcccaccggctgctggcacggcggcccaagcagcggcgcccctcctcccagcggcggcaggcggcccaagcagcggcgcccctcctcccagcggcggcagcccagccggctccccaacctctaccgaggagggcacctctgagtccgccacccccgagagcggccctggcacctccaccgagcccagcgagggcagcgcacccggcagccctgccggcagccccacctccacagaggagggaaccagcaccgagcccagcgaaggcagcgccccaggcaccagcaccgagcctagtgagcaggagattaaacggatcaacaagatcagaagaagacttgtgaaagacagcaacaccaagaaggccggcaagacaggccccatgaaaaccctgctggttagagtgatgacacccgatctgagagagcggctggaaaacctgagaaagaagcctgaaaatatcccccagcccatcagcaatacatctagagccaacctgaataagctgctgaccgattacaccgaaatgaagaaggcgatcctgcatgtgtactgggaagagttccagaaggaccctgtgggcctgatgagccgggtggcccagcctgccagcaagaagatcgatcagaacaagctgaaacctgagatggacgagaagggcaacctgaccaccgccggctttgcctgctctcagtgtggccagcccctgttcgtgtacaagctggagcaggtgtctgagaagggcaaggcttacaccaactacttcggacggtgcaatgtggccgagcacgaaaagctgatcctgctggcccagctgaagcccgagaaggatagcgacgaagccgtgacatatagcctgggaaagtttgggcagagggccctggatttctacagcattcatgtgaccaaggagtccacccaccccgtgaagcccctggcccagatcgccggaaacagatacgcctccggacctgtgggaaaggccctgagcgacgcatgtatgggcacaatcgcctccttcctgtctaagtaccaggacatcatcatcgaacaccagaaggtggtgaagggcaaccagaagagactggagagcctgcgggagctggccggcaaggaaaacctggaataccctagcgtgaccctgccacctcagcctcacaccaaggagggcgttgatgcctacaacgaagtgatcgcccgggtgcgaatgtgggtgaacctgaacctgtggcagaagctgaagctaagcagagatgatgccaagcctctgctgagactgaagggattcccttcctttcctctggtcgagagacaggccaacgaagtggactggtgggacatggtgtgtaacgtgaagaagctgatcaacgagaaaaaggaggatggcaaggtgttttggcagaatctggctggctacaagagacaggaagccctgagaccatacctgagcagcgaggaagatcggaagaagggaaagaaattcgctcggtaccagctgggcgacctgctgctgcacctggaaaagaagcacggcgaggactggggaaaggtgtacgacgaggcctgggagcggattgacaagaaagtggaaggcctgagcaagcacatcaagctggaagaggaacggagaagcgaggacgcccagagcaaggccgccctgaccgactggctgcgggctaaggccagcttcgtgatcgagggcctgaaggaggccgacaaggacgagttctgcagatgcgagctgaagctgcagaagtggtacggggacctgcggggaaagcccttcgccatcgaagccgagaacagcatcctggacatcagcggcttcagcaagcagtacaactgtgccttcatctggcagaaggacggcgtgaagaagctgaacctgtacctgatcatcaactacttcaagggcggcaagctgcggttcaagaagatcaaacctgaagccttcgaagccaacagattctacaccgtgatcaacaaaaagagcggcgagatcgtgcccatggaggtgaacttcaacttcgacgaccccaacctgatcatcctgcctctggcctttggcaagagacagggcagagaattcatctggaacgacctgctgtccctggaaaccggcagcctgaagctggccaacggaagagtgatcgagaagacactgtacaacagaagaacccggcaggatgagcctgccctgttcgtggccctgaccttcgagcggcgggaggtcctggactcctccaatatcaaaccaatgaacctgatcggcgtggcaagaggcgaaaacatccccgccgtgatcgccctgaccgaccccgagggctgcccactgagccggtttaaggatagcctgggaaacccaacccacatcctgagaatcggcgagagctataaggagaagcagcggaccatccaggccaagaaggaggtggagcagcggagagccggcggctacagccggaagtacgccagcaaagccaagaatctggcagacgatatggtgagaaacaccgctagagatctgctgtactacgccgtgacccaggatgccatgctgatcttcgccaacctgagccggggcttcggccggcagggcaagcggaccttcatggccgagagacagtacacacggatggaggactggctgaccgccaagctggcctacgagggcctgagcaagacctacctgtccaagacactggcccagtacacctccaagacatgcagcaactgtgggtttaccatcaccagcgccgactacgacagggtgctggagaagctgaagaagacagcaacaggctggatgaccacaattaacggcaaggagctgaaggtggagggccagattacctactacaacagatacaagagacagaacgtagtcaaggacctgtccgtcgagctggatagactgagcgaagaatctgtgaacaacgacatctcctcctggacaaagggcagaagcggagaagctctgagcctcctgaagaaaagattctcccatagacccgtgcaggagaagttcgtgtgcctgaactgcggcttcgagacacacgcagccgagcaagccgccctgaacatcgccagatcctggctgttcctgcggagccaggagtacaagaaataccagacaaacaagacaaccggcaacaccgataagagagccttcgtcgagacctggcagtccttttaccggaagaagcttaaggaggtgtggaaacctgccgtgcggtctggcggatctggcggaggctccaccagccccaagaaaaagagaaaagtctaagctgccttctgcggggcttgccttctggccatgcccttcttctctcccttgcacctgtacctcttggtctttgaataaagcctgagtaggaaggctagcaaaaaaaaaaaaaaaaaaaaaaaaaaaaaaaaaaaaaaaaaaaaaaaaaaaaaaaaaaaaaaaaaaaaaaaaaaaaaaaagcccagccggctccccaacctctaccgaggagggcacctctgagtccgccacccccgagagcggccctggcacctccaccgagcccagcgagggcagcgcacccggcagccctgccggcagccccacctccacagaggagggaaccagcaccgagcccagcgaaggcagcgccccaggcaccagcaccgagcctagtgagcaggagattaaacggatcaacaagatcagaagaagacttgtgaaagacagcaacaccaagaaggccggcaagacaggccccatgaaaaccctgctggttagagtgatgacacccgatctgagagagcggctggaaaacctgagaaagaagcctgaaaatatcccccagcccatcagcaatacatctagagccaacctgaataagctgctgaccgattacaccgaaatgaagaaggcgatcctgcatgtgtactgggaagagttccagaaggaccctgtgggcctgatgagccgggtggcccagcctgccagcaagaagatcgatcagaacaagctgaaacctgagatggacgagaagggcaacctgaccaccgccggctttgcctgctctcagtgtggccagcccctgttcgtgtacaagctggagcaggtgtctgagaagggcaaggcttacaccaactacttcggacggtgcaatgtggccgagcacgaaaagctgatcctgctggcccagctgaagcccgagaaggatagcgacgaagccgtgacatatagcctgggaaagtttgggcagagggccctggatttctacagcattcatgtgaccaaggagtccacccaccccgtgaagcccctggcccagatcgccggaaacagatacgcctccggacctgtgggaaaggccctgagcgacgcatgtatgggcacaatcgcctccttcctgtctaagtaccaggacatcatcatcgaacaccagaaggtggtgaagggcaaccagaagagactggagagcctgcgggagctggccggcaaggaaaacctggaataccctagcgtgaccctgccacctcagcctcacaccaaggagggcgttgatgcctacaacgaagtgatcgcccgggtgcgaatgtgggtgaacctgaacctgtggcagaagctgaagctaagcagagatgatgccaagcctctgctgagactgaagggattcccttcctttcctctggtcgagagacaggccaacgaagtggactggtgggacatggtgtgtaacgtgaagaagctgatcaacgagaaaaaggaggatggcaaggtgttttggcagaatctggctggctacaagagacaggaagccctgagaccatacctgagcagcgaggaagatcggaagaagggaaagaaattcgctcggtaccagctgggcgacctgctgctgcacctggaaaagaagcacggcgaggactggggaaaggtgtacgacgaggcctgggagcggattgacaagaaagtggaaggcctgagcaagcacatcaagctggaagaggaacggagaagcgaggacgcccagagcaaggccgccctgaccgactggctgcgggctaaggccagcttcgtgatcgagggcctgaaggaggccgacaaggacgagttctgcagatgcgagctgaagctgcagaagtggtacggggacctgcggggaaagcccttcgccatcgaagccgagaacagcatcctggacatcagcggcttcagcaagcagtacaactgtgccttcatctggcagaaggacggcgtgaagaagctgaacctgtacctgatcatcaactacttcaagggcggcaagctgcggttcaagaagatcaaacctgaagccttcgaagccaacagattctacaccgtgatcaacaaaaagagcggcgagatcgtgcccatggaggtgaacttcaacttcgacgaccccaacctgatcatcctgcctctggcctttggcaagagacagggcagagaattcatctggaacgacctgctgtccctggaaaccggcagcctgaagctggccaacggaagagtgatcgagaagacactgtacaacagaagaacccggcaggatgagcctgccctgttcgtggccctgaccttcgagcggcgggaggtcctggactcctccaatatcaaaccaatgaacctgatcggcgtggcaagaggcgaaaacatccccgccgtgatcgccctgaccgaccccgagggctgcccactgagccggtttaaggatagcctgggaaacccaacccacatcctgagaatcggcgagagctataaggagaagcagcggaccatccaggccaagaaggaggtggagcagcggagagccggcggctacagccggaagtacgccagcaaagccaagaatctggcagacgatatggtgagaaacaccgctagagatctgctgtactacgccgtgacccaggatgccatgctgatcttcgccaacctgagccggggcttcggccggcagggcaagcggaccttcatggccgagagacagtacacacggatggaggactggctgaccgccaagctggcctacgagggcctgagcaagacctacctgtccaagacactggcccagtacacctccaagacatgcagcaactgtgggtttaccatcaccagcgccgactacgacagggtgctggagaagctgaagaagacagcaacaggctggatgaccacaattaacggcaaggagctgaaggtggagggccagattacctactacaacagatacaagagacagaacgtagtcaaggacctgtccgtcgagctggatagactgagcgaagaatctgtgaacaacgacatctcctcctggacaaagggcagaagcggagaagctctgagcctcctgaagaaaagattctcccatagacccgtgcaggagaagttcgtgtgcctgaactgcggcttcgagacacacgcagccgagcaagccgccctgaacatcgccagatcctggctgttcctgcggagccaggagtacaagaaataccagacaaacaagacaaccggcaacaccgataagagagccttcgtcgagacctggcagtccttttaccggaagaagcttaaggaggtgtggaaacctgccgtgcggtctggcggatctggcggaggctccaccagccccaagaaaaagagaaaagtctaagctgccttctgcggggcttgccttctggccatgcccttcttctctcccttgcacctgtacctcttggtctttgaataaagcctgagtaggaaggctagcaaaaaaaaaaaaaaaaaaaaaaaaaaaaaaaaaaaaaaaaaaaaaaaaaaaaaaaaaaaaaaaaaaaaaaaaaaaaaaaa

SEQ ID NO: 10473 - RNA, 8784 nt, synthetic construct
  source 1..8784: mol_type = other RNA
aggaaataagagagaaaagaagagtaagaagaaatataagagccaccatggcccctaagaagaagcgtaaagtgagccggatgaaccacgaccaggagttcgacccccctaaggtgtaccctcccgtccccgccgagaagagaaagcccatccgggtcctgagcctgttcgatggcatcgccaccggtctgctggtgctgaaggacctgggcatccaggtggataggtacattgcctccgaggtgtgcgaggactccatcaccgtgggaatggtgcgtcatcagggcaagatcatgtacgtgggcgacgtgcggagcgtgacacagaagcatatccaggagtggggccctttcgacctggtgatcggcggcagcccttgcaatgacctgagcatcgtgaacccagcccggaagggcctgtacgagggaaccggcagactgttcttcgagttttacagactgctgcacgacgcccggcctaaggaaggcgacgaccggcccttcttttggctgttcgagaatgtggtggccatgggagtcagcgacaagcgggatattagccggttcctggagagcaaccccgtgatgatcgatgccaaggaagtgagcgccgcccaccgggccagatacttctggggcaatctgcctggcatgaacagacccctggccagcaccgtgaacgacaagctggagctgcaggagtgcctggagcacggccggatcgccaagttcagcaaggtgagaaccatcaccacccgaagcaacagcatcaaacaaggcaaggaccagcactttcctgtgttcatgaacgagaaggaggacatcctgtggtgtaccgagatggagagagtgttcgggttcccagtccactacacagatgtcagcaacatgtctagactggccagacagagactgctgggaagaagctggtccgtccctgtgatcagacacctgttcgcccctctgaaggagtacttcgcctgcgtgagcagcggcaacagcaacgccaacagccggggccccagcttctctagcggcctggtgccactgtccctgagagggagccacatgggccccatggagatctacaaaaccgtgagcgcctggaagcggcagcctgtgcgcgtgctgagcctgtttcggaatatcgataaagtcctgaaaagcctgggattcctggagagcggctctggctccggcggtggcaccctgaagtacgtggaggatgtgacaaacgtggtcagacgggatgtggagaagtggggccccttcgatctggtgtacggcagcacccaacccctgggcagctcttgtgaccggtgccctggctggtacatgtttcagttccaccggatcctgcagtacgccctgccgagacaggagtcccagcggccattcttttggattttcatggacaacttgctgctgaccgaggatgaccaggaaactaccactcggttcctgcagaccgaagccgtgaccctgcaggacgtgagaggccgggactaccagaacgccatgcgggtgtggtccaacatccctggactgaaaagcaagcacgcacctctgacccctaaagaagaggagtacctgcaggcccaggtgcggagcagaagcaagctggacgcccctaaggtggatctgctggtgaagaattgcctcctgcccctgagagagtacttcaagtatttcagccagaatagtctgcccctgggaggcagcggcggcggcatgggcgagcccctggagttcagggacgtggccatcgagttcagcctggaggagtggcactgcctggacaccgcccagaggaacctgtacagggacgtgatgctggagaactacaggaacctggtgttcctgggcatcgccgtgagcaagcccgacctgatcacctggctggagcagggcaagaagcccctgaccgtgaagggccacgagatgatcgccaccccccccggcaggtgcaagggcggcccaagcagcggcgcccctcctcccagcggcggcaggcggcccaagcagcggcgcccctcctcccagcggcggcagcccagccggctccccaacctctaccgaggagggcacctctgagtccgccacccccgagagcggccctggcacctccaccgagcccagcgagggcagcgcacccggcagccctgccggcagccccacctccacagaggagggaaccagcaccgagcccagcgaaggcagcgccccaggcaccagcaccgagcctagtgagcaggagattaaacggatcaacaagatcagaagaagacttgtgaaagacagcaacaccaagaaggccggcaagacaggccccatgaaaaccctgctggttagagtgatgacacccgatctgagagagcggctggaaaacctgagaaagaagcctgaaaatatcccccagcccatcagcaatacatctagagccaacctgaataagctgctgaccgattacaccgaaatgaagaaggcgatcctgcatgtgtactgggaagagttccagaaggaccctgtgggcctgatgagccgggtggcccagcctgccagcaagaagatcgatcagaacaagctgaaacctgagatggacgagaagggcaacctgaccaccgccggctttgcctgctctcagtgtggccagcccctgttcgtgtacaagctggagcaggtgtctgagaagggcaaggcttacaccaactacttcggacggtgcaatgtggccgagcacgaaaagctgatcctgctggcccagctgaagcccgagaaggatagcgacgaagccgtgacatatagcctgggaaagtttgggcagagggccctggatttctacagcattcatgtgaccaaggagtccacccaccccgtgaagcccctggcccagatcgccggaaacagatacgcctccggacctgtgggaaaggccctgagcgacgcatgtatgggcacaatcgcctccttcctgtctaagtaccaggacatcatcatcgaacaccagaaggtggtgaagggcaaccagaagagactggagagcctgcgggagctggccggcaaggaaaacctggaataccctagcgtgaccctgccacctcagcctcacaccaaggagggcgttgatgcctacaacgaagtgatcgcccgggtgcgaatgtgggtgaacctgaacctgtggcagaagctgaagctaagcagagatgatgccaagcctctgctgagactgaagggattcccttcctttcctctggtcgagagacaggccaacgaagtggactggtgggacatggtgtgtaacgtgaagaagctgatcaacgagaaaaaggaggatggcaaggtgttttggcagaatctggctggctacaagagacaggaagccctgagaccatacctgagcagcgaggaagatcggaagaagggaaagaaattcgctcggtaccagctgggcgacctgctgctgcacctggaaaagaagcacggcgaggactggggaaaggtgtacgacgaggcctgggagcggattgacaagaaagtggaaggcctgagcaagcacatcaagctggaagaggaacggagaagcgaggacgcccagagcaaggccgccctgaccgactggctgcgggctaaggccagcttcgtgatcgagggcctgaaggaggccgacaaggacgagttctgcagatgcgagctgaagctgcagaagtggtacggggacctgcggggaaagcccttcgccatcgaagccgagaacagcatcctggacatcagcggcttcagcaagcagtacaactgtgccttcatctggcagaaggacggcgtgaagaagctgaacctgtacctgatcatcaactacttcaagggcggcaagctgcggttcaagaagatcaaacctgaagccttcgaagccaacagattctacaccgtgatcaacaaaaagagcggcgagatcgtgcccatggaggtgaacttcaacttcgacgaccccaacctgatcatcctgcctctggcctttggcaagagacagggcagagaattcatctggaacgacctgctgtccctggaaaccggcagcctgaagctggccaacggaagagtgatcgagaagacactgtacaacagaagaacccggcaggatgagcctgccctgttcgtggccctgaccttcgagcggcgggaggtcctggactcctccaatatcaaaccaatgaacctgatcggcgtggcaagaggcgaaaacatccccgccgtgatcgccctgaccgaccccgagggctgcccactgagccggtttaaggatagcctgggaaacccaacccacatcctgagaatcggcgagagctataaggagaagcagcggaccatccaggccaagaaggaggtggagcagcggagagccggcggctacagccggaagtacgccagcaaagccaagaatctggcagacgatatggtgagaaacaccgctagagatctgctgtactacgccgtgacccaggatgccatgctgatcttcgccaacctgagccggggcttcggccggcagggcaagcggaccttcatggccgagagacagtacacacggatggaggactggctgaccgccaagctggcctacgagggcctgagcaagacctacctgtccaagacactggcccagtacacctccaagacatgcagcaactgtgggtttaccatcaccagcgccgactacgacagggtgctggagaagctgaagaagacagcaacaggctggatgaccacaattaacggcaaggagctgaaggtggagggccagattacctactacaacagatacaagagacagaacgtagtcaaggacctgtccgtcgagctggatagactgagcgaagaatctgtgaacaacgacatctcctcctggacaaagggcagaagcggagaagctctgagcctcctgaagaaaagattctcccatagacccgtgcaggagaagttcgtgtgcctgaactgcggcttcgagacacacgcagccgagcaagccgccctgaacatcgccagatcctggctgttcctgcggagccaggagtacaagaaataccagacaaacaagacaaccggcaacaccgataagagagccttcgtcgagacctggcagtccttttaccggaagaagcttaaggaggtgtggaaacctgccgtgcggtctggcggatctggcggaggctccaccagccccaagaaaaagagaaaagtctaagctgccttctgcggggcttgccttctggccatgcccttcttctctcccttgcacctgtacctcttggtctttgaataaagcctgagtaggaaggctagcaaaaaaaaaaaaaaaaaaaaaaaaaaaaaaaaaaaaaaaaaaaaaaaaaaaaaaaaaaaaaaaaaaaaaaaaaaaaaaaagcccagccggctccccaacctctaccgaggagggcacctctgagtccgccacccccgagagcggccctggcacctccaccgagcccagcgagggcagcgcacccggcagccctgccggcagccccacctccacagaggagggaaccagcaccgagcccagcgaaggcagcgccccaggcaccagcaccgagcctagtgagcaggagattaaacggatcaacaagatcagaagaagacttgtgaaagacagcaacaccaagaaggccggcaagacaggccccatgaaaaccctgctggttagagtgatgacacccgatctgagagagcggctggaaaacctgagaaagaagcctgaaaatatcccccagcccatcagcaatacatctagagccaacctgaataagctgctgaccgattacaccgaaatgaagaaggcgatcctgcatgtgtactgggaagagttccagaaggaccctgtgggcctgatgagccgggtggcccagcctgccagcaagaagatcgatcagaacaagctgaaacctgagatggacgagaagggcaacctgaccaccgccggctttgcctgctctcagtgtggccagcccctgttcgtgtacaagctggagcaggtgtctgagaagggcaaggcttacaccaactacttcggacggtgcaatgtggccgagcacgaaaagctgatcctgctggcccagctgaagcccgagaaggatagcgacgaagccgtgacatatagcctgggaaagtttgggcagagggccctggatttctacagcattcatgtgaccaaggagtccacccaccccgtgaagcccctggcccagatcgccggaaacagatacgcctccggacctgtgggaaaggccctgagcgacgcatgtatgggcacaatcgcctccttcctgtctaagtaccaggacatcatcatcgaacaccagaaggtggtgaagggcaaccagaagagactggagagcctgcgggagctggccggcaaggaaaacctggaataccctagcgtgaccctgccacctcagcctcacaccaaggagggcgttgatgcctacaacgaagtgatcgcccgggtgcgaatgtgggtgaacctgaacctgtggcagaagctgaagctaagcagagatgatgccaagcctctgctgagactgaagggattcccttcctttcctctggtcgagagacaggccaacgaagtggactggtgggacatggtgtgtaacgtgaagaagctgatcaacgagaaaaaggaggatggcaaggtgttttggcagaatctggctggctacaagagacaggaagccctgagaccatacctgagcagcgaggaagatcggaagaagggaaagaaattcgctcggtaccagctgggcgacctgctgctgcacctggaaaagaagcacggcgaggactggggaaaggtgtacgacgaggcctgggagcggattgacaagaaagtggaaggcctgagcaagcacatcaagctggaagaggaacggagaagcgaggacgcccagagcaaggccgccctgaccgactggctgcgggctaaggccagcttcgtgatcgagggcctgaaggaggccgacaaggacgagttctgcagatgcgagctgaagctgcagaagtggtacggggacctgcggggaaagcccttcgccatcgaagccgagaacagcatcctggacatcagcggcttcagcaagcagtacaactgtgccttcatctggcagaaggacggcgtgaagaagctgaacctgtacctgatcatcaactacttcaagggcggcaagctgcggttcaagaagatcaaacctgaagccttcgaagccaacagattctacaccgtgatcaacaaaaagagcggcgagatcgtgcccatggaggtgaacttcaacttcgacgaccccaacctgatcatcctgcctctggcctttggcaagagacagggcagagaattcatctggaacgacctgctgtccctggaaaccggcagcctgaagctggccaacggaagagtgatcgagaagacactgtacaacagaagaacccggcaggatgagcctgccctgttcgtggccctgaccttcgagcggcgggaggtcctggactcctccaatatcaaaccaatgaacctgatcggcgtggcaagaggcgaaaacatccccgccgtgatcgccctgaccgaccccgagggctgcccactgagccggtttaaggatagcctgggaaacccaacccacatcctgagaatcggcgagagctataaggagaagcagcggaccatccaggccaagaaggaggtggagcagcggagagccggcggctacagccggaagtacgccagcaaagccaagaatctggcagacgatatggtgagaaacaccgctagagatctgctgtactacgccgtgacccaggatgccatgctgatcttcgccaacctgagccggggcttcggccggcagggcaagcggaccttcatggccgagagacagtacacacggatggaggactggctgaccgccaagctggcctacgagggcctgagcaagacctacctgtccaagacactggcccagtacacctccaagacatgcagcaactgtgggtttaccatcaccagcgccgactacgacagggtgctggagaagctgaagaagacagcaacaggctggatgaccacaattaacggcaaggagctgaaggtggagggccagattacctactacaacagatacaagagacagaacgtagtcaaggacctgtccgtcgagctggatagactgagcgaagaatctgtgaacaacgacatctcctcctggacaaagggcagaagcggagaagctctgagcctcctgaagaaaagattctcccatagacccgtgcaggagaagttcgtgtgcctgaactgcggcttcgagacacacgcagccgagcaagccgccctgaacatcgccagatcctggctgttcctgcggagccaggagtacaagaaataccagacaaacaagacaaccggcaacaccgataagagagccttcgtcgagacctggcagtccttttaccggaagaagcttaaggaggtgtggaaacctgccgtgcggtctggcggatctggcggaggctccaccagccccaagaaaaagagaaaagtctaagctgccttctgcggggcttgccttctggccatgcccttcttctctcccttgcacctgtacctcttggtctttgaataaagcctgagtaggaaggctagcaaaaaaaaaaaaaaaaaaaaaaaaaaaaaaaaaaaaaaaaaaaaaaaaaaaaaaaaaaaaaaaaaaaaaaaaaaaaaaaa

SEQ ID NO: 10474 - RNA, 8787 nt, synthetic construct
  source 1..8787: mol_type = other RNA
aggaaataagagagaaaagaagagtaagaagaaatataagagccaccatggcccctaagaagaagcgtaaagtgagccggatgaaccacgaccaggagttcgacccccctaaggtgtaccctcccgtccccgccgagaagagaaagcccatccgggtcctgagcctgttcgatggcatcgccaccggtctgctggtgctgaaggacctgggcatccaggtggataggtacattgcctccgaggtgtgcgaggactccatcaccgtgggaatggtgcgtcatcagggcaagatcatgtacgtgggcgacgtgcggagcgtgacacagaagcatatccaggagtggggccctttcgacctggtgatcggcggcagcccttgcaatgacctgagcatcgtgaacccagcccggaagggcctgtacgagggaaccggcagactgttcttcgagttttacagactgctgcacgacgcccggcctaaggaaggcgacgaccggcccttcttttggctgttcgagaatgtggtggccatgggagtcagcgacaagcgggatattagccggttcctggagagcaaccccgtgatgatcgatgccaaggaagtgagcgccgcccaccgggccagatacttctggggcaatctgcctggcatgaacagacccctggccagcaccgtgaacgacaagctggagctgcaggagtgcctggagcacggccggatcgccaagttcagcaaggtgagaaccatcaccacccgaagcaacagcatcaaacaaggcaaggaccagcactttcctgtgttcatgaacgagaaggaggacatcctgtggtgtaccgagatggagagagtgttcgggttcccagtccactacacagatgtcagcaacatgtctagactggccagacagagactgctgggaagaagctggtccgtccctgtgatcagacacctgttcgcccctctgaaggagtacttcgcctgcgtgagcagcggcaacagcaacgccaacagccggggccccagcttctctagcggcctggtgccactgtccctgagagggagccacatgggccccatggagatctacaaaaccgtgagcgcctggaagcggcagcctgtgcgcgtgctgagcctgtttcggaatatcgataaagtcctgaaaagcctgggattcctggagagcggctctggctccggcggtggcaccctgaagtacgtggaggatgtgacaaacgtggtcagacgggatgtggagaagtggggccccttcgatctggtgtacggcagcacccaacccctgggcagctcttgtgaccggtgccctggctggtacatgtttcagttccaccggatcctgcagtacgccctgccgagacaggagtcccagcggccattcttttggattttcatggacaacttgctgctgaccgaggatgaccaggaaactaccactcggttcctgcagaccgaagccgtgaccctgcaggacgtgagaggccgggactaccagaacgccatgcgggtgtggtccaacatccctggactgaaaagcaagcacgcacctctgacccctaaagaagaggagtacctgcaggcccaggtgcggagcagaagcaagctggacgcccctaaggtggatctgctggtgaagaattgcctcctgcccctgagagagtacttcaagtatttcagccagaatagtctgcccctgggaggcagcggcggcggccccggccaggaggtggtgaccttcaaggacatggccgtggacttcaccagggaggagtggaggctgctgacccccccccagaaggagctgtacaaggaggtgatgctggagaacgccaggaacctgctgagcgtgggcttcgccgtgcccggcgacgtgatcagctacctggagcagagggaggccccctggctgctggagcaggagggcctgaggagctgcagccccggcgacatcagccccggcggcccaagcagcggcgcccctcctcccagcggcggcaggcggcccaagcagcggcgcccctcctcccagcggcggcagcccagccggctccccaacctctaccgaggagggcacctctgagtccgccacccccgagagcggccctggcacctccaccgagcccagcgagggcagcgcacccggcagccctgccggcagccccacctccacagaggagggaaccagcaccgagcccagcgaaggcagcgccccaggcaccagcaccgagcctagtgagcaggagattaaacggatcaacaagatcagaagaagacttgtgaaagacagcaacaccaagaaggccggcaagacaggccccatgaaaaccctgctggttagagtgatgacacccgatctgagagagcggctggaaaacctgagaaagaagcctgaaaatatcccccagcccatcagcaatacatctagagccaacctgaataagctgctgaccgattacaccgaaatgaagaaggcgatcctgcatgtgtactgggaagagttccagaaggaccctgtgggcctgatgagccgggtggcccagcctgccagcaagaagatcgatcagaacaagctgaaacctgagatggacgagaagggcaacctgaccaccgccggctttgcctgctctcagtgtggccagcccctgttcgtgtacaagctggagcaggtgtctgagaagggcaaggcttacaccaactacttcggacggtgcaatgtggccgagcacgaaaagctgatcctgctggcccagctgaagcccgagaaggatagcgacgaagccgtgacatatagcctgggaaagtttgggcagagggccctggatttctacagcattcatgtgaccaaggagtccacccaccccgtgaagcccctggcccagatcgccggaaacagatacgcctccggacctgtgggaaaggccctgagcgacgcatgtatgggcacaatcgcctccttcctgtctaagtaccaggacatcatcatcgaacaccagaaggtggtgaagggcaaccagaagagactggagagcctgcgggagctggccggcaaggaaaacctggaataccctagcgtgaccctgccacctcagcctcacaccaaggagggcgttgatgcctacaacgaagtgatcgcccgggtgcgaatgtgggtgaacctgaacctgtggcagaagctgaagctaagcagagatgatgccaagcctctgctgagactgaagggattcccttcctttcctctggtcgagagacaggccaacgaagtggactggtgggacatggtgtgtaacgtgaagaagctgatcaacgagaaaaaggaggatggcaaggtgttttggcagaatctggctggctacaagagacaggaagccctgagaccatacctgagcagcgaggaagatcggaagaagggaaagaaattcgctcggtaccagctgggcgacctgctgctgcacctggaaaagaagcacggcgaggactggggaaaggtgtacgacgaggcctgggagcggattgacaagaaagtggaaggcctgagcaagcacatcaagctggaagaggaacggagaagcgaggacgcccagagcaaggccgccctgaccgactggctgcgggctaaggccagcttcgtgatcgagggcctgaaggaggccgacaaggacgagttctgcagatgcgagctgaagctgcagaagtggtacggggacctgcggggaaagcccttcgccatcgaagccgagaacagcatcctggacatcagcggcttcagcaagcagtacaactgtgccttcatctggcagaaggacggcgtgaagaagctgaacctgtacctgatcatcaactacttcaagggcggcaagctgcggttcaagaagatcaaacctgaagccttcgaagccaacagattctacaccgtgatcaacaaaaagagcggcgagatcgtgcccatggaggtgaacttcaacttcgacgaccccaacctgatcatcctgcctctggcctttggcaagagacagggcagagaattcatctggaacgacctgctgtccctggaaaccggcagcctgaagctggccaacggaagagtgatcgagaagacactgtacaacagaagaacccggcaggatgagcctgccctgttcgtggccctgaccttcgagcggcgggaggtcctggactcctccaatatcaaaccaatgaacctgatcggcgtggcaagaggcgaaaacatccccgccgtgatcgccctgaccgaccccgagggctgcccactgagccggtttaaggatagcctgggaaacccaacccacatcctgagaatcggcgagagctataaggagaagcagcggaccatccaggccaagaaggaggtggagcagcggagagccggcggctacagccggaagtacgccagcaaagccaagaatctggcagacgatatggtgagaaacaccgctagagatctgctgtactacgccgtgacccaggatgccatgctgatcttcgccaacctgagccggggcttcggccggcagggcaagcggaccttcatggccgagagacagtacacacggatggaggactggctgaccgccaagctggcctacgagggcctgagcaagacctacctgtccaagacactggcccagtacacctccaagacatgcagcaactgtgggtttaccatcaccagcgccgactacgacagggtgctggagaagctgaagaagacagcaacaggctggatgaccacaattaacggcaaggagctgaaggtggagggccagattacctactacaacagatacaagagacagaacgtagtcaaggacctgtccgtcgagctggatagactgagcgaagaatctgtgaacaacgacatctcctcctggacaaagggcagaagcggagaagctctgagcctcctgaagaaaagattctcccatagacccgtgcaggagaagttcgtgtgcctgaactgcggcttcgagacacacgcagccgagcaagccgccctgaacatcgccagatcctggctgttcctgcggagccaggagtacaagaaataccagacaaacaagacaaccggcaacaccgataagagagccttcgtcgagacctggcagtccttttaccggaagaagcttaaggaggtgtggaaacctgccgtgcggtctggcggatctggcggaggctccaccagccccaagaaaaagagaaaagtctaagctgccttctgcggggcttgccttctggccatgcccttcttctctcccttgcacctgtacctcttggtctttgaataaagcctgagtaggaaggctagcaaaaaaaaaaaaaaaaaaaaaaaaaaaaaaaaaaaaaaaaaaaaaaaaaaaaaaaaaaaaaaaaaaaaaaaaaaaaaaaagcccagccggctccccaacctctaccgaggagggcacctctgagtccgccacccccgagagcggccctggcacctccaccgagcccagcgagggcagcgcacccggcagccctgccggcagccccacctccacagaggagggaaccagcaccgagcccagcgaaggcagcgccccaggcaccagcaccgagcctagtgagcaggagattaaacggatcaacaagatcagaagaagacttgtgaaagacagcaacaccaagaaggccggcaagacaggccccatgaaaaccctgctggttagagtgatgacacccgatctgagagagcggctggaaaacctgagaaagaagcctgaaaatatcccccagcccatcagcaatacatctagagccaacctgaataagctgctgaccgattacaccgaaatgaagaaggcgatcctgcatgtgtactgggaagagttccagaaggaccctgtgggcctgatgagccgggtggcccagcctgccagcaagaagatcgatcagaacaagctgaaacctgagatggacgagaagggcaacctgaccaccgccggctttgcctgctctcagtgtggccagcccctgttcgtgtacaagctggagcaggtgtctgagaagggcaaggcttacaccaactacttcggacggtgcaatgtggccgagcacgaaaagctgatcctgctggcccagctgaagcccgagaaggatagcgacgaagccgtgacatatagcctgggaaagtttgggcagagggccctggatttctacagcattcatgtgaccaaggagtccacccaccccgtgaagcccctggcccagatcgccggaaacagatacgcctccggacctgtgggaaaggccctgagcgacgcatgtatgggcacaatcgcctccttcctgtctaagtaccaggacatcatcatcgaacaccagaaggtggtgaagggcaaccagaagagactggagagcctgcgggagctggccggcaaggaaaacctggaataccctagcgtgaccctgccacctcagcctcacaccaaggagggcgttgatgcctacaacgaagtgatcgcccgggtgcgaatgtgggtgaacctgaacctgtggcagaagctgaagctaagcagagatgatgccaagcctctgctgagactgaagggattcccttcctttcctctggtcgagagacaggccaacgaagtggactggtgggacatggtgtgtaacgtgaagaagctgatcaacgagaaaaaggaggatggcaaggtgttttggcagaatctggctggctacaagagacaggaagccctgagaccatacctgagcagcgaggaagatcggaagaagggaaagaaattcgctcggtaccagctgggcgacctgctgctgcacctggaaaagaagcacggcgaggactggggaaaggtgtacgacgaggcctgggagcggattgacaagaaagtggaaggcctgagcaagcacatcaagctggaagaggaacggagaagcgaggacgcccagagcaaggccgccctgaccgactggctgcgggctaaggccagcttcgtgatcgagggcctgaaggaggccgacaaggacgagttctgcagatgcgagctgaagctgcagaagtggtacggggacctgcggggaaagcccttcgccatcgaagccgagaacagcatcctggacatcagcggcttcagcaagcagtacaactgtgccttcatctggcagaaggacggcgtgaagaagctgaacctgtacctgatcatcaactacttcaagggcggcaagctgcggttcaagaagatcaaacctgaagccttcgaagccaacagattctacaccgtgatcaacaaaaagagcggcgagatcgtgcccatggaggtgaacttcaacttcgacgaccccaacctgatcatcctgcctctggcctttggcaagagacagggcagagaattcatctggaacgacctgctgtccctggaaaccggcagcctgaagctggccaacggaagagtgatcgagaagacactgtacaacagaagaacccggcaggatgagcctgccctgttcgtggccctgaccttcgagcggcgggaggtcctggactcctccaatatcaaaccaatgaacctgatcggcgtggcaagaggcgaaaacatccccgccgtgatcgccctgaccgaccccgagggctgcccactgagccggtttaaggatagcctgggaaacccaacccacatcctgagaatcggcgagagctataaggagaagcagcggaccatccaggccaagaaggaggtggagcagcggagagccggcggctacagccggaagtacgccagcaaagccaagaatctggcagacgatatggtgagaaacaccgctagagatctgctgtactacgccgtgacccaggatgccatgctgatcttcgccaacctgagccggggcttcggccggcagggcaagcggaccttcatggccgagagacagtacacacggatggaggactggctgaccgccaagctggcctacgagggcctgagcaagacctacctgtccaagacactggcccagtacacctccaagacatgcagcaactgtgggtttaccatcaccagcgccgactacgacagggtgctggagaagctgaagaagacagcaacaggctggatgaccacaattaacggcaaggagctgaaggtggagggccagattacctactacaacagatacaagagacagaacgtagtcaaggacctgtccgtcgagctggatagactgagcgaagaatctgtgaacaacgacatctcctcctggacaaagggcagaagcggagaagctctgagcctcctgaagaaaagattctcccatagacccgtgcaggagaagttcgtgtgcctgaactgcggcttcgagacacacgcagccgagcaagccgccctgaacatcgccagatcctggctgttcctgcggagccaggagtacaagaaataccagacaaacaagacaaccggcaacaccgataagagagccttcgtcgagacctggcagtccttttaccggaagaagcttaaggaggtgtggaaacctgccgtgcggtctggcggatctggcggaggctccaccagccccaagaaaaagagaaaagtctaagctgccttctgcggggcttgccttctggccatgcccttcttctctcccttgcacctgtacctcttggtctttgaataaagcctgagtaggaaggctagcaaaaaaaaaaaaaaaaaaaaaaaaaaaaaaaaaaaaaaaaaaaaaaaaaaaaaaaaaaaaaaaaaaaaaaaaaaaaaaaa

SEQ ID NO: 10475 - RNA, 8787 nt, synthetic construct
  source 1..8787: mol_type = other RNA
aggaaataagagagaaaagaagagtaagaagaaatataagagccaccatggcccctaagaagaagcgtaaagtgagccggatgaaccacgaccaggagttcgacccccctaaggtgtaccctcccgtccccgccgagaagagaaagcccatccgggtcctgagcctgttcgatggcatcgccaccggtctgctggtgctgaaggacctgggcatccaggtggataggtacattgcctccgaggtgtgcgaggactccatcaccgtgggaatggtgcgtcatcagggcaagatcatgtacgtgggcgacgtgcggagcgtgacacagaagcatatccaggagtggggccctttcgacctggtgatcggcggcagcccttgcaatgacctgagcatcgtgaacccagcccggaagggcctgtacgagggaaccggcagactgttcttcgagttttacagactgctgcacgacgcccggcctaaggaaggcgacgaccggcccttcttttggctgttcgagaatgtggtggccatgggagtcagcgacaagcgggatattagccggttcctggagagcaaccccgtgatgatcgatgccaaggaagtgagcgccgcccaccgggccagatacttctggggcaatctgcctggcatgaacagacccctggccagcaccgtgaacgacaagctggagctgcaggagtgcctggagcacggccggatcgccaagttcagcaaggtgagaaccatcaccacccgaagcaacagcatcaaacaaggcaaggaccagcactttcctgtgttcatgaacgagaaggaggacatcctgtggtgtaccgagatggagagagtgttcgggttcccagtccactacacagatgtcagcaacatgtctagactggccagacagagactgctgggaagaagctggtccgtccctgtgatcagacacctgttcgcccctctgaaggagtacttcgcctgcgtgagcagcggcaacagcaacgccaacagccggggccccagcttctctagcggcctggtgccactgtccctgagagggagccacatgggccccatggagatctacaaaaccgtgagcgcctggaagcggcagcctgtgcgcgtgctgagcctgtttcggaatatcgataaagtcctgaaaagcctgggattcctggagagcggctctggctccggcggtggcaccctgaagtacgtggaggatgtgacaaacgtggtcagacgggatgtggagaagtggggccccttcgatctggtgtacggcagcacccaacccctgggcagctcttgtgaccggtgccctggctggtacatgtttcagttccaccggatcctgcagtacgccctgccgagacaggagtcccagcggccattcttttggattttcatggacaacttgctgctgaccgaggatgaccaggaaactaccactcggttcctgcagaccgaagccgtgaccctgcaggacgtgagaggccgggactaccagaacgccatgcgggtgtggtccaacatccctggactgaaaagcaagcacgcacctctgacccctaaagaagaggagtacctgcaggcccaggtgcggagcagaagcaagctggacgcccctaaggtggatctgctggtgaagaattgcctcctgcccctgagagagtacttcaagtatttcagccagaatagtctgcccctgggaggcagcggcggcggcaagcccaggaccgtgagcttcgccgacgtggccgtgtacttcagcagggaggagtggggctgcctgaggcccgcccagagggccctgtacagggacgtgatgagggagacctacggccacctgggcgccctgggcgtgggcggcagcaagcccgccctgatcagctgggtggaggaggaggccgagctgtgggaccccgccgcccaggaccccgaggtgaccaagtgccccaccgagaccgacggcggcccaagcagcggcgcccctcctcccagcggcggcaggcggcccaagcagcggcgcccctcctcccagcggcggcagcccagccggctccccaacctctaccgaggagggcacctctgagtccgccacccccgagagcggccctggcacctccaccgagcccagcgagggcagcgcacccggcagccctgccggcagccccacctccacagaggagggaaccagcaccgagcccagcgaaggcagcgccccaggcaccagcaccgagcctagtgagcaggagattaaacggatcaacaagatcagaagaagacttgtgaaagacagcaacaccaagaaggccggcaagacaggccccatgaaaaccctgctggttagagtgatgacacccgatctgagagagcggctggaaaacctgagaaagaagcctgaaaatatcccccagcccatcagcaatacatctagagccaacctgaataagctgctgaccgattacaccgaaatgaagaaggcgatcctgcatgtgtactgggaagagttccagaaggaccctgtgggcctgatgagccgggtggcccagcctgccagcaagaagatcgatcagaacaagctgaaacctgagatggacgagaagggcaacctgaccaccgccggctttgcctgctctcagtgtggccagcccctgttcgtgtacaagctggagcaggtgtctgagaagggcaaggcttacaccaactacttcggacggtgcaatgtggccgagcacgaaaagctgatcctgctggcccagctgaagcccgagaaggatagcgacgaagccgtgacatatagcctgggaaagtttgggcagagggccctggatttctacagcattcatgtgaccaaggagtccacccaccccgtgaagcccctggcccagatcgccggaaacagatacgcctccggacctgtgggaaaggccctgagcgacgcatgtatgggcacaatcgcctccttcctgtctaagtaccaggacatcatcatcgaacaccagaaggtggtgaagggcaaccagaagagactggagagcctgcgggagctggccggcaaggaaaacctggaataccctagcgtgaccctgccacctcagcctcacaccaaggagggcgttgatgcctacaacgaagtgatcgcccgggtgcgaatgtgggtgaacctgaacctgtggcagaagctgaagctaagcagagatgatgccaagcctctgctgagactgaagggattcccttcctttcctctggtcgagagacaggccaacgaagtggactggtgggacatggtgtgtaacgtgaagaagctgatcaacgagaaaaaggaggatggcaaggtgttttggcagaatctggctggctacaagagacaggaagccctgagaccatacctgagcagcgaggaagatcggaagaagggaaagaaattcgctcggtaccagctgggcgacctgctgctgcacctggaaaagaagcacggcgaggactggggaaaggtgtacgacgaggcctgggagcggattgacaagaaagtggaaggcctgagcaagcacatcaagctggaagaggaacggagaagcgaggacgcccagagcaaggccgccctgaccgactggctgcgggctaaggccagcttcgtgatcgagggcctgaaggaggccgacaaggacgagttctgcagatgcgagctgaagctgcagaagtggtacggggacctgcggggaaagcccttcgccatcgaagccgagaacagcatcctggacatcagcggcttcagcaagcagtacaactgtgccttcatctggcagaaggacggcgtgaagaagctgaacctgtacctgatcatcaactacttcaagggcggcaagctgcggttcaagaagatcaaacctgaagccttcgaagccaacagattctacaccgtgatcaacaaaaagagcggcgagatcgtgcccatggaggtgaacttcaacttcgacgaccccaacctgatcatcctgcctctggcctttggcaagagacagggcagagaattcatctggaacgacctgctgtccctggaaaccggcagcctgaagctggccaacggaagagtgatcgagaagacactgtacaacagaagaacccggcaggatgagcctgccctgttcgtggccctgaccttcgagcggcgggaggtcctggactcctccaatatcaaaccaatgaacctgatcggcgtggcaagaggcgaaaacatccccgccgtgatcgccctgaccgaccccgagggctgcccactgagccggtttaaggatagcctgggaaacccaacccacatcctgagaatcggcgagagctataaggagaagcagcggaccatccaggccaagaaggaggtggagcagcggagagccggcggctacagccggaagtacgccagcaaagccaagaatctggcagacgatatggtgagaaacaccgctagagatctgctgtactacgccgtgacccaggatgccatgctgatcttcgccaacctgagccggggcttcggccggcagggcaagcggaccttcatggccgagagacagtacacacggatggaggactggctgaccgccaagctggcctacgagggcctgagcaagacctacctgtccaagacactggcccagtacacctccaagacatgcagcaactgtgggtttaccatcaccagcgccgactacgacagggtgctggagaagctgaagaagacagcaacaggctggatgaccacaattaacggcaaggagctgaaggtggagggccagattacctactacaacagatacaagagacagaacgtagtcaaggacctgtccgtcgagctggatagactgagcgaagaatctgtgaacaacgacatctcctcctggacaaagggcagaagcggagaagctctgagcctcctgaagaaaagattctcccatagacccgtgcaggagaagttcgtgtgcctgaactgcggcttcgagacacacgcagccgagcaagccgccctgaacatcgccagatcctggctgttcctgcggagccaggagtacaagaaataccagacaaacaagacaaccggcaacaccgataagagagccttcgtcgagacctggcagtccttttaccggaagaagcttaaggaggtgtggaaacctgccgtgcggtctggcggatctggcggaggctccaccagccccaagaaaaagagaaaagtctaagctgccttctgcggggcttgccttctggccatgcccttcttctctcccttgcacctgtacctcttggtctttgaataaagcctgagtaggaaggctagcaaaaaaaaaaaaaaaaaaaaaaaaaaaaaaaaaaaaaaaaaaaaaaaaaaaaaaaaaaaaaaaaaaaaaaaaaaaaaaaagcccagccggctccccaacctctaccgaggagggcacctctgagtccgccacccccgagagcggccctggcacctccaccgagcccagcgagggcagcgcacccggcagccctgccggcagccccacctccacagaggagggaaccagcaccgagcccagcgaaggcagcgccccaggcaccagcaccgagcctagtgagcaggagattaaacggatcaacaagatcagaagaagacttgtgaaagacagcaacaccaagaaggccggcaagacaggccccatgaaaaccctgctggttagagtgatgacacccgatctgagagagcggctggaaaacctgagaaagaagcctgaaaatatcccccagcccatcagcaatacatctagagccaacctgaataagctgctgaccgattacaccgaaatgaagaaggcgatcctgcatgtgtactgggaagagttccagaaggaccctgtgggcctgatgagccgggtggcccagcctgccagcaagaagatcgatcagaacaagctgaaacctgagatggacgagaagggcaacctgaccaccgccggctttgcctgctctcagtgtggccagcccctgttcgtgtacaagctggagcaggtgtctgagaagggcaaggcttacaccaactacttcggacggtgcaatgtggccgagcacgaaaagctgatcctgctggcccagctgaagcccgagaaggatagcgacgaagccgtgacatatagcctgggaaagtttgggcagagggccctggatttctacagcattcatgtgaccaaggagtccacccaccccgtgaagcccctggcccagatcgccggaaacagatacgcctccggacctgtgggaaaggccctgagcgacgcatgtatgggcacaatcgcctccttcctgtctaagtaccaggacatcatcatcgaacaccagaaggtggtgaagggcaaccagaagagactggagagcctgcgggagctggccggcaaggaaaacctggaataccctagcgtgaccctgccacctcagcctcacaccaaggagggcgttgatgcctacaacgaagtgatcgcccgggtgcgaatgtgggtgaacctgaacctgtggcagaagctgaagctaagcagagatgatgccaagcctctgctgagactgaagggattcccttcctttcctctggtcgagagacaggccaacgaagtggactggtgggacatggtgtgtaacgtgaagaagctgatcaacgagaaaaaggaggatggcaaggtgttttggcagaatctggctggctacaagagacaggaagccctgagaccatacctgagcagcgaggaagatcggaagaagggaaagaaattcgctcggtaccagctgggcgacctgctgctgcacctggaaaagaagcacggcgaggactggggaaaggtgtacgacgaggcctgggagcggattgacaagaaagtggaaggcctgagcaagcacatcaagctggaagaggaacggagaagcgaggacgcccagagcaaggccgccctgaccgactggctgcgggctaaggccagcttcgtgatcgagggcctgaaggaggccgacaaggacgagttctgcagatgcgagctgaagctgcagaagtggtacggggacctgcggggaaagcccttcgccatcgaagccgagaacagcatcctggacatcagcggcttcagcaagcagtacaactgtgccttcatctggcagaaggacggcgtgaagaagctgaacctgtacctgatcatcaactacttcaagggcggcaagctgcggttcaagaagatcaaacctgaagccttcgaagccaacagattctacaccgtgatcaacaaaaagagcggcgagatcgtgcccatggaggtgaacttcaacttcgacgaccccaacctgatcatcctgcctctggcctttggcaagagacagggcagagaattcatctggaacgacctgctgtccctggaaaccggcagcctgaagctggccaacggaagagtgatcgagaagacactgtacaacagaagaacccggcaggatgagcctgccctgttcgtggccctgaccttcgagcggcgggaggtcctggactcctccaatatcaaaccaatgaacctgatcggcgtggcaagaggcgaaaacatccccgccgtgatcgccctgaccgaccccgagggctgcccactgagccggtttaaggatagcctgggaaacccaacccacatcctgagaatcggcgagagctataaggagaagcagcggaccatccaggccaagaaggaggtggagcagcggagagccggcggctacagccggaagtacgccagcaaagccaagaatctggcagacgatatggtgagaaacaccgctagagatctgctgtactacgccgtgacccaggatgccatgctgatcttcgccaacctgagccggggcttcggccggcagggcaagcggaccttcatggccgagagacagtacacacggatggaggactggctgaccgccaagctggcctacgagggcctgagcaagacctacctgtccaagacactggcccagtacacctccaagacatgcagcaactgtgggtttaccatcaccagcgccgactacgacagggtgctggagaagctgaagaagacagcaacaggctggatgaccacaattaacggcaaggagctgaaggtggagggccagattacctactacaacagatacaagagacagaacgtagtcaaggacctgtccgtcgagctggatagactgagcgaagaatctgtgaacaacgacatctcctcctggacaaagggcagaagcggagaagctctgagcctcctgaagaaaagattctcccatagacccgtgcaggagaagttcgtgtgcctgaactgcggcttcgagacacacgcagccgagcaagccgccctgaacatcgccagatcctggctgttcctgcggagccaggagtacaagaaataccagacaaacaagacaaccggcaacaccgataagagagccttcgtcgagacctggcagtccttttaccggaagaagcttaaggaggtgtggaaacctgccgtgcggtctggcggatctggcggaggctccaccagccccaagaaaaagagaaaagtctaagctgccttctgcggggcttgccttctggccatgcccttcttctctcccttgcacctgtacctcttggtctttgaataaagcctgagtaggaaggctagcaaaaaaaaaaaaaaaaaaaaaaaaaaaaaaaaaaaaaaaaaaaaaaaaaaaaaaaaaaaaaaaaaaaaaaaaaaaaaaaa

SEQ ID NO: 10476 - RNA, 8787 nt, synthetic construct
  source 1..8787: mol_type = other RNA
aggaaataagagagaaaagaagagtaagaagaaatataagagccaccatggcccctaagaagaagcgtaaagtgagccggatgaaccacgaccaggagttcgacccccctaaggtgtaccctcccgtccccgccgagaagagaaagcccatccgggtcctgagcctgttcgatggcatcgccaccggtctgctggtgctgaaggacctgggcatccaggtggataggtacattgcctccgaggtgtgcgaggactccatcaccgtgggaatggtgcgtcatcagggcaagatcatgtacgtgggcgacgtgcggagcgtgacacagaagcatatccaggagtggggccctttcgacctggtgatcggcggcagcccttgcaatgacctgagcatcgtgaacccagcccggaagggcctgtacgagggaaccggcagactgttcttcgagttttacagactgctgcacgacgcccggcctaaggaaggcgacgaccggcccttcttttggctgttcgagaatgtggtggccatgggagtcagcgacaagcgggatattagccggttcctggagagcaaccccgtgatgatcgatgccaaggaagtgagcgccgcccaccgggccagatacttctggggcaatctgcctggcatgaacagacccctggccagcaccgtgaacgacaagctggagctgcaggagtgcctggagcacggccggatcgccaagttcagcaaggtgagaaccatcaccacccgaagcaacagcatcaaacaaggcaaggaccagcactttcctgtgttcatgaacgagaaggaggacatcctgtggtgtaccgagatggagagagtgttcgggttcccagtccactacacagatgtcagcaacatgtctagactggccagacagagactgctgggaagaagctggtccgtccctgtgatcagacacctgttcgcccctctgaaggagtacttcgcctgcgtgagcagcggcaacagcaacgccaacagccggggccccagcttctctagcggcctggtgccactgtccctgagagggagccacatgggccccatggagatctacaaaaccgtgagcgcctggaagcggcagcctgtgcgcgtgctgagcctgtttcggaatatcgataaagtcctgaaaagcctgggattcctggagagcggctctggctccggcggtggcaccctgaagtacgtggaggatgtgacaaacgtggtcagacgggatgtggagaagtggggccccttcgatctggtgtacggcagcacccaacccctgggcagctcttgtgaccggtgccctggctggtacatgtttcagttccaccggatcctgcagtacgccctgccgagacaggagtcccagcggccattcttttggattttcatggacaacttgctgctgaccgaggatgaccaggaaactaccactcggttcctgcagaccgaagccgtgaccctgcaggacgtgagaggccgggactaccagaacgccatgcgggtgtggtccaacatccctggactgaaaagcaagcacgcacctctgacccctaaagaagaggagtacctgcaggcccaggtgcggagcagaagcaagctggacgcccctaaggtggatctgctggtgaagaattgcctcctgcccctgagagagtacttcaagtatttcagccagaatagtctgcccctgggaggcagcggcggcggcggccccctgaccttcagggacgtgaccatcgagttcagccacgaggagtggaagtgcctggaccccgcccagaaggccctgtacaaggacgtgatgctggagaactacaggaacctggtgttcctgggcatcacccccaagtgcaccaccaaggagctgccccccatcggcaacaacaacaccggcgagaagttcaggaccgtgaccctggagaggcacgagtgctacgacatcgaggacatcggcggcccaagcagcggcgcccctcctcccagcggcggcaggcggcccaagcagcggcgcccctcctcccagcggcggcagcccagccggctccccaacctctaccgaggagggcacctctgagtccgccacccccgagagcggccctggcacctccaccgagcccagcgagggcagcgcacccggcagccctgccggcagccccacctccacagaggagggaaccagcaccgagcccagcgaaggcagcgccccaggcaccagcaccgagcctagtgagcaggagattaaacggatcaacaagatcagaagaagacttgtgaaagacagcaacaccaagaaggccggcaagacaggccccatgaaaaccctgctggttagagtgatgacacccgatctgagagagcggctggaaaacctgagaaagaagcctgaaaatatcccccagcccatcagcaatacatctagagccaacctgaataagctgctgaccgattacaccgaaatgaagaaggcgatcctgcatgtgtactgggaagagttccagaaggaccctgtgggcctgatgagccgggtggcccagcctgccagcaagaagatcgatcagaacaagctgaaacctgagatggacgagaagggcaacctgaccaccgccggctttgcctgctctcagtgtggccagcccctgttcgtgtacaagctggagcaggtgtctgagaagggcaaggcttacaccaactacttcggacggtgcaatgtggccgagcacgaaaagctgatcctgctggcccagctgaagcccgagaaggatagcgacgaagccgtgacatatagcctgggaaagtttgggcagagggccctggatttctacagcattcatgtgaccaaggagtccacccaccccgtgaagcccctggcccagatcgccggaaacagatacgcctccggacctgtgggaaaggccctgagcgacgcatgtatgggcacaatcgcctccttcctgtctaagtaccaggacatcatcatcgaacaccagaaggtggtgaagggcaaccagaagagactggagagcctgcgggagctggccggcaaggaaaacctggaataccctagcgtgaccctgccacctcagcctcacaccaaggagggcgttgatgcctacaacgaagtgatcgcccgggtgcgaatgtgggtgaacctgaacctgtggcagaagctgaagctaagcagagatgatgccaagcctctgctgagactgaagggattcccttcctttcctctggtcgagagacaggccaacgaagtggactggtgggacatggtgtgtaacgtgaagaagctgatcaacgagaaaaaggaggatggcaaggtgttttggcagaatctggctggctacaagagacaggaagccctgagaccatacctgagcagcgaggaagatcggaagaagggaaagaaattcgctcggtaccagctgggcgacctgctgctgcacctggaaaagaagcacggcgaggactggggaaaggtgtacgacgaggcctgggagcggattgacaagaaagtggaaggcctgagcaagcacatcaagctggaagaggaacggagaagcgaggacgcccagagcaaggccgccctgaccgactggctgcgggctaaggccagcttcgtgatcgagggcctgaaggaggccgacaaggacgagttctgcagatgcgagctgaagctgcagaagtggtacggggacctgcggggaaagcccttcgccatcgaagccgagaacagcatcctggacatcagcggcttcagcaagcagtacaactgtgccttcatctggcagaaggacggcgtgaagaagctgaacctgtacctgatcatcaactacttcaagggcggcaagctgcggttcaagaagatcaaacctgaagccttcgaagccaacagattctacaccgtgatcaacaaaaagagcggcgagatcgtgcccatggaggtgaacttcaacttcgacgaccccaacctgatcatcctgcctctggcctttggcaagagacagggcagagaattcatctggaacgacctgctgtccctggaaaccggcagcctgaagctggccaacggaagagtgatcgagaagacactgtacaacagaagaacccggcaggatgagcctgccctgttcgtggccctgaccttcgagcggcgggaggtcctggactcctccaatatcaaaccaatgaacctgatcggcgtggcaagaggcgaaaacatccccgccgtgatcgccctgaccgaccccgagggctgcccactgagccggtttaaggatagcctgggaaacccaacccacatcctgagaatcggcgagagctataaggagaagcagcggaccatccaggccaagaaggaggtggagcagcggagagccggcggctacagccggaagtacgccagcaaagccaagaatctggcagacgatatggtgagaaacaccgctagagatctgctgtactacgccgtgacccaggatgccatgctgatcttcgccaacctgagccggggcttcggccggcagggcaagcggaccttcatggccgagagacagtacacacggatggaggactggctgaccgccaagctggcctacgagggcctgagcaagacctacctgtccaagacactggcccagtacacctccaagacatgcagcaactgtgggtttaccatcaccagcgccgactacgacagggtgctggagaagctgaagaagacagcaacaggctggatgaccacaattaacggcaaggagctgaaggtggagggccagattacctactacaacagatacaagagacagaacgtagtcaaggacctgtccgtcgagctggatagactgagcgaagaatctgtgaacaacgacatctcctcctggacaaagggcagaagcggagaagctctgagcctcctgaagaaaagattctcccatagacccgtgcaggagaagttcgtgtgcctgaactgcggcttcgagacacacgcagccgagcaagccgccctgaacatcgccagatcctggctgttcctgcggagccaggagtacaagaaataccagacaaacaagacaaccggcaacaccgataagagagccttcgtcgagacctggcagtccttttaccggaagaagcttaaggaggtgtggaaacctgccgtgcggtctggcggatctggcggaggctccaccagccccaagaaaaagagaaaagtctaagctgccttctgcggggcttgccttctggccatgcccttcttctctcccttgcacctgtacctcttggtctttgaataaagcctgagtaggaaggctagcaaaaaaaaaaaaaaaaaaaaaaaaaaaaaaaaaaaaaaaaaaaaaaaaaaaaaaaaaaaaaaaaaaaaaaaaaaaaaaaagcccagccggctccccaacctctaccgaggagggcacctctgagtccgccacccccgagagcggccctggcacctccaccgagcccagcgagggcagcgcacccggcagccctgccggcagccccacctccacagaggagggaaccagcaccgagcccagcgaaggcagcgccccaggcaccagcaccgagcctagtgagcaggagattaaacggatcaacaagatcagaagaagacttgtgaaagacagcaacaccaagaaggccggcaagacaggccccatgaaaaccctgctggttagagtgatgacacccgatctgagagagcggctggaaaacctgagaaagaagcctgaaaatatcccccagcccatcagcaatacatctagagccaacctgaataagctgctgaccgattacaccgaaatgaagaaggcgatcctgcatgtgtactgggaagagttccagaaggaccctgtgggcctgatgagccgggtggcccagcctgccagcaagaagatcgatcagaacaagctgaaacctgagatggacgagaagggcaacctgaccaccgccggctttgcctgctctcagtgtggccagcccctgttcgtgtacaagctggagcaggtgtctgagaagggcaaggcttacaccaactacttcggacggtgcaatgtggccgagcacgaaaagctgatcctgctggcccagctgaagcccgagaaggatagcgacgaagccgtgacatatagcctgggaaagtttgggcagagggccctggatttctacagcattcatgtgaccaaggagtccacccaccccgtgaagcccctggcccagatcgccggaaacagatacgcctccggacctgtgggaaaggccctgagcgacgcatgtatgggcacaatcgcctccttcctgtctaagtaccaggacatcatcatcgaacaccagaaggtggtgaagggcaaccagaagagactggagagcctgcgggagctggccggcaaggaaaacctggaataccctagcgtgaccctgccacctcagcctcacaccaaggagggcgttgatgcctacaacgaagtgatcgcccgggtgcgaatgtgggtgaacctgaacctgtggcagaagctgaagctaagcagagatgatgccaagcctctgctgagactgaagggattcccttcctttcctctggtcgagagacaggccaacgaagtggactggtgggacatggtgtgtaacgtgaagaagctgatcaacgagaaaaaggaggatggcaaggtgttttggcagaatctggctggctacaagagacaggaagccctgagaccatacctgagcagcgaggaagatcggaagaagggaaagaaattcgctcggtaccagctgggcgacctgctgctgcacctggaaaagaagcacggcgaggactggggaaaggtgtacgacgaggcctgggagcggattgacaagaaagtggaaggcctgagcaagcacatcaagctggaagaggaacggagaagcgaggacgcccagagcaaggccgccctgaccgactggctgcgggctaaggccagcttcgtgatcgagggcctgaaggaggccgacaaggacgagttctgcagatgcgagctgaagctgcagaagtggtacggggacctgcggggaaagcccttcgccatcgaagccgagaacagcatcctggacatcagcggcttcagcaagcagtacaactgtgccttcatctggcagaaggacggcgtgaagaagctgaacctgtacctgatcatcaactacttcaagggcggcaagctgcggttcaagaagatcaaacctgaagccttcgaagccaacagattctacaccgtgatcaacaaaaagagcggcgagatcgtgcccatggaggtgaacttcaacttcgacgaccccaacctgatcatcctgcctctggcctttggcaagagacagggcagagaattcatctggaacgacctgctgtccctggaaaccggcagcctgaagctggccaacggaagagtgatcgagaagacactgtacaacagaagaacccggcaggatgagcctgccctgttcgtggccctgaccttcgagcggcgggaggtcctggactcctccaatatcaaaccaatgaacctgatcggcgtggcaagaggcgaaaacatccccgccgtgatcgccctgaccgaccccgagggctgcccactgagccggtttaaggatagcctgggaaacccaacccacatcctgagaatcggcgagagctataaggagaagcagcggaccatccaggccaagaaggaggtggagcagcggagagccggcggctacagccggaagtacgccagcaaagccaagaatctggcagacgatatggtgagaaacaccgctagagatctgctgtactacgccgtgacccaggatgccatgctgatcttcgccaacctgagccggggcttcggccggcagggcaagcggaccttcatggccgagagacagtacacacggatggaggactggctgaccgccaagctggcctacgagggcctgagcaagacctacctgtccaagacactggcccagtacacctccaagacatgcagcaactgtgggtttaccatcaccagcgccgactacgacagggtgctggagaagctgaagaagacagcaacaggctggatgaccacaattaacggcaaggagctgaaggtggagggccagattacctactacaacagatacaagagacagaacgtagtcaaggacctgtccgtcgagctggatagactgagcgaagaatctgtgaacaacgacatctcctcctggacaaagggcagaagcggagaagctctgagcctcctgaagaaaagattctcccatagacccgtgcaggagaagttcgtgtgcctgaactgcggcttcgagacacacgcagccgagcaagccgccctgaacatcgccagatcctggctgttcctgcggagccaggagtacaagaaataccagacaaacaagacaaccggcaacaccgataagagagccttcgtcgagacctggcagtccttttaccggaagaagcttaaggaggtgtggaaacctgccgtgcggtctggcggatctggcggaggctccaccagccccaagaaaaagagaaaagtctaagctgccttctgcggggcttgccttctggccatgcccttcttctctcccttgcacctgtacctcttggtctttgaataaagcctgagtaggaaggctagcaaaaaaaaaaaaaaaaaaaaaaaaaaaaaaaaaaaaaaaaaaaaaaaaaaaaaaaaaaaaaaaaaaaaaaaaaaaaaaaa

SEQ ID NO: 10477 - RNA, 8787 nt, synthetic construct
  source 1..8787: mol_type = other RNA
aggaaataagagagaaaagaagagtaagaagaaatataagagccaccatggcccctaagaagaagcgtaaagtgagccggatgaaccacgaccaggagttcgacccccctaaggtgtaccctcccgtccccgccgagaagagaaagcccatccgggtcctgagcctgttcgatggcatcgccaccggtctgctggtgctgaaggacctgggcatccaggtggataggtacattgcctccgaggtgtgcgaggactccatcaccgtgggaatggtgcgtcatcagggcaagatcatgtacgtgggcgacgtgcggagcgtgacacagaagcatatccaggagtggggccctttcgacctggtgatcggcggcagcccttgcaatgacctgagcatcgtgaacccagcccggaagggcctgtacgagggaaccggcagactgttcttcgagttttacagactgctgcacgacgcccggcctaaggaaggcgacgaccggcccttcttttggctgttcgagaatgtggtggccatgggagtcagcgacaagcgggatattagccggttcctggagagcaaccccgtgatgatcgatgccaaggaagtgagcgccgcccaccgggccagatacttctggggcaatctgcctggcatgaacagacccctggccagcaccgtgaacgacaagctggagctgcaggagtgcctggagcacggccggatcgccaagttcagcaaggtgagaaccatcaccacccgaagcaacagcatcaaacaaggcaaggaccagcactttcctgtgttcatgaacgagaaggaggacatcctgtggtgtaccgagatggagagagtgttcgggttcccagtccactacacagatgtcagcaacatgtctagactggccagacagagactgctgggaagaagctggtccgtccctgtgatcagacacctgttcgcccctctgaaggagtacttcgcctgcgtgagcagcggcaacagcaacgccaacagccggggccccagcttctctagcggcctggtgccactgtccctgagagggagccacatgggccccatggagatctacaaaaccgtgagcgcctggaagcggcagcctgtgcgcgtgctgagcctgtttcggaatatcgataaagtcctgaaaagcctgggattcctggagagcggctctggctccggcggtggcaccctgaagtacgtggaggatgtgacaaacgtggtcagacgggatgtggagaagtggggccccttcgatctggtgtacggcagcacccaacccctgggcagctcttgtgaccggtgccctggctggtacatgtttcagttccaccggatcctgcagtacgccctgccgagacaggagtcccagcggccattcttttggattttcatggacaacttgctgctgaccgaggatgaccaggaaactaccactcggttcctgcagaccgaagccgtgaccctgcaggacgtgagaggccgggactaccagaacgccatgcgggtgtggtccaacatccctggactgaaaagcaagcacgcacctctgacccctaaagaagaggagtacctgcaggcccaggtgcggagcagaagcaagctggacgcccctaaggtggatctgctggtgaagaattgcctcctgcccctgagagagtacttcaagtatttcagccagaatagtctgcccctgggaggcagcggcggcggcttccaggagagcgtgaccttcgaggacgtggccgtgtacttcagcgagaacgagtggatcggcctggcccccgcccagagggtgctgtacagggacgtgatgctggagaactacggcgtggtggccagcctggccttccccttccccaagcccgccctgatcagccagctggagaggggcgaggccccctggtgcaaggccccccagggcgccgtggacggcgagtgccccaggggcgtgagcggcggcccaagcagcggcgcccctcctcccagcggcggcaggcggcccaagcagcggcgcccctcctcccagcggcggcagcccagccggctccccaacctctaccgaggagggcacctctgagtccgccacccccgagagcggccctggcacctccaccgagcccagcgagggcagcgcacccggcagccctgccggcagccccacctccacagaggagggaaccagcaccgagcccagcgaaggcagcgccccaggcaccagcaccgagcctagtgagcaggagattaaacggatcaacaagatcagaagaagacttgtgaaagacagcaacaccaagaaggccggcaagacaggccccatgaaaaccctgctggttagagtgatgacacccgatctgagagagcggctggaaaacctgagaaagaagcctgaaaatatcccccagcccatcagcaatacatctagagccaacctgaataagctgctgaccgattacaccgaaatgaagaaggcgatcctgcatgtgtactgggaagagttccagaaggaccctgtgggcctgatgagccgggtggcccagcctgccagcaagaagatcgatcagaacaagctgaaacctgagatggacgagaagggcaacctgaccaccgccggctttgcctgctctcagtgtggccagcccctgttcgtgtacaagctggagcaggtgtctgagaagggcaaggcttacaccaactacttcggacggtgcaatgtggccgagcacgaaaagctgatcctgctggcccagctgaagcccgagaaggatagcgacgaagccgtgacatatagcctgggaaagtttgggcagagggccctggatttctacagcattcatgtgaccaaggagtccacccaccccgtgaagcccctggcccagatcgccggaaacagatacgcctccggacctgtgggaaaggccctgagcgacgcatgtatgggcacaatcgcctccttcctgtctaagtaccaggacatcatcatcgaacaccagaaggtggtgaagggcaaccagaagagactggagagcctgcgggagctggccggcaaggaaaacctggaataccctagcgtgaccctgccacctcagcctcacaccaaggagggcgttgatgcctacaacgaagtgatcgcccgggtgcgaatgtgggtgaacctgaacctgtggcagaagctgaagctaagcagagatgatgccaagcctctgctgagactgaagggattcccttcctttcctctggtcgagagacaggccaacgaagtggactggtgggacatggtgtgtaacgtgaagaagctgatcaacgagaaaaaggaggatggcaaggtgttttggcagaatctggctggctacaagagacaggaagccctgagaccatacctgagcagcgaggaagatcggaagaagggaaagaaattcgctcggtaccagctgggcgacctgctgctgcacctggaaaagaagcacggcgaggactggggaaaggtgtacgacgaggcctgggagcggattgacaagaaagtggaaggcctgagcaagcacatcaagctggaagaggaacggagaagcgaggacgcccagagcaaggccgccctgaccgactggctgcgggctaaggccagcttcgtgatcgagggcctgaaggaggccgacaaggacgagttctgcagatgcgagctgaagctgcagaagtggtacggggacctgcggggaaagcccttcgccatcgaagccgagaacagcatcctggacatcagcggcttcagcaagcagtacaactgtgccttcatctggcagaaggacggcgtgaagaagctgaacctgtacctgatcatcaactacttcaagggcggcaagctgcggttcaagaagatcaaacctgaagccttcgaagccaacagattctacaccgtgatcaacaaaaagagcggcgagatcgtgcccatggaggtgaacttcaacttcgacgaccccaacctgatcatcctgcctctggcctttggcaagagacagggcagagaattcatctggaacgacctgctgtccctggaaaccggcagcctgaagctggccaacggaagagtgatcgagaagacactgtacaacagaagaacccggcaggatgagcctgccctgttcgtggccctgaccttcgagcggcgggaggtcctggactcctccaatatcaaaccaatgaacctgatcggcgtggcaagaggcgaaaacatccccgccgtgatcgccctgaccgaccccgagggctgcccactgagccggtttaaggatagcctgggaaacccaacccacatcctgagaatcggcgagagctataaggagaagcagcggaccatccaggccaagaaggaggtggagcagcggagagccggcggctacagccggaagtacgccagcaaagccaagaatctggcagacgatatggtgagaaacaccgctagagatctgctgtactacgccgtgacccaggatgccatgctgatcttcgccaacctgagccggggcttcggccggcagggcaagcggaccttcatggccgagagacagtacacacggatggaggactggctgaccgccaagctggcctacgagggcctgagcaagacctacctgtccaagacactggcccagtacacctccaagacatgcagcaactgtgggtttaccatcaccagcgccgactacgacagggtgctggagaagctgaagaagacagcaacaggctggatgaccacaattaacggcaaggagctgaaggtggagggccagattacctactacaacagatacaagagacagaacgtagtcaaggacctgtccgtcgagctggatagactgagcgaagaatctgtgaacaacgacatctcctcctggacaaagggcagaagcggagaagctctgagcctcctgaagaaaagattctcccatagacccgtgcaggagaagttcgtgtgcctgaactgcggcttcgagacacacgcagccgagcaagccgccctgaacatcgccagatcctggctgttcctgcggagccaggagtacaagaaataccagacaaacaagacaaccggcaacaccgataagagagccttcgtcgagacctggcagtccttttaccggaagaagcttaaggaggtgtggaaacctgccgtgcggtctggcggatctggcggaggctccaccagccccaagaaaaagagaaaagtctaagctgccttctgcggggcttgccttctggccatgcccttcttctctcccttgcacctgtacctcttggtctttgaataaagcctgagtaggaaggctagcaaaaaaaaaaaaaaaaaaaaaaaaaaaaaaaaaaaaaaaaaaaaaaaaaaaaaaaaaaaaaaaaaaaaaaaaaaaaaaaagcccagccggctccccaacctctaccgaggagggcacctctgagtccgccacccccgagagcggccctggcacctccaccgagcccagcgagggcagcgcacccggcagccctgccggcagccccacctccacagaggagggaaccagcaccgagcccagcgaaggcagcgccccaggcaccagcaccgagcctagtgagcaggagattaaacggatcaacaagatcagaagaagacttgtgaaagacagcaacaccaagaaggccggcaagacaggccccatgaaaaccctgctggttagagtgatgacacccgatctgagagagcggctggaaaacctgagaaagaagcctgaaaatatcccccagcccatcagcaatacatctagagccaacctgaataagctgctgaccgattacaccgaaatgaagaaggcgatcctgcatgtgtactgggaagagttccagaaggaccctgtgggcctgatgagccgggtggcccagcctgccagcaagaagatcgatcagaacaagctgaaacctgagatggacgagaagggcaacctgaccaccgccggctttgcctgctctcagtgtggccagcccctgttcgtgtacaagctggagcaggtgtctgagaagggcaaggcttacaccaactacttcggacggtgcaatgtggccgagcacgaaaagctgatcctgctggcccagctgaagcccgagaaggatagcgacgaagccgtgacatatagcctgggaaagtttgggcagagggccctggatttctacagcattcatgtgaccaaggagtccacccaccccgtgaagcccctggcccagatcgccggaaacagatacgcctccggacctgtgggaaaggccctgagcgacgcatgtatgggcacaatcgcctccttcctgtctaagtaccaggacatcatcatcgaacaccagaaggtggtgaagggcaaccagaagagactggagagcctgcgggagctggccggcaaggaaaacctggaataccctagcgtgaccctgccacctcagcctcacaccaaggagggcgttgatgcctacaacgaagtgatcgcccgggtgcgaatgtgggtgaacctgaacctgtggcagaagctgaagctaagcagagatgatgccaagcctctgctgagactgaagggattcccttcctttcctctggtcgagagacaggccaacgaagtggactggtgggacatggtgtgtaacgtgaagaagctgatcaacgagaaaaaggaggatggcaaggtgttttggcagaatctggctggctacaagagacaggaagccctgagaccatacctgagcagcgaggaagatcggaagaagggaaagaaattcgctcggtaccagctgggcgacctgctgctgcacctggaaaagaagcacggcgaggactggggaaaggtgtacgacgaggcctgggagcggattgacaagaaagtggaaggcctgagcaagcacatcaagctggaagaggaacggagaagcgaggacgcccagagcaaggccgccctgaccgactggctgcgggctaaggccagcttcgtgatcgagggcctgaaggaggccgacaaggacgagttctgcagatgcgagctgaagctgcagaagtggtacggggacctgcggggaaagcccttcgccatcgaagccgagaacagcatcctggacatcagcggcttcagcaagcagtacaactgtgccttcatctggcagaaggacggcgtgaagaagctgaacctgtacctgatcatcaactacttcaagggcggcaagctgcggttcaagaagatcaaacctgaagccttcgaagccaacagattctacaccgtgatcaacaaaaagagcggcgagatcgtgcccatggaggtgaacttcaacttcgacgaccccaacctgatcatcctgcctctggcctttggcaagagacagggcagagaattcatctggaacgacctgctgtccctggaaaccggcagcctgaagctggccaacggaagagtgatcgagaagacactgtacaacagaagaacccggcaggatgagcctgccctgttcgtggccctgaccttcgagcggcgggaggtcctggactcctccaatatcaaaccaatgaacctgatcggcgtggcaagaggcgaaaacatccccgccgtgatcgccctgaccgaccccgagggctgcccactgagccggtttaaggatagcctgggaaacccaacccacatcctgagaatcggcgagagctataaggagaagcagcggaccatccaggccaagaaggaggtggagcagcggagagccggcggctacagccggaagtacgccagcaaagccaagaatctggcagacgatatggtgagaaacaccgctagagatctgctgtactacgccgtgacccaggatgccatgctgatcttcgccaacctgagccggggcttcggccggcagggcaagcggaccttcatggccgagagacagtacacacggatggaggactggctgaccgccaagctggcctacgagggcctgagcaagacctacctgtccaagacactggcccagtacacctccaagacatgcagcaactgtgggtttaccatcaccagcgccgactacgacagggtgctggagaagctgaagaagacagcaacaggctggatgaccacaattaacggcaaggagctgaaggtggagggccagattacctactacaacagatacaagagacagaacgtagtcaaggacctgtccgtcgagctggatagactgagcgaagaatctgtgaacaacgacatctcctcctggacaaagggcagaagcggagaagctctgagcctcctgaagaaaagattctcccatagacccgtgcaggagaagttcgtgtgcctgaactgcggcttcgagacacacgcagccgagcaagccgccctgaacatcgccagatcctggctgttcctgcggagccaggagtacaagaaataccagacaaacaagacaaccggcaacaccgataagagagccttcgtcgagacctggcagtccttttaccggaagaagcttaaggaggtgtggaaacctgccgtgcggtctggcggatctggcggaggctccaccagccccaagaaaaagagaaaagtctaagctgccttctgcggggcttgccttctggccatgcccttcttctctcccttgcacctgtacctcttggtctttgaataaagcctgagtaggaaggctagcaaaaaaaaaaaaaaaaaaaaaaaaaaaaaaaaaaaaaaaaaaaaaaaaaaaaaaaaaaaaaaaaaaaaaaaaaaaaaaaa

SEQ ID NO: 10478 - RNA, 8787 nt, synthetic construct
  source 1..8787: mol_type = other RNA
aggaaataagagagaaaagaagagtaagaagaaatataagagccaccatggcccctaagaagaagcgtaaagtgagccggatgaaccacgaccaggagttcgacccccctaaggtgtaccctcccgtccccgccgagaagagaaagcccatccgggtcctgagcctgttcgatggcatcgccaccggtctgctggtgctgaaggacctgggcatccaggtggataggtacattgcctccgaggtgtgcgaggactccatcaccgtgggaatggtgcgtcatcagggcaagatcatgtacgtgggcgacgtgcggagcgtgacacagaagcatatccaggagtggggccctttcgacctggtgatcggcggcagcccttgcaatgacctgagcatcgtgaacccagcccggaagggcctgtacgagggaaccggcagactgttcttcgagttttacagactgctgcacgacgcccggcctaaggaaggcgacgaccggcccttcttttggctgttcgagaatgtggtggccatgggagtcagcgacaagcgggatattagccggttcctggagagcaaccccgtgatgatcgatgccaaggaagtgagcgccgcccaccgggccagatacttctggggcaatctgcctggcatgaacagacccctggccagcaccgtgaacgacaagctggagctgcaggagtgcctggagcacggccggatcgccaagttcagcaaggtgagaaccatcaccacccgaagcaacagcatcaaacaaggcaaggaccagcactttcctgtgttcatgaacgagaaggaggacatcctgtggtgtaccgagatggagagagtgttcgggttcccagtccactacacagatgtcagcaacatgtctagactggccagacagagactgctgggaagaagctggtccgtccctgtgatcagacacctgttcgcccctctgaaggagtacttcgcctgcgtgagcagcggcaacagcaacgccaacagccggggccccagcttctctagcggcctggtgccactgtccctgagagggagccacatgggccccatggagatctacaaaaccgtgagcgcctggaagcggcagcctgtgcgcgtgctgagcctgtttcggaatatcgataaagtcctgaaaagcctgggattcctggagagcggctctggctccggcggtggcaccctgaagtacgtggaggatgtgacaaacgtggtcagacgggatgtggagaagtggggccccttcgatctggtgtacggcagcacccaacccctgggcagctcttgtgaccggtgccctggctggtacatgtttcagttccaccggatcctgcagtacgccctgccgagacaggagtcccagcggccattcttttggattttcatggacaacttgctgctgaccgaggatgaccaggaaactaccactcggttcctgcagaccgaagccgtgaccctgcaggacgtgagaggccgggactaccagaacgccatgcgggtgtggtccaacatccctggactgaaaagcaagcacgcacctctgacccctaaagaagaggagtacctgcaggcccaggtgcggagcagaagcaagctggacgcccctaaggtggatctgctggtgaagaattgcctcctgcccctgagagagtacttcaagtatttcagccagaatagtctgcccctgggaggcagcggcggcggcaggcccagggccgtgaagttcgccgacgtggccgtgtacttcagccccgaggagtggggctgcctgaggcccgcccagagggccctgtacagggacgtgatgagggagacctacggccacctgggcgccctgggctgcgccggccccaagcccgccctgatcagctggctggagaggaacaccgacgagtgggagcccgccgccctggaccccagggagtgccccaggggcgtgaccgtgcagggcggcccaagcagcggcgcccctcctcccagcggcggcaggcggcccaagcagcggcgcccctcctcccagcggcggcagcccagccggctccccaacctctaccgaggagggcacctctgagtccgccacccccgagagcggccctggcacctccaccgagcccagcgagggcagcgcacccggcagccctgccggcagccccacctccacagaggagggaaccagcaccgagcccagcgaaggcagcgccccaggcaccagcaccgagcctagtgagcaggagattaaacggatcaacaagatcagaagaagacttgtgaaagacagcaacaccaagaaggccggcaagacaggccccatgaaaaccctgctggttagagtgatgacacccgatctgagagagcggctggaaaacctgagaaagaagcctgaaaatatcccccagcccatcagcaatacatctagagccaacctgaataagctgctgaccgattacaccgaaatgaagaaggcgatcctgcatgtgtactgggaagagttccagaaggaccctgtgggcctgatgagccgggtggcccagcctgccagcaagaagatcgatcagaacaagctgaaacctgagatggacgagaagggcaacctgaccaccgccggctttgcctgctctcagtgtggccagcccctgttcgtgtacaagctggagcaggtgtctgagaagggcaaggcttacaccaactacttcggacggtgcaatgtggccgagcacgaaaagctgatcctgctggcccagctgaagcccgagaaggatagcgacgaagccgtgacatatagcctgggaaagtttgggcagagggccctggatttctacagcattcatgtgaccaaggagtccacccaccccgtgaagcccctggcccagatcgccggaaacagatacgcctccggacctgtgggaaaggccctgagcgacgcatgtatgggcacaatcgcctccttcctgtctaagtaccaggacatcatcatcgaacaccagaaggtggtgaagggcaaccagaagagactggagagcctgcgggagctggccggcaaggaaaacctggaataccctagcgtgaccctgccacctcagcctcacaccaaggagggcgttgatgcctacaacgaagtgatcgcccgggtgcgaatgtgggtgaacctgaacctgtggcagaagctgaagctaagcagagatgatgccaagcctctgctgagactgaagggattcccttcctttcctctggtcgagagacaggccaacgaagtggactggtgggacatggtgtgtaacgtgaagaagctgatcaacgagaaaaaggaggatggcaaggtgttttggcagaatctggctggctacaagagacaggaagccctgagaccatacctgagcagcgaggaagatcggaagaagggaaagaaattcgctcggtaccagctgggcgacctgctgctgcacctggaaaagaagcacggcgaggactggggaaaggtgtacgacgaggcctgggagcggattgacaagaaagtggaaggcctgagcaagcacatcaagctggaagaggaacggagaagcgaggacgcccagagcaaggccgccctgaccgactggctgcgggctaaggccagcttcgtgatcgagggcctgaaggaggccgacaaggacgagttctgcagatgcgagctgaagctgcagaagtggtacggggacctgcggggaaagcccttcgccatcgaagccgagaacagcatcctggacatcagcggcttcagcaagcagtacaactgtgccttcatctggcagaaggacggcgtgaagaagctgaacctgtacctgatcatcaactacttcaagggcggcaagctgcggttcaagaagatcaaacctgaagccttcgaagccaacagattctacaccgtgatcaacaaaaagagcggcgagatcgtgcccatggaggtgaacttcaacttcgacgaccccaacctgatcatcctgcctctggcctttggcaagagacagggcagagaattcatctggaacgacctgctgtccctggaaaccggcagcctgaagctggccaacggaagagtgatcgagaagacactgtacaacagaagaacccggcaggatgagcctgccctgttcgtggccctgaccttcgagcggcgggaggtcctggactcctccaatatcaaaccaatgaacctgatcggcgtggcaagaggcgaaaacatccccgccgtgatcgccctgaccgaccccgagggctgcccactgagccggtttaaggatagcctgggaaacccaacccacatcctgagaatcggcgagagctataaggagaagcagcggaccatccaggccaagaaggaggtggagcagcggagagccggcggctacagccggaagtacgccagcaaagccaagaatctggcagacgatatggtgagaaacaccgctagagatctgctgtactacgccgtgacccaggatgccatgctgatcttcgccaacctgagccggggcttcggccggcagggcaagcggaccttcatggccgagagacagtacacacggatggaggactggctgaccgccaagctggcctacgagggcctgagcaagacctacctgtccaagacactggcccagtacacctccaagacatgcagcaactgtgggtttaccatcaccagcgccgactacgacagggtgctggagaagctgaagaagacagcaacaggctggatgaccacaattaacggcaaggagctgaaggtggagggccagattacctactacaacagatacaagagacagaacgtagtcaaggacctgtccgtcgagctggatagactgagcgaagaatctgtgaacaacgacatctcctcctggacaaagggcagaagcggagaagctctgagcctcctgaagaaaagattctcccatagacccgtgcaggagaagttcgtgtgcctgaactgcggcttcgagacacacgcagccgagcaagccgccctgaacatcgccagatcctggctgttcctgcggagccaggagtacaagaaataccagacaaacaagacaaccggcaacaccgataagagagccttcgtcgagacctggcagtccttttaccggaagaagcttaaggaggtgtggaaacctgccgtgcggtctggcggatctggcggaggctccaccagccccaagaaaaagagaaaagtctaagctgccttctgcggggcttgccttctggccatgcccttcttctctcccttgcacctgtacctcttggtctttgaataaagcctgagtaggaaggctagcaaaaaaaaaaaaaaaaaaaaaaaaaaaaaaaaaaaaaaaaaaaaaaaaaaaaaaaaaaaaaaaaaaaaaaaaaaaaaaaagcccagccggctccccaacctctaccgaggagggcacctctgagtccgccacccccgagagcggccctggcacctccaccgagcccagcgagggcagcgcacccggcagccctgccggcagccccacctccacagaggagggaaccagcaccgagcccagcgaaggcagcgccccaggcaccagcaccgagcctagtgagcaggagattaaacggatcaacaagatcagaagaagacttgtgaaagacagcaacaccaagaaggccggcaagacaggccccatgaaaaccctgctggttagagtgatgacacccgatctgagagagcggctggaaaacctgagaaagaagcctgaaaatatcccccagcccatcagcaatacatctagagccaacctgaataagctgctgaccgattacaccgaaatgaagaaggcgatcctgcatgtgtactgggaagagttccagaaggaccctgtgggcctgatgagccgggtggcccagcctgccagcaagaagatcgatcagaacaagctgaaacctgagatggacgagaagggcaacctgaccaccgccggctttgcctgctctcagtgtggccagcccctgttcgtgtacaagctggagcaggtgtctgagaagggcaaggcttacaccaactacttcggacggtgcaatgtggccgagcacgaaaagctgatcctgctggcccagctgaagcccgagaaggatagcgacgaagccgtgacatatagcctgggaaagtttgggcagagggccctggatttctacagcattcatgtgaccaaggagtccacccaccccgtgaagcccctggcccagatcgccggaaacagatacgcctccggacctgtgggaaaggccctgagcgacgcatgtatgggcacaatcgcctccttcctgtctaagtaccaggacatcatcatcgaacaccagaaggtggtgaagggcaaccagaagagactggagagcctgcgggagctggccggcaaggaaaacctggaataccctagcgtgaccctgccacctcagcctcacaccaaggagggcgttgatgcctacaacgaagtgatcgcccgggtgcgaatgtgggtgaacctgaacctgtggcagaagctgaagctaagcagagatgatgccaagcctctgctgagactgaagggattcccttcctttcctctggtcgagagacaggccaacgaagtggactggtgggacatggtgtgtaacgtgaagaagctgatcaacgagaaaaaggaggatggcaaggtgttttggcagaatctggctggctacaagagacaggaagccctgagaccatacctgagcagcgaggaagatcggaagaagggaaagaaattcgctcggtaccagctgggcgacctgctgctgcacctggaaaagaagcacggcgaggactggggaaaggtgtacgacgaggcctgggagcggattgacaagaaagtggaaggcctgagcaagcacatcaagctggaagaggaacggagaagcgaggacgcccagagcaaggccgccctgaccgactggctgcgggctaaggccagcttcgtgatcgagggcctgaaggaggccgacaaggacgagttctgcagatgcgagctgaagctgcagaagtggtacggggacctgcggggaaagcccttcgccatcgaagccgagaacagcatcctggacatcagcggcttcagcaagcagtacaactgtgccttcatctggcagaaggacggcgtgaagaagctgaacctgtacctgatcatcaactacttcaagggcggcaagctgcggttcaagaagatcaaacctgaagccttcgaagccaacagattctacaccgtgatcaacaaaaagagcggcgagatcgtgcccatggaggtgaacttcaacttcgacgaccccaacctgatcatcctgcctctggcctttggcaagagacagggcagagaattcatctggaacgacctgctgtccctggaaaccggcagcctgaagctggccaacggaagagtgatcgagaagacactgtacaacagaagaacccggcaggatgagcctgccctgttcgtggccctgaccttcgagcggcgggaggtcctggactcctccaatatcaaaccaatgaacctgatcggcgtggcaagaggcgaaaacatccccgccgtgatcgccctgaccgaccccgagggctgcccactgagccggtttaaggatagcctgggaaacccaacccacatcctgagaatcggcgagagctataaggagaagcagcggaccatccaggccaagaaggaggtggagcagcggagagccggcggctacagccggaagtacgccagcaaagccaagaatctggcagacgatatggtgagaaacaccgctagagatctgctgtactacgccgtgacccaggatgccatgctgatcttcgccaacctgagccggggcttcggccggcagggcaagcggaccttcatggccgagagacagtacacacggatggaggactggctgaccgccaagctggcctacgagggcctgagcaagacctacctgtccaagacactggcccagtacacctccaagacatgcagcaactgtgggtttaccatcaccagcgccgactacgacagggtgctggagaagctgaagaagacagcaacaggctggatgaccacaattaacggcaaggagctgaaggtggagggccagattacctactacaacagatacaagagacagaacgtagtcaaggacctgtccgtcgagctggatagactgagcgaagaatctgtgaacaacgacatctcctcctggacaaagggcagaagcggagaagctctgagcctcctgaagaaaagattctcccatagacccgtgcaggagaagttcgtgtgcctgaactgcggcttcgagacacacgcagccgagcaagccgccctgaacatcgccagatcctggctgttcctgcggagccaggagtacaagaaataccagacaaacaagacaaccggcaacaccgataagagagccttcgtcgagacctggcagtccttttaccggaagaagcttaaggaggtgtggaaacctgccgtgcggtctggcggatctggcggaggctccaccagccccaagaaaaagagaaaagtctaagctgccttctgcggggcttgccttctggccatgcccttcttctctcccttgcacctgtacctcttggtctttgaataaagcctgagtaggaaggctagcaaaaaaaaaaaaaaaaaaaaaaaaaaaaaaaaaaaaaaaaaaaaaaaaaaaaaaaaaaaaaaaaaaaaaaaaaaaaaaaa

SEQ ID NO: 10479 - RNA, 8787 nt, synthetic construct
  source 1..8787: mol_type = other RNA
aggaaataagagagaaaagaagagtaagaagaaatataagagccaccatggcccctaagaagaagcgtaaagtgagccggatgaaccacgaccaggagttcgacccccctaaggtgtaccctcccgtccccgccgagaagagaaagcccatccgggtcctgagcctgttcgatggcatcgccaccggtctgctggtgctgaaggacctgggcatccaggtggataggtacattgcctccgaggtgtgcgaggactccatcaccgtgggaatggtgcgtcatcagggcaagatcatgtacgtgggcgacgtgcggagcgtgacacagaagcatatccaggagtggggccctttcgacctggtgatcggcggcagcccttgcaatgacctgagcatcgtgaacccagcccggaagggcctgtacgagggaaccggcagactgttcttcgagttttacagactgctgcacgacgcccggcctaaggaaggcgacgaccggcccttcttttggctgttcgagaatgtggtggccatgggagtcagcgacaagcgggatattagccggttcctggagagcaaccccgtgatgatcgatgccaaggaagtgagcgccgcccaccgggccagatacttctggggcaatctgcctggcatgaacagacccctggccagcaccgtgaacgacaagctggagctgcaggagtgcctggagcacggccggatcgccaagttcagcaaggtgagaaccatcaccacccgaagcaacagcatcaaacaaggcaaggaccagcactttcctgtgttcatgaacgagaaggaggacatcctgtggtgtaccgagatggagagagtgttcgggttcccagtccactacacagatgtcagcaacatgtctagactggccagacagagactgctgggaagaagctggtccgtccctgtgatcagacacctgttcgcccctctgaaggagtacttcgcctgcgtgagcagcggcaacagcaacgccaacagccggggccccagcttctctagcggcctggtgccactgtccctgagagggagccacatgggccccatggagatctacaaaaccgtgagcgcctggaagcggcagcctgtgcgcgtgctgagcctgtttcggaatatcgataaagtcctgaaaagcctgggattcctggagagcggctctggctccggcggtggcaccctgaagtacgtggaggatgtgacaaacgtggtcagacgggatgtggagaagtggggccccttcgatctggtgtacggcagcacccaacccctgggcagctcttgtgaccggtgccctggctggtacatgtttcagttccaccggatcctgcagtacgccctgccgagacaggagtcccagcggccattcttttggattttcatggacaacttgctgctgaccgaggatgaccaggaaactaccactcggttcctgcagaccgaagccgtgaccctgcaggacgtgagaggccgggactaccagaacgccatgcgggtgtggtccaacatccctggactgaaaagcaagcacgcacctctgacccctaaagaagaggagtacctgcaggcccaggtgcggagcagaagcaagctggacgcccctaaggtggatctgctggtgaagaattgcctcctgcccctgagagagtacttcaagtatttcagccagaatagtctgcccctgggaggcagcggcggcggcctgcaggagcccgtgaccttcgccgacgtggccgtgctgttcacccccgaggagtggatgttcctggacagcgcccagaggagcctgtacagggacgtgatgctggagaactacaggaacctggccagcgtgggcgaccagctgggcaagcccagcatgctgagcctgagcgagcccggcgaggagctgtgggcccccgagaggaggaccttccccggcaccaggcccgagccccagcaccagggcggcccaagcagcggcgcccctcctcccagcggcggcaggcggcccaagcagcggcgcccctcctcccagcggcggcagcccagccggctccccaacctctaccgaggagggcacctctgagtccgccacccccgagagcggccctggcacctccaccgagcccagcgagggcagcgcacccggcagccctgccggcagccccacctccacagaggagggaaccagcaccgagcccagcgaaggcagcgccccaggcaccagcaccgagcctagtgagcaggagattaaacggatcaacaagatcagaagaagacttgtgaaagacagcaacaccaagaaggccggcaagacaggccccatgaaaaccctgctggttagagtgatgacacccgatctgagagagcggctggaaaacctgagaaagaagcctgaaaatatcccccagcccatcagcaatacatctagagccaacctgaataagctgctgaccgattacaccgaaatgaagaaggcgatcctgcatgtgtactgggaagagttccagaaggaccctgtgggcctgatgagccgggtggcccagcctgccagcaagaagatcgatcagaacaagctgaaacctgagatggacgagaagggcaacctgaccaccgccggctttgcctgctctcagtgtggccagcccctgttcgtgtacaagctggagcaggtgtctgagaagggcaaggcttacaccaactacttcggacggtgcaatgtggccgagcacgaaaagctgatcctgctggcccagctgaagcccgagaaggatagcgacgaagccgtgacatatagcctgggaaagtttgggcagagggccctggatttctacagcattcatgtgaccaaggagtccacccaccccgtgaagcccctggcccagatcgccggaaacagatacgcctccggacctgtgggaaaggccctgagcgacgcatgtatgggcacaatcgcctccttcctgtctaagtaccaggacatcatcatcgaacaccagaaggtggtgaagggcaaccagaagagactggagagcctgcgggagctggccggcaaggaaaacctggaataccctagcgtgaccctgccacctcagcctcacaccaaggagggcgttgatgcctacaacgaagtgatcgcccgggtgcgaatgtgggtgaacctgaacctgtggcagaagctgaagctaagcagagatgatgccaagcctctgctgagactgaagggattcccttcctttcctctggtcgagagacaggccaacgaagtggactggtgggacatggtgtgtaacgtgaagaagctgatcaacgagaaaaaggaggatggcaaggtgttttggcagaatctggctggctacaagagacaggaagccctgagaccatacctgagcagcgaggaagatcggaagaagggaaagaaattcgctcggtaccagctgggcgacctgctgctgcacctggaaaagaagcacggcgaggactggggaaaggtgtacgacgaggcctgggagcggattgacaagaaagtggaaggcctgagcaagcacatcaagctggaagaggaacggagaagcgaggacgcccagagcaaggccgccctgaccgactggctgcgggctaaggccagcttcgtgatcgagggcctgaaggaggccgacaaggacgagttctgcagatgcgagctgaagctgcagaagtggtacggggacctgcggggaaagcccttcgccatcgaagccgagaacagcatcctggacatcagcggcttcagcaagcagtacaactgtgccttcatctggcagaaggacggcgtgaagaagctgaacctgtacctgatcatcaactacttcaagggcggcaagctgcggttcaagaagatcaaacctgaagccttcgaagccaacagattctacaccgtgatcaacaaaaagagcggcgagatcgtgcccatggaggtgaacttcaacttcgacgaccccaacctgatcatcctgcctctggcctttggcaagagacagggcagagaattcatctggaacgacctgctgtccctggaaaccggcagcctgaagctggccaacggaagagtgatcgagaagacactgtacaacagaagaacccggcaggatgagcctgccctgttcgtggccctgaccttcgagcggcgggaggtcctggactcctccaatatcaaaccaatgaacctgatcggcgtggcaagaggcgaaaacatccccgccgtgatcgccctgaccgaccccgagggctgcccactgagccggtttaaggatagcctgggaaacccaacccacatcctgagaatcggcgagagctataaggagaagcagcggaccatccaggccaagaaggaggtggagcagcggagagccggcggctacagccggaagtacgccagcaaagccaagaatctggcagacgatatggtgagaaacaccgctagagatctgctgtactacgccgtgacccaggatgccatgctgatcttcgccaacctgagccggggcttcggccggcagggcaagcggaccttcatggccgagagacagtacacacggatggaggactggctgaccgccaagctggcctacgagggcctgagcaagacctacctgtccaagacactggcccagtacacctccaagacatgcagcaactgtgggtttaccatcaccagcgccgactacgacagggtgctggagaagctgaagaagacagcaacaggctggatgaccacaattaacggcaaggagctgaaggtggagggccagattacctactacaacagatacaagagacagaacgtagtcaaggacctgtccgtcgagctggatagactgagcgaagaatctgtgaacaacgacatctcctcctggacaaagggcagaagcggagaagctctgagcctcctgaagaaaagattctcccatagacccgtgcaggagaagttcgtgtgcctgaactgcggcttcgagacacacgcagccgagcaagccgccctgaacatcgccagatcctggctgttcctgcggagccaggagtacaagaaataccagacaaacaagacaaccggcaacaccgataagagagccttcgtcgagacctggcagtccttttaccggaagaagcttaaggaggtgtggaaacctgccgtgcggtctggcggatctggcggaggctccaccagccccaagaaaaagagaaaagtctaagctgccttctgcggggcttgccttctggccatgcccttcttctctcccttgcacctgtacctcttggtctttgaataaagcctgagtaggaaggctagcaaaaaaaaaaaaaaaaaaaaaaaaaaaaaaaaaaaaaaaaaaaaaaaaaaaaaaaaaaaaaaaaaaaaaaaaaaaaaaaagcccagccggctccccaacctctaccgaggagggcacctctgagtccgccacccccgagagcggccctggcacctccaccgagcccagcgagggcagcgcacccggcagccctgccggcagccccacctccacagaggagggaaccagcaccgagcccagcgaaggcagcgccccaggcaccagcaccgagcctagtgagcaggagattaaacggatcaacaagatcagaagaagacttgtgaaagacagcaacaccaagaaggccggcaagacaggccccatgaaaaccctgctggttagagtgatgacacccgatctgagagagcggctggaaaacctgagaaagaagcctgaaaatatcccccagcccatcagcaatacatctagagccaacctgaataagctgctgaccgattacaccgaaatgaagaaggcgatcctgcatgtgtactgggaagagttccagaaggaccctgtgggcctgatgagccgggtggcccagcctgccagcaagaagatcgatcagaacaagctgaaacctgagatggacgagaagggcaacctgaccaccgccggctttgcctgctctcagtgtggccagcccctgttcgtgtacaagctggagcaggtgtctgagaagggcaaggcttacaccaactacttcggacggtgcaatgtggccgagcacgaaaagctgatcctgctggcccagctgaagcccgagaaggatagcgacgaagccgtgacatatagcctgggaaagtttgggcagagggccctggatttctacagcattcatgtgaccaaggagtccacccaccccgtgaagcccctggcccagatcgccggaaacagatacgcctccggacctgtgggaaaggccctgagcgacgcatgtatgggcacaatcgcctccttcctgtctaagtaccaggacatcatcatcgaacaccagaaggtggtgaagggcaaccagaagagactggagagcctgcgggagctggccggcaaggaaaacctggaataccctagcgtgaccctgccacctcagcctcacaccaaggagggcgttgatgcctacaacgaagtgatcgcccgggtgcgaatgtgggtgaacctgaacctgtggcagaagctgaagctaagcagagatgatgccaagcctctgctgagactgaagggattcccttcctttcctctggtcgagagacaggccaacgaagtggactggtgggacatggtgtgtaacgtgaagaagctgatcaacgagaaaaaggaggatggcaaggtgttttggcagaatctggctggctacaagagacaggaagccctgagaccatacctgagcagcgaggaagatcggaagaagggaaagaaattcgctcggtaccagctgggcgacctgctgctgcacctggaaaagaagcacggcgaggactggggaaaggtgtacgacgaggcctgggagcggattgacaagaaagtggaaggcctgagcaagcacatcaagctggaagaggaacggagaagcgaggacgcccagagcaaggccgccctgaccgactggctgcgggctaaggccagcttcgtgatcgagggcctgaaggaggccgacaaggacgagttctgcagatgcgagctgaagctgcagaagtggtacggggacctgcggggaaagcccttcgccatcgaagccgagaacagcatcctggacatcagcggcttcagcaagcagtacaactgtgccttcatctggcagaaggacggcgtgaagaagctgaacctgtacctgatcatcaactacttcaagggcggcaagctgcggttcaagaagatcaaacctgaagccttcgaagccaacagattctacaccgtgatcaacaaaaagagcggcgagatcgtgcccatggaggtgaacttcaacttcgacgaccccaacctgatcatcctgcctctggcctttggcaagagacagggcagagaattcatctggaacgacctgctgtccctggaaaccggcagcctgaagctggccaacggaagagtgatcgagaagacactgtacaacagaagaacccggcaggatgagcctgccctgttcgtggccctgaccttcgagcggcgggaggtcctggactcctccaatatcaaaccaatgaacctgatcggcgtggcaagaggcgaaaacatccccgccgtgatcgccctgaccgaccccgagggctgcccactgagccggtttaaggatagcctgggaaacccaacccacatcctgagaatcggcgagagctataaggagaagcagcggaccatccaggccaagaaggaggtggagcagcggagagccggcggctacagccggaagtacgccagcaaagccaagaatctggcagacgatatggtgagaaacaccgctagagatctgctgtactacgccgtgacccaggatgccatgctgatcttcgccaacctgagccggggcttcggccggcagggcaagcggaccttcatggccgagagacagtacacacggatggaggactggctgaccgccaagctggcctacgagggcctgagcaagacctacctgtccaagacactggcccagtacacctccaagacatgcagcaactgtgggtttaccatcaccagcgccgactacgacagggtgctggagaagctgaagaagacagcaacaggctggatgaccacaattaacggcaaggagctgaaggtggagggccagattacctactacaacagatacaagagacagaacgtagtcaaggacctgtccgtcgagctggatagactgagcgaagaatctgtgaacaacgacatctcctcctggacaaagggcagaagcggagaagctctgagcctcctgaagaaaagattctcccatagacccgtgcaggagaagttcgtgtgcctgaactgcggcttcgagacacacgcagccgagcaagccgccctgaacatcgccagatcctggctgttcctgcggagccaggagtacaagaaataccagacaaacaagacaaccggcaacaccgataagagagccttcgtcgagacctggcagtccttttaccggaagaagcttaaggaggtgtggaaacctgccgtgcggtctggcggatctggcggaggctccaccagccccaagaaaaagagaaaagtctaagctgccttctgcggggcttgccttctggccatgcccttcttctctcccttgcacctgtacctcttggtctttgaataaagcctgagtaggaaggctagcaaaaaaaaaaaaaaaaaaaaaaaaaaaaaaaaaaaaaaaaaaaaaaaaaaaaaaaaaaaaaaaaaaaaaaaaaaaaaaaa

SEQ ID NO: 10480 - RNA, 8787 nt, synthetic construct
  source 1..8787: mol_type = other RNA
aggaaataagagagaaaagaagagtaagaagaaatataagagccaccatggcccctaagaagaagcgtaaagtgagccggatgaaccacgaccaggagttcgacccccctaaggtgtaccctcccgtccccgccgagaagagaaagcccatccgggtcctgagcctgttcgatggcatcgccaccggtctgctggtgctgaaggacctgggcatccaggtggataggtacattgcctccgaggtgtgcgaggactccatcaccgtgggaatggtgcgtcatcagggcaagatcatgtacgtgggcgacgtgcggagcgtgacacagaagcatatccaggagtggggccctttcgacctggtgatcggcggcagcccttgcaatgacctgagcatcgtgaacccagcccggaagggcctgtacgagggaaccggcagactgttcttcgagttttacagactgctgcacgacgcccggcctaaggaaggcgacgaccggcccttcttttggctgttcgagaatgtggtggccatgggagtcagcgacaagcgggatattagccggttcctggagagcaaccccgtgatgatcgatgccaaggaagtgagcgccgcccaccgggccagatacttctggggcaatctgcctggcatgaacagacccctggccagcaccgtgaacgacaagctggagctgcaggagtgcctggagcacggccggatcgccaagttcagcaaggtgagaaccatcaccacccgaagcaacagcatcaaacaaggcaaggaccagcactttcctgtgttcatgaacgagaaggaggacatcctgtggtgtaccgagatggagagagtgttcgggttcccagtccactacacagatgtcagcaacatgtctagactggccagacagagactgctgggaagaagctggtccgtccctgtgatcagacacctgttcgcccctctgaaggagtacttcgcctgcgtgagcagcggcaacagcaacgccaacagccggggccccagcttctctagcggcctggtgccactgtccctgagagggagccacatgggccccatggagatctacaaaaccgtgagcgcctggaagcggcagcctgtgcgcgtgctgagcctgtttcggaatatcgataaagtcctgaaaagcctgggattcctggagagcggctctggctccggcggtggcaccctgaagtacgtggaggatgtgacaaacgtggtcagacgggatgtggagaagtggggccccttcgatctggtgtacggcagcacccaacccctgggcagctcttgtgaccggtgccctggctggtacatgtttcagttccaccggatcctgcagtacgccctgccgagacaggagtcccagcggccattcttttggattttcatggacaacttgctgctgaccgaggatgaccaggaaactaccactcggttcctgcagaccgaagccgtgaccctgcaggacgtgagaggccgggactaccagaacgccatgcgggtgtggtccaacatccctggactgaaaagcaagcacgcacctctgacccctaaagaagaggagtacctgcaggcccaggtgcggagcagaagcaagctggacgcccctaaggtggatctgctggtgaagaattgcctcctgcccctgagagagtacttcaagtatttcagccagaatagtctgcccctgggaggcagcggcggcggcatcagggagttcggcggcatgggcgccggcatcgccaacatctggagcttccagggcagcgtgaccttcagggacgtggccatcgacttcagccaggaggagtggaagtggctgcagcccgcccagagggacctgtacaggtgcgtgatgctggagaactacggccacctggtgagcctgggcctgagcatcagcaagcccgacgtggtgagcctgctggagcagggcaaggagccctggctgggcggcccaagcagcggcgcccctcctcccagcggcggcaggcggcccaagcagcggcgcccctcctcccagcggcggcagcccagccggctccccaacctctaccgaggagggcacctctgagtccgccacccccgagagcggccctggcacctccaccgagcccagcgagggcagcgcacccggcagccctgccggcagccccacctccacagaggagggaaccagcaccgagcccagcgaaggcagcgccccaggcaccagcaccgagcctagtgagcaggagattaaacggatcaacaagatcagaagaagacttgtgaaagacagcaacaccaagaaggccggcaagacaggccccatgaaaaccctgctggttagagtgatgacacccgatctgagagagcggctggaaaacctgagaaagaagcctgaaaatatcccccagcccatcagcaatacatctagagccaacctgaataagctgctgaccgattacaccgaaatgaagaaggcgatcctgcatgtgtactgggaagagttccagaaggaccctgtgggcctgatgagccgggtggcccagcctgccagcaagaagatcgatcagaacaagctgaaacctgagatggacgagaagggcaacctgaccaccgccggctttgcctgctctcagtgtggccagcccctgttcgtgtacaagctggagcaggtgtctgagaagggcaaggcttacaccaactacttcggacggtgcaatgtggccgagcacgaaaagctgatcctgctggcccagctgaagcccgagaaggatagcgacgaagccgtgacatatagcctgggaaagtttgggcagagggccctggatttctacagcattcatgtgaccaaggagtccacccaccccgtgaagcccctggcccagatcgccggaaacagatacgcctccggacctgtgggaaaggccctgagcgacgcatgtatgggcacaatcgcctccttcctgtctaagtaccaggacatcatcatcgaacaccagaaggtggtgaagggcaaccagaagagactggagagcctgcgggagctggccggcaaggaaaacctggaataccctagcgtgaccctgccacctcagcctcacaccaaggagggcgttgatgcctacaacgaagtgatcgcccgggtgcgaatgtgggtgaacctgaacctgtggcagaagctgaagctaagcagagatgatgccaagcctctgctgagactgaagggattcccttcctttcctctggtcgagagacaggccaacgaagtggactggtgggacatggtgtgtaacgtgaagaagctgatcaacgagaaaaaggaggatggcaaggtgttttggcagaatctggctggctacaagagacaggaagccctgagaccatacctgagcagcgaggaagatcggaagaagggaaagaaattcgctcggtaccagctgggcgacctgctgctgcacctggaaaagaagcacggcgaggactggggaaaggtgtacgacgaggcctgggagcggattgacaagaaagtggaaggcctgagcaagcacatcaagctggaagaggaacggagaagcgaggacgcccagagcaaggccgccctgaccgactggctgcgggctaaggccagcttcgtgatcgagggcctgaaggaggccgacaaggacgagttctgcagatgcgagctgaagctgcagaagtggtacggggacctgcggggaaagcccttcgccatcgaagccgagaacagcatcctggacatcagcggcttcagcaagcagtacaactgtgccttcatctggcagaaggacggcgtgaagaagctgaacctgtacctgatcatcaactacttcaagggcggcaagctgcggttcaagaagatcaaacctgaagccttcgaagccaacagattctacaccgtgatcaacaaaaagagcggcgagatcgtgcccatggaggtgaacttcaacttcgacgaccccaacctgatcatcctgcctctggcctttggcaagagacagggcagagaattcatctggaacgacctgctgtccctggaaaccggcagcctgaagctggccaacggaagagtgatcgagaagacactgtacaacagaagaacccggcaggatgagcctgccctgttcgtggccctgaccttcgagcggcgggaggtcctggactcctccaatatcaaaccaatgaacctgatcggcgtggcaagaggcgaaaacatccccgccgtgatcgccctgaccgaccccgagggctgcccactgagccggtttaaggatagcctgggaaacccaacccacatcctgagaatcggcgagagctataaggagaagcagcggaccatccaggccaagaaggaggtggagcagcggagagccggcggctacagccggaagtacgccagcaaagccaagaatctggcagacgatatggtgagaaacaccgctagagatctgctgtactacgccgtgacccaggatgccatgctgatcttcgccaacctgagccggggcttcggccggcagggcaagcggaccttcatggccgagagacagtacacacggatggaggactggctgaccgccaagctggcctacgagggcctgagcaagacctacctgtccaagacactggcccagtacacctccaagacatgcagcaactgtgggtttaccatcaccagcgccgactacgacagggtgctggagaagctgaagaagacagcaacaggctggatgaccacaattaacggcaaggagctgaaggtggagggccagattacctactacaacagatacaagagacagaacgtagtcaaggacctgtccgtcgagctggatagactgagcgaagaatctgtgaacaacgacatctcctcctggacaaagggcagaagcggagaagctctgagcctcctgaagaaaagattctcccatagacccgtgcaggagaagttcgtgtgcctgaactgcggcttcgagacacacgcagccgagcaagccgccctgaacatcgccagatcctggctgttcctgcggagccaggagtacaagaaataccagacaaacaagacaaccggcaacaccgataagagagccttcgtcgagacctggcagtccttttaccggaagaagcttaaggaggtgtggaaacctgccgtgcggtctggcggatctggcggaggctccaccagccccaagaaaaagagaaaagtctaagctgccttctgcggggcttgccttctggccatgcccttcttctctcccttgcacctgtacctcttggtctttgaataaagcctgagtaggaaggctagcaaaaaaaaaaaaaaaaaaaaaaaaaaaaaaaaaaaaaaaaaaaaaaaaaaaaaaaaaaaaaaaaaaaaaaaaaaaaaaaagcccagccggctccccaacctctaccgaggagggcacctctgagtccgccacccccgagagcggccctggcacctccaccgagcccagcgagggcagcgcacccggcagccctgccggcagccccacctccacagaggagggaaccagcaccgagcccagcgaaggcagcgccccaggcaccagcaccgagcctagtgagcaggagattaaacggatcaacaagatcagaagaagacttgtgaaagacagcaacaccaagaaggccggcaagacaggccccatgaaaaccctgctggttagagtgatgacacccgatctgagagagcggctggaaaacctgagaaagaagcctgaaaatatcccccagcccatcagcaatacatctagagccaacctgaataagctgctgaccgattacaccgaaatgaagaaggcgatcctgcatgtgtactgggaagagttccagaaggaccctgtgggcctgatgagccgggtggcccagcctgccagcaagaagatcgatcagaacaagctgaaacctgagatggacgagaagggcaacctgaccaccgccggctttgcctgctctcagtgtggccagcccctgttcgtgtacaagctggagcaggtgtctgagaagggcaaggcttacaccaactacttcggacggtgcaatgtggccgagcacgaaaagctgatcctgctggcccagctgaagcccgagaaggatagcgacgaagccgtgacatatagcctgggaaagtttgggcagagggccctggatttctacagcattcatgtgaccaaggagtccacccaccccgtgaagcccctggcccagatcgccggaaacagatacgcctccggacctgtgggaaaggccctgagcgacgcatgtatgggcacaatcgcctccttcctgtctaagtaccaggacatcatcatcgaacaccagaaggtggtgaagggcaaccagaagagactggagagcctgcgggagctggccggcaaggaaaacctggaataccctagcgtgaccctgccacctcagcctcacaccaaggagggcgttgatgcctacaacgaagtgatcgcccgggtgcgaatgtgggtgaacctgaacctgtggcagaagctgaagctaagcagagatgatgccaagcctctgctgagactgaagggattcccttcctttcctctggtcgagagacaggccaacgaagtggactggtgggacatggtgtgtaacgtgaagaagctgatcaacgagaaaaaggaggatggcaaggtgttttggcagaatctggctggctacaagagacaggaagccctgagaccatacctgagcagcgaggaagatcggaagaagggaaagaaattcgctcggtaccagctgggcgacctgctgctgcacctggaaaagaagcacggcgaggactggggaaaggtgtacgacgaggcctgggagcggattgacaagaaagtggaaggcctgagcaagcacatcaagctggaagaggaacggagaagcgaggacgcccagagcaaggccgccctgaccgactggctgcgggctaaggccagcttcgtgatcgagggcctgaaggaggccgacaaggacgagttctgcagatgcgagctgaagctgcagaagtggtacggggacctgcggggaaagcccttcgccatcgaagccgagaacagcatcctggacatcagcggcttcagcaagcagtacaactgtgccttcatctggcagaaggacggcgtgaagaagctgaacctgtacctgatcatcaactacttcaagggcggcaagctgcggttcaagaagatcaaacctgaagccttcgaagccaacagattctacaccgtgatcaacaaaaagagcggcgagatcgtgcccatggaggtgaacttcaacttcgacgaccccaacctgatcatcctgcctctggcctttggcaagagacagggcagagaattcatctggaacgacctgctgtccctggaaaccggcagcctgaagctggccaacggaagagtgatcgagaagacactgtacaacagaagaacccggcaggatgagcctgccctgttcgtggccctgaccttcgagcggcgggaggtcctggactcctccaatatcaaaccaatgaacctgatcggcgtggcaagaggcgaaaacatccccgccgtgatcgccctgaccgaccccgagggctgcccactgagccggtttaaggatagcctgggaaacccaacccacatcctgagaatcggcgagagctataaggagaagcagcggaccatccaggccaagaaggaggtggagcagcggagagccggcggctacagccggaagtacgccagcaaagccaagaatctggcagacgatatggtgagaaacaccgctagagatctgctgtactacgccgtgacccaggatgccatgctgatcttcgccaacctgagccggggcttcggccggcagggcaagcggaccttcatggccgagagacagtacacacggatggaggactggctgaccgccaagctggcctacgagggcctgagcaagacctacctgtccaagacactggcccagtacacctccaagacatgcagcaactgtgggtttaccatcaccagcgccgactacgacagggtgctggagaagctgaagaagacagcaacaggctggatgaccacaattaacggcaaggagctgaaggtggagggccagattacctactacaacagatacaagagacagaacgtagtcaaggacctgtccgtcgagctggatagactgagcgaagaatctgtgaacaacgacatctcctcctggacaaagggcagaagcggagaagctctgagcctcctgaagaaaagattctcccatagacccgtgcaggagaagttcgtgtgcctgaactgcggcttcgagacacacgcagccgagcaagccgccctgaacatcgccagatcctggctgttcctgcggagccaggagtacaagaaataccagacaaacaagacaaccggcaacaccgataagagagccttcgtcgagacctggcagtccttttaccggaagaagcttaaggaggtgtggaaacctgccgtgcggtctggcggatctggcggaggctccaccagccccaagaaaaagagaaaagtctaagctgccttctgcggggcttgccttctggccatgcccttcttctctcccttgcacctgtacctcttggtctttgaataaagcctgagtaggaaggctagcaaaaaaaaaaaaaaaaaaaaaaaaaaaaaaaaaaaaaaaaaaaaaaaaaaaaaaaaaaaaaaaaaaaaaaaaaaaaaaaa

SEQ ID NO: 10481 - RNA, 8787 nt, synthetic construct
  source 1..8787: mol_type = other RNA
aggaaataagagagaaaagaagagtaagaagaaatataagagccaccatggcccctaagaagaagcgtaaagtgagccggatgaaccacgaccaggagttcgacccccctaaggtgtaccctcccgtccccgccgagaagagaaagcccatccgggtcctgagcctgttcgatggcatcgccaccggtctgctggtgctgaaggacctgggcatccaggtggataggtacattgcctccgaggtgtgcgaggactccatcaccgtgggaatggtgcgtcatcagggcaagatcatgtacgtgggcgacgtgcggagcgtgacacagaagcatatccaggagtggggccctttcgacctggtgatcggcggcagcccttgcaatgacctgagcatcgtgaacccagcccggaagggcctgtacgagggaaccggcagactgttcttcgagttttacagactgctgcacgacgcccggcctaaggaaggcgacgaccggcccttcttttggctgttcgagaatgtggtggccatgggagtcagcgacaagcgggatattagccggttcctggagagcaaccccgtgatgatcgatgccaaggaagtgagcgccgcccaccgggccagatacttctggggcaatctgcctggcatgaacagacccctggccagcaccgtgaacgacaagctggagctgcaggagtgcctggagcacggccggatcgccaagttcagcaaggtgagaaccatcaccacccgaagcaacagcatcaaacaaggcaaggaccagcactttcctgtgttcatgaacgagaaggaggacatcctgtggtgtaccgagatggagagagtgttcgggttcccagtccactacacagatgtcagcaacatgtctagactggccagacagagactgctgggaagaagctggtccgtccctgtgatcagacacctgttcgcccctctgaaggagtacttcgcctgcgtgagcagcggcaacagcaacgccaacagccggggccccagcttctctagcggcctggtgccactgtccctgagagggagccacatgggccccatggagatctacaaaaccgtgagcgcctggaagcggcagcctgtgcgcgtgctgagcctgtttcggaatatcgataaagtcctgaaaagcctgggattcctggagagcggctctggctccggcggtggcaccctgaagtacgtggaggatgtgacaaacgtggtcagacgggatgtggagaagtggggccccttcgatctggtgtacggcagcacccaacccctgggcagctcttgtgaccggtgccctggctggtacatgtttcagttccaccggatcctgcagtacgccctgccgagacaggagtcccagcggccattcttttggattttcatggacaacttgctgctgaccgaggatgaccaggaaactaccactcggttcctgcagaccgaagccgtgaccctgcaggacgtgagaggccgggactaccagaacgccatgcgggtgtggtccaacatccctggactgaaaagcaagcacgcacctctgacccctaaagaagaggagtacctgcaggcccaggtgcggagcagaagcaagctggacgcccctaaggtggatctgctggtgaagaattgcctcctgcccctgagagagtacttcaagtatttcagccagaatagtctgcccctgggaggcagcggcggcggcacccagggcctggtgaccttcagggacgtggccatcgagttcagccaggaggagtggaagtgcctggagcccgcccagaaggacctgtacaaggacgtgaccctggagaacttcagcaacctggtgagcctgggcctgagcctgcccaagcccgacgtgatcagcctgctggagcagggcaaggagccctggatggtgatcaacgacatgaccggcccctggtgccccgacctggagagcaggggcggcccaagcagcggcgcccctcctcccagcggcggcaggcggcccaagcagcggcgcccctcctcccagcggcggcagcccagccggctccccaacctctaccgaggagggcacctctgagtccgccacccccgagagcggccctggcacctccaccgagcccagcgagggcagcgcacccggcagccctgccggcagccccacctccacagaggagggaaccagcaccgagcccagcgaaggcagcgccccaggcaccagcaccgagcctagtgagcaggagattaaacggatcaacaagatcagaagaagacttgtgaaagacagcaacaccaagaaggccggcaagacaggccccatgaaaaccctgctggttagagtgatgacacccgatctgagagagcggctggaaaacctgagaaagaagcctgaaaatatcccccagcccatcagcaatacatctagagccaacctgaataagctgctgaccgattacaccgaaatgaagaaggcgatcctgcatgtgtactgggaagagttccagaaggaccctgtgggcctgatgagccgggtggcccagcctgccagcaagaagatcgatcagaacaagctgaaacctgagatggacgagaagggcaacctgaccaccgccggctttgcctgctctcagtgtggccagcccctgttcgtgtacaagctggagcaggtgtctgagaagggcaaggcttacaccaactacttcggacggtgcaatgtggccgagcacgaaaagctgatcctgctggcccagctgaagcccgagaaggatagcgacgaagccgtgacatatagcctgggaaagtttgggcagagggccctggatttctacagcattcatgtgaccaaggagtccacccaccccgtgaagcccctggcccagatcgccggaaacagatacgcctccggacctgtgggaaaggccctgagcgacgcatgtatgggcacaatcgcctccttcctgtctaagtaccaggacatcatcatcgaacaccagaaggtggtgaagggcaaccagaagagactggagagcctgcgggagctggccggcaaggaaaacctggaataccctagcgtgaccctgccacctcagcctcacaccaaggagggcgttgatgcctacaacgaagtgatcgcccgggtgcgaatgtgggtgaacctgaacctgtggcagaagctgaagctaagcagagatgatgccaagcctctgctgagactgaagggattcccttcctttcctctggtcgagagacaggccaacgaagtggactggtgggacatggtgtgtaacgtgaagaagctgatcaacgagaaaaaggaggatggcaaggtgttttggcagaatctggctggctacaagagacaggaagccctgagaccatacctgagcagcgaggaagatcggaagaagggaaagaaattcgctcggtaccagctgggcgacctgctgctgcacctggaaaagaagcacggcgaggactggggaaaggtgtacgacgaggcctgggagcggattgacaagaaagtggaaggcctgagcaagcacatcaagctggaagaggaacggagaagcgaggacgcccagagcaaggccgccctgaccgactggctgcgggctaaggccagcttcgtgatcgagggcctgaaggaggccgacaaggacgagttctgcagatgcgagctgaagctgcagaagtggtacggggacctgcggggaaagcccttcgccatcgaagccgagaacagcatcctggacatcagcggcttcagcaagcagtacaactgtgccttcatctggcagaaggacggcgtgaagaagctgaacctgtacctgatcatcaactacttcaagggcggcaagctgcggttcaagaagatcaaacctgaagccttcgaagccaacagattctacaccgtgatcaacaaaaagagcggcgagatcgtgcccatggaggtgaacttcaacttcgacgaccccaacctgatcatcctgcctctggcctttggcaagagacagggcagagaattcatctggaacgacctgctgtccctggaaaccggcagcctgaagctggccaacggaagagtgatcgagaagacactgtacaacagaagaacccggcaggatgagcctgccctgttcgtggccctgaccttcgagcggcgggaggtcctggactcctccaatatcaaaccaatgaacctgatcggcgtggcaagaggcgaaaacatccccgccgtgatcgccctgaccgaccccgagggctgcccactgagccggtttaaggatagcctgggaaacccaacccacatcctgagaatcggcgagagctataaggagaagcagcggaccatccaggccaagaaggaggtggagcagcggagagccggcggctacagccggaagtacgccagcaaagccaagaatctggcagacgatatggtgagaaacaccgctagagatctgctgtactacgccgtgacccaggatgccatgctgatcttcgccaacctgagccggggcttcggccggcagggcaagcggaccttcatggccgagagacagtacacacggatggaggactggctgaccgccaagctggcctacgagggcctgagcaagacctacctgtccaagacactggcccagtacacctccaagacatgcagcaactgtgggtttaccatcaccagcgccgactacgacagggtgctggagaagctgaagaagacagcaacaggctggatgaccacaattaacggcaaggagctgaaggtggagggccagattacctactacaacagatacaagagacagaacgtagtcaaggacctgtccgtcgagctggatagactgagcgaagaatctgtgaacaacgacatctcctcctggacaaagggcagaagcggagaagctctgagcctcctgaagaaaagattctcccatagacccgtgcaggagaagttcgtgtgcctgaactgcggcttcgagacacacgcagccgagcaagccgccctgaacatcgccagatcctggctgttcctgcggagccaggagtacaagaaataccagacaaacaagacaaccggcaacaccgataagagagccttcgtcgagacctggcagtccttttaccggaagaagcttaaggaggtgtggaaacctgccgtgcggtctggcggatctggcggaggctccaccagccccaagaaaaagagaaaagtctaagctgccttctgcggggcttgccttctggccatgcccttcttctctcccttgcacctgtacctcttggtctttgaataaagcctgagtaggaaggctagcaaaaaaaaaaaaaaaaaaaaaaaaaaaaaaaaaaaaaaaaaaaaaaaaaaaaaaaaaaaaaaaaaaaaaaaaaaaaaaaagcccagccggctccccaacctctaccgaggagggcacctctgagtccgccacccccgagagcggccctggcacctccaccgagcccagcgagggcagcgcacccggcagccctgccggcagccccacctccacagaggagggaaccagcaccgagcccagcgaaggcagcgccccaggcaccagcaccgagcctagtgagcaggagattaaacggatcaacaagatcagaagaagacttgtgaaagacagcaacaccaagaaggccggcaagacaggccccatgaaaaccctgctggttagagtgatgacacccgatctgagagagcggctggaaaacctgagaaagaagcctgaaaatatcccccagcccatcagcaatacatctagagccaacctgaataagctgctgaccgattacaccgaaatgaagaaggcgatcctgcatgtgtactgggaagagttccagaaggaccctgtgggcctgatgagccgggtggcccagcctgccagcaagaagatcgatcagaacaagctgaaacctgagatggacgagaagggcaacctgaccaccgccggctttgcctgctctcagtgtggccagcccctgttcgtgtacaagctggagcaggtgtctgagaagggcaaggcttacaccaactacttcggacggtgcaatgtggccgagcacgaaaagctgatcctgctggcccagctgaagcccgagaaggatagcgacgaagccgtgacatatagcctgggaaagtttgggcagagggccctggatttctacagcattcatgtgaccaaggagtccacccaccccgtgaagcccctggcccagatcgccggaaacagatacgcctccggacctgtgggaaaggccctgagcgacgcatgtatgggcacaatcgcctccttcctgtctaagtaccaggacatcatcatcgaacaccagaaggtggtgaagggcaaccagaagagactggagagcctgcgggagctggccggcaaggaaaacctggaataccctagcgtgaccctgccacctcagcctcacaccaaggagggcgttgatgcctacaacgaagtgatcgcccgggtgcgaatgtgggtgaacctgaacctgtggcagaagctgaagctaagcagagatgatgccaagcctctgctgagactgaagggattcccttcctttcctctggtcgagagacaggccaacgaagtggactggtgggacatggtgtgtaacgtgaagaagctgatcaacgagaaaaaggaggatggcaaggtgttttggcagaatctggctggctacaagagacaggaagccctgagaccatacctgagcagcgaggaagatcggaagaagggaaagaaattcgctcggtaccagctgggcgacctgctgctgcacctggaaaagaagcacggcgaggactggggaaaggtgtacgacgaggcctgggagcggattgacaagaaagtggaaggcctgagcaagcacatcaagctggaagaggaacggagaagcgaggacgcccagagcaaggccgccctgaccgactggctgcgggctaaggccagcttcgtgatcgagggcctgaaggaggccgacaaggacgagttctgcagatgcgagctgaagctgcagaagtggtacggggacctgcggggaaagcccttcgccatcgaagccgagaacagcatcctggacatcagcggcttcagcaagcagtacaactgtgccttcatctggcagaaggacggcgtgaagaagctgaacctgtacctgatcatcaactacttcaagggcggcaagctgcggttcaagaagatcaaacctgaagccttcgaagccaacagattctacaccgtgatcaacaaaaagagcggcgagatcgtgcccatggaggtgaacttcaacttcgacgaccccaacctgatcatcctgcctctggcctttggcaagagacagggcagagaattcatctggaacgacctgctgtccctggaaaccggcagcctgaagctggccaacggaagagtgatcgagaagacactgtacaacagaagaacccggcaggatgagcctgccctgttcgtggccctgaccttcgagcggcgggaggtcctggactcctccaatatcaaaccaatgaacctgatcggcgtggcaagaggcgaaaacatccccgccgtgatcgccctgaccgaccccgagggctgcccactgagccggtttaaggatagcctgggaaacccaacccacatcctgagaatcggcgagagctataaggagaagcagcggaccatccaggccaagaaggaggtggagcagcggagagccggcggctacagccggaagtacgccagcaaagccaagaatctggcagacgatatggtgagaaacaccgctagagatctgctgtactacgccgtgacccaggatgccatgctgatcttcgccaacctgagccggggcttcggccggcagggcaagcggaccttcatggccgagagacagtacacacggatggaggactggctgaccgccaagctggcctacgagggcctgagcaagacctacctgtccaagacactggcccagtacacctccaagacatgcagcaactgtgggtttaccatcaccagcgccgactacgacagggtgctggagaagctgaagaagacagcaacaggctggatgaccacaattaacggcaaggagctgaaggtggagggccagattacctactacaacagatacaagagacagaacgtagtcaaggacctgtccgtcgagctggatagactgagcgaagaatctgtgaacaacgacatctcctcctggacaaagggcagaagcggagaagctctgagcctcctgaagaaaagattctcccatagacccgtgcaggagaagttcgtgtgcctgaactgcggcttcgagacacacgcagccgagcaagccgccctgaacatcgccagatcctggctgttcctgcggagccaggagtacaagaaataccagacaaacaagacaaccggcaacaccgataagagagccttcgtcgagacctggcagtccttttaccggaagaagcttaaggaggtgtggaaacctgccgtgcggtctggcggatctggcggaggctccaccagccccaagaaaaagagaaaagtctaagctgccttctgcggggcttgccttctggccatgcccttcttctctcccttgcacctgtacctcttggtctttgaataaagcctgagtaggaaggctagcaaaaaaaaaaaaaaaaaaaaaaaaaaaaaaaaaaaaaaaaaaaaaaaaaaaaaaaaaaaaaaaaaaaaaaaaaaaaaaaa

SEQ ID NO: 10482 - RNA, 8787 nt, synthetic construct
  source 1..8787: mol_type = other RNA
aggaaataagagagaaaagaagagtaagaagaaatataagagccaccatggcccctaagaagaagcgtaaagtgagccggatgaaccacgaccaggagttcgacccccctaaggtgtaccctcccgtccccgccgagaagagaaagcccatccgggtcctgagcctgttcgatggcatcgccaccggtctgctggtgctgaaggacctgggcatccaggtggataggtacattgcctccgaggtgtgcgaggactccatcaccgtgggaatggtgcgtcatcagggcaagatcatgtacgtgggcgacgtgcggagcgtgacacagaagcatatccaggagtggggccctttcgacctggtgatcggcggcagcccttgcaatgacctgagcatcgtgaacccagcccggaagggcctgtacgagggaaccggcagactgttcttcgagttttacagactgctgcacgacgcccggcctaaggaaggcgacgaccggcccttcttttggctgttcgagaatgtggtggccatgggagtcagcgacaagcgggatattagccggttcctggagagcaaccccgtgatgatcgatgccaaggaagtgagcgccgcccaccgggccagatacttctggggcaatctgcctggcatgaacagacccctggccagcaccgtgaacgacaagctggagctgcaggagtgcctggagcacggccggatcgccaagttcagcaaggtgagaaccatcaccacccgaagcaacagcatcaaacaaggcaaggaccagcactttcctgtgttcatgaacgagaaggaggacatcctgtggtgtaccgagatggagagagtgttcgggttcccagtccactacacagatgtcagcaacatgtctagactggccagacagagactgctgggaagaagctggtccgtccctgtgatcagacacctgttcgcccctctgaaggagtacttcgcctgcgtgagcagcggcaacagcaacgccaacagccggggccccagcttctctagcggcctggtgccactgtccctgagagggagccacatgggccccatggagatctacaaaaccgtgagcgcctggaagcggcagcctgtgcgcgtgctgagcctgtttcggaatatcgataaagtcctgaaaagcctgggattcctggagagcggctctggctccggcggtggcaccctgaagtacgtggaggatgtgacaaacgtggtcagacgggatgtggagaagtggggccccttcgatctggtgtacggcagcacccaacccctgggcagctcttgtgaccggtgccctggctggtacatgtttcagttccaccggatcctgcagtacgccctgccgagacaggagtcccagcggccattcttttggattttcatggacaacttgctgctgaccgaggatgaccaggaaactaccactcggttcctgcagaccgaagccgtgaccctgcaggacgtgagaggccgggactaccagaacgccatgcgggtgtggtccaacatccctggactgaaaagcaagcacgcacctctgacccctaaagaagaggagtacctgcaggcccaggtgcggagcagaagcaagctggacgcccctaaggtggatctgctggtgaagaattgcctcctgcccctgagagagtacttcaagtatttcagccagaatagtctgcccctgggaggcagcggcggcggcggcaggagccccaggaagaccgaccagttctgcaacagcaagaacatggtgcccggcagcgtgaccttcagggacgtggccatcgacttcagccaggaggagtgggagtgcctgcagcccgcccagaggaccctgtacagggacgtgatgctggagaactacagccacctgatcagcctgggcagcagcatcagcaagcccgacgtgatcaccctgctggagcaggagaaggagccctggatgggcggcccaagcagcggcgcccctcctcccagcggcggcaggcggcccaagcagcggcgcccctcctcccagcggcggcagcccagccggctccccaacctctaccgaggagggcacctctgagtccgccacccccgagagcggccctggcacctccaccgagcccagcgagggcagcgcacccggcagccctgccggcagccccacctccacagaggagggaaccagcaccgagcccagcgaaggcagcgccccaggcaccagcaccgagcctagtgagcaggagattaaacggatcaacaagatcagaagaagacttgtgaaagacagcaacaccaagaaggccggcaagacaggccccatgaaaaccctgctggttagagtgatgacacccgatctgagagagcggctggaaaacctgagaaagaagcctgaaaatatcccccagcccatcagcaatacatctagagccaacctgaataagctgctgaccgattacaccgaaatgaagaaggcgatcctgcatgtgtactgggaagagttccagaaggaccctgtgggcctgatgagccgggtggcccagcctgccagcaagaagatcgatcagaacaagctgaaacctgagatggacgagaagggcaacctgaccaccgccggctttgcctgctctcagtgtggccagcccctgttcgtgtacaagctggagcaggtgtctgagaagggcaaggcttacaccaactacttcggacggtgcaatgtggccgagcacgaaaagctgatcctgctggcccagctgaagcccgagaaggatagcgacgaagccgtgacatatagcctgggaaagtttgggcagagggccctggatttctacagcattcatgtgaccaaggagtccacccaccccgtgaagcccctggcccagatcgccggaaacagatacgcctccggacctgtgggaaaggccctgagcgacgcatgtatgggcacaatcgcctccttcctgtctaagtaccaggacatcatcatcgaacaccagaaggtggtgaagggcaaccagaagagactggagagcctgcgggagctggccggcaaggaaaacctggaataccctagcgtgaccctgccacctcagcctcacaccaaggagggcgttgatgcctacaacgaagtgatcgcccgggtgcgaatgtgggtgaacctgaacctgtggcagaagctgaagctaagcagagatgatgccaagcctctgctgagactgaagggattcccttcctttcctctggtcgagagacaggccaacgaagtggactggtgggacatggtgtgtaacgtgaagaagctgatcaacgagaaaaaggaggatggcaaggtgttttggcagaatctggctggctacaagagacaggaagccctgagaccatacctgagcagcgaggaagatcggaagaagggaaagaaattcgctcggtaccagctgggcgacctgctgctgcacctggaaaagaagcacggcgaggactggggaaaggtgtacgacgaggcctgggagcggattgacaagaaagtggaaggcctgagcaagcacatcaagctggaagaggaacggagaagcgaggacgcccagagcaaggccgccctgaccgactggctgcgggctaaggccagcttcgtgatcgagggcctgaaggaggccgacaaggacgagttctgcagatgcgagctgaagctgcagaagtggtacggggacctgcggggaaagcccttcgccatcgaagccgagaacagcatcctggacatcagcggcttcagcaagcagtacaactgtgccttcatctggcagaaggacggcgtgaagaagctgaacctgtacctgatcatcaactacttcaagggcggcaagctgcggttcaagaagatcaaacctgaagccttcgaagccaacagattctacaccgtgatcaacaaaaagagcggcgagatcgtgcccatggaggtgaacttcaacttcgacgaccccaacctgatcatcctgcctctggcctttggcaagagacagggcagagaattcatctggaacgacctgctgtccctggaaaccggcagcctgaagctggccaacggaagagtgatcgagaagacactgtacaacagaagaacccggcaggatgagcctgccctgttcgtggccctgaccttcgagcggcgggaggtcctggactcctccaatatcaaaccaatgaacctgatcggcgtggcaagaggcgaaaacatccccgccgtgatcgccctgaccgaccccgagggctgcccactgagccggtttaaggatagcctgggaaacccaacccacatcctgagaatcggcgagagctataaggagaagcagcggaccatccaggccaagaaggaggtggagcagcggagagccggcggctacagccggaagtacgccagcaaagccaagaatctggcagacgatatggtgagaaacaccgctagagatctgctgtactacgccgtgacccaggatgccatgctgatcttcgccaacctgagccggggcttcggccggcagggcaagcggaccttcatggccgagagacagtacacacggatggaggactggctgaccgccaagctggcctacgagggcctgagcaagacctacctgtccaagacactggcccagtacacctccaagacatgcagcaactgtgggtttaccatcaccagcgccgactacgacagggtgctggagaagctgaagaagacagcaacaggctggatgaccacaattaacggcaaggagctgaaggtggagggccagattacctactacaacagatacaagagacagaacgtagtcaaggacctgtccgtcgagctggatagactgagcgaagaatctgtgaacaacgacatctcctcctggacaaagggcagaagcggagaagctctgagcctcctgaagaaaagattctcccatagacccgtgcaggagaagttcgtgtgcctgaactgcggcttcgagacacacgcagccgagcaagccgccctgaacatcgccagatcctggctgttcctgcggagccaggagtacaagaaataccagacaaacaagacaaccggcaacaccgataagagagccttcgtcgagacctggcagtccttttaccggaagaagcttaaggaggtgtggaaacctgccgtgcggtctggcggatctggcggaggctccaccagccccaagaaaaagagaaaagtctaagctgccttctgcggggcttgccttctggccatgcccttcttctctcccttgcacctgtacctcttggtctttgaataaagcctgagtaggaaggctagcaaaaaaaaaaaaaaaaaaaaaaaaaaaaaaaaaaaaaaaaaaaaaaaaaaaaaaaaaaaaaaaaaaaaaaaaaaaaaaaagcccagccggctccccaacctctaccgaggagggcacctctgagtccgccacccccgagagcggccctggcacctccaccgagcccagcgagggcagcgcacccggcagccctgccggcagccccacctccacagaggagggaaccagcaccgagcccagcgaaggcagcgccccaggcaccagcaccgagcctagtgagcaggagattaaacggatcaacaagatcagaagaagacttgtgaaagacagcaacaccaagaaggccggcaagacaggccccatgaaaaccctgctggttagagtgatgacacccgatctgagagagcggctggaaaacctgagaaagaagcctgaaaatatcccccagcccatcagcaatacatctagagccaacctgaataagctgctgaccgattacaccgaaatgaagaaggcgatcctgcatgtgtactgggaagagttccagaaggaccctgtgggcctgatgagccgggtggcccagcctgccagcaagaagatcgatcagaacaagctgaaacctgagatggacgagaagggcaacctgaccaccgccggctttgcctgctctcagtgtggccagcccctgttcgtgtacaagctggagcaggtgtctgagaagggcaaggcttacaccaactacttcggacggtgcaatgtggccgagcacgaaaagctgatcctgctggcccagctgaagcccgagaaggatagcgacgaagccgtgacatatagcctgggaaagtttgggcagagggccctggatttctacagcattcatgtgaccaaggagtccacccaccccgtgaagcccctggcccagatcgccggaaacagatacgcctccggacctgtgggaaaggccctgagcgacgcatgtatgggcacaatcgcctccttcctgtctaagtaccaggacatcatcatcgaacaccagaaggtggtgaagggcaaccagaagagactggagagcctgcgggagctggccggcaaggaaaacctggaataccctagcgtgaccctgccacctcagcctcacaccaaggagggcgttgatgcctacaacgaagtgatcgcccgggtgcgaatgtgggtgaacctgaacctgtggcagaagctgaagctaagcagagatgatgccaagcctctgctgagactgaagggattcccttcctttcctctggtcgagagacaggccaacgaagtggactggtgggacatggtgtgtaacgtgaagaagctgatcaacgagaaaaaggaggatggcaaggtgttttggcagaatctggctggctacaagagacaggaagccctgagaccatacctgagcagcgaggaagatcggaagaagggaaagaaattcgctcggtaccagctgggcgacctgctgctgcacctggaaaagaagcacggcgaggactggggaaaggtgtacgacgaggcctgggagcggattgacaagaaagtggaaggcctgagcaagcacatcaagctggaagaggaacggagaagcgaggacgcccagagcaaggccgccctgaccgactggctgcgggctaaggccagcttcgtgatcgagggcctgaaggaggccgacaaggacgagttctgcagatgcgagctgaagctgcagaagtggtacggggacctgcggggaaagcccttcgccatcgaagccgagaacagcatcctggacatcagcggcttcagcaagcagtacaactgtgccttcatctggcagaaggacggcgtgaagaagctgaacctgtacctgatcatcaactacttcaagggcggcaagctgcggttcaagaagatcaaacctgaagccttcgaagccaacagattctacaccgtgatcaacaaaaagagcggcgagatcgtgcccatggaggtgaacttcaacttcgacgaccccaacctgatcatcctgcctctggcctttggcaagagacagggcagagaattcatctggaacgacctgctgtccctggaaaccggcagcctgaagctggccaacggaagagtgatcgagaagacactgtacaacagaagaacccggcaggatgagcctgccctgttcgtggccctgaccttcgagcggcgggaggtcctggactcctccaatatcaaaccaatgaacctgatcggcgtggcaagaggcgaaaacatccccgccgtgatcgccctgaccgaccccgagggctgcccactgagccggtttaaggatagcctgggaaacccaacccacatcctgagaatcggcgagagctataaggagaagcagcggaccatccaggccaagaaggaggtggagcagcggagagccggcggctacagccggaagtacgccagcaaagccaagaatctggcagacgatatggtgagaaacaccgctagagatctgctgtactacgccgtgacccaggatgccatgctgatcttcgccaacctgagccggggcttcggccggcagggcaagcggaccttcatggccgagagacagtacacacggatggaggactggctgaccgccaagctggcctacgagggcctgagcaagacctacctgtccaagacactggcccagtacacctccaagacatgcagcaactgtgggtttaccatcaccagcgccgactacgacagggtgctggagaagctgaagaagacagcaacaggctggatgaccacaattaacggcaaggagctgaaggtggagggccagattacctactacaacagatacaagagacagaacgtagtcaaggacctgtccgtcgagctggatagactgagcgaagaatctgtgaacaacgacatctcctcctggacaaagggcagaagcggagaagctctgagcctcctgaagaaaagattctcccatagacccgtgcaggagaagttcgtgtgcctgaactgcggcttcgagacacacgcagccgagcaagccgccctgaacatcgccagatcctggctgttcctgcggagccaggagtacaagaaataccagacaaacaagacaaccggcaacaccgataagagagccttcgtcgagacctggcagtccttttaccggaagaagcttaaggaggtgtggaaacctgccgtgcggtctggcggatctggcggaggctccaccagccccaagaaaaagagaaaagtctaagctgccttctgcggggcttgccttctggccatgcccttcttctctcccttgcacctgtacctcttggtctttgaataaagcctgagtaggaaggctagcaaaaaaaaaaaaaaaaaaaaaaaaaaaaaaaaaaaaaaaaaaaaaaaaaaaaaaaaaaaaaaaaaaaaaaaaaaaaaaaa

SEQ ID NO: 10483 - RNA, 8787 nt, synthetic construct
  source 1..8787: mol_type = other RNA
aggaaataagagagaaaagaagagtaagaagaaatataagagccaccatggcccctaagaagaagcgtaaagtgagccggatgaaccacgaccaggagttcgacccccctaaggtgtaccctcccgtccccgccgagaagagaaagcccatccgggtcctgagcctgttcgatggcatcgccaccggtctgctggtgctgaaggacctgggcatccaggtggataggtacattgcctccgaggtgtgcgaggactccatcaccgtgggaatggtgcgtcatcagggcaagatcatgtacgtgggcgacgtgcggagcgtgacacagaagcatatccaggagtggggccctttcgacctggtgatcggcggcagcccttgcaatgacctgagcatcgtgaacccagcccggaagggcctgtacgagggaaccggcagactgttcttcgagttttacagactgctgcacgacgcccggcctaaggaaggcgacgaccggcccttcttttggctgttcgagaatgtggtggccatgggagtcagcgacaagcgggatattagccggttcctggagagcaaccccgtgatgatcgatgccaaggaagtgagcgccgcccaccgggccagatacttctggggcaatctgcctggcatgaacagacccctggccagcaccgtgaacgacaagctggagctgcaggagtgcctggagcacggccggatcgccaagttcagcaaggtgagaaccatcaccacccgaagcaacagcatcaaacaaggcaaggaccagcactttcctgtgttcatgaacgagaaggaggacatcctgtggtgtaccgagatggagagagtgttcgggttcccagtccactacacagatgtcagcaacatgtctagactggccagacagagactgctgggaagaagctggtccgtccctgtgatcagacacctgttcgcccctctgaaggagtacttcgcctgcgtgagcagcggcaacagcaacgccaacagccggggccccagcttctctagcggcctggtgccactgtccctgagagggagccacatgggccccatggagatctacaaaaccgtgagcgcctggaagcggcagcctgtgcgcgtgctgagcctgtttcggaatatcgataaagtcctgaaaagcctgggattcctggagagcggctctggctccggcggtggcaccctgaagtacgtggaggatgtgacaaacgtggtcagacgggatgtggagaagtggggccccttcgatctggtgtacggcagcacccaacccctgggcagctcttgtgaccggtgccctggctggtacatgtttcagttccaccggatcctgcagtacgccctgccgagacaggagtcccagcggccattcttttggattttcatggacaacttgctgctgaccgaggatgaccaggaaactaccactcggttcctgcagaccgaagccgtgaccctgcaggacgtgagaggccgggactaccagaacgccatgcgggtgtggtccaacatccctggactgaaaagcaagcacgcacctctgacccctaaagaagaggagtacctgcaggcccaggtgcggagcagaagcaagctggacgcccctaaggtggatctgctggtgaagaattgcctcctgcccctgagagagtacttcaagtatttcagccagaatagtctgcccctgggaggcagcggcggcggctgcagccacaggagctgcagggaggaccccggcaccagcgagagcagggagatggaccccgtggccttcgacgacgtggccgtgaacttcacccaggaggagtgggccctgctggacatcagccagaggaagctgtacagggaggtgatgctggagaccttcaggaacctgaccagcatcggcaagaagtggaaggaccagaacatcgagtacgagtaccagaaccccaggaggaacttcaggggcggcccaagcagcggcgcccctcctcccagcggcggcaggcggcccaagcagcggcgcccctcctcccagcggcggcagcccagccggctccccaacctctaccgaggagggcacctctgagtccgccacccccgagagcggccctggcacctccaccgagcccagcgagggcagcgcacccggcagccctgccggcagccccacctccacagaggagggaaccagcaccgagcccagcgaaggcagcgccccaggcaccagcaccgagcctagtgagcaggagattaaacggatcaacaagatcagaagaagacttgtgaaagacagcaacaccaagaaggccggcaagacaggccccatgaaaaccctgctggttagagtgatgacacccgatctgagagagcggctggaaaacctgagaaagaagcctgaaaatatcccccagcccatcagcaatacatctagagccaacctgaataagctgctgaccgattacaccgaaatgaagaaggcgatcctgcatgtgtactgggaagagttccagaaggaccctgtgggcctgatgagccgggtggcccagcctgccagcaagaagatcgatcagaacaagctgaaacctgagatggacgagaagggcaacctgaccaccgccggctttgcctgctctcagtgtggccagcccctgttcgtgtacaagctggagcaggtgtctgagaagggcaaggcttacaccaactacttcggacggtgcaatgtggccgagcacgaaaagctgatcctgctggcccagctgaagcccgagaaggatagcgacgaagccgtgacatatagcctgggaaagtttgggcagagggccctggatttctacagcattcatgtgaccaaggagtccacccaccccgtgaagcccctggcccagatcgccggaaacagatacgcctccggacctgtgggaaaggccctgagcgacgcatgtatgggcacaatcgcctccttcctgtctaagtaccaggacatcatcatcgaacaccagaaggtggtgaagggcaaccagaagagactggagagcctgcgggagctggccggcaaggaaaacctggaataccctagcgtgaccctgccacctcagcctcacaccaaggagggcgttgatgcctacaacgaagtgatcgcccgggtgcgaatgtgggtgaacctgaacctgtggcagaagctgaagctaagcagagatgatgccaagcctctgctgagactgaagggattcccttcctttcctctggtcgagagacaggccaacgaagtggactggtgggacatggtgtgtaacgtgaagaagctgatcaacgagaaaaaggaggatggcaaggtgttttggcagaatctggctggctacaagagacaggaagccctgagaccatacctgagcagcgaggaagatcggaagaagggaaagaaattcgctcggtaccagctgggcgacctgctgctgcacctggaaaagaagcacggcgaggactggggaaaggtgtacgacgaggcctgggagcggattgacaagaaagtggaaggcctgagcaagcacatcaagctggaagaggaacggagaagcgaggacgcccagagcaaggccgccctgaccgactggctgcgggctaaggccagcttcgtgatcgagggcctgaaggaggccgacaaggacgagttctgcagatgcgagctgaagctgcagaagtggtacggggacctgcggggaaagcccttcgccatcgaagccgagaacagcatcctggacatcagcggcttcagcaagcagtacaactgtgccttcatctggcagaaggacggcgtgaagaagctgaacctgtacctgatcatcaactacttcaagggcggcaagctgcggttcaagaagatcaaacctgaagccttcgaagccaacagattctacaccgtgatcaacaaaaagagcggcgagatcgtgcccatggaggtgaacttcaacttcgacgaccccaacctgatcatcctgcctctggcctttggcaagagacagggcagagaattcatctggaacgacctgctgtccctggaaaccggcagcctgaagctggccaacggaagagtgatcgagaagacactgtacaacagaagaacccggcaggatgagcctgccctgttcgtggccctgaccttcgagcggcgggaggtcctggactcctccaatatcaaaccaatgaacctgatcggcgtggcaagaggcgaaaacatccccgccgtgatcgccctgaccgaccccgagggctgcccactgagccggtttaaggatagcctgggaaacccaacccacatcctgagaatcggcgagagctataaggagaagcagcggaccatccaggccaagaaggaggtggagcagcggagagccggcggctacagccggaagtacgccagcaaagccaagaatctggcagacgatatggtgagaaacaccgctagagatctgctgtactacgccgtgacccaggatgccatgctgatcttcgccaacctgagccggggcttcggccggcagggcaagcggaccttcatggccgagagacagtacacacggatggaggactggctgaccgccaagctggcctacgagggcctgagcaagacctacctgtccaagacactggcccagtacacctccaagacatgcagcaactgtgggtttaccatcaccagcgccgactacgacagggtgctggagaagctgaagaagacagcaacaggctggatgaccacaattaacggcaaggagctgaaggtggagggccagattacctactacaacagatacaagagacagaacgtagtcaaggacctgtccgtcgagctggatagactgagcgaagaatctgtgaacaacgacatctcctcctggacaaagggcagaagcggagaagctctgagcctcctgaagaaaagattctcccatagacccgtgcaggagaagttcgtgtgcctgaactgcggcttcgagacacacgcagccgagcaagccgccctgaacatcgccagatcctggctgttcctgcggagccaggagtacaagaaataccagacaaacaagacaaccggcaacaccgataagagagccttcgtcgagacctggcagtccttttaccggaagaagcttaaggaggtgtggaaacctgccgtgcggtctggcggatctggcggaggctccaccagccccaagaaaaagagaaaagtctaagctgccttctgcggggcttgccttctggccatgcccttcttctctcccttgcacctgtacctcttggtctttgaataaagcctgagtaggaaggctagcaaaaaaaaaaaaaaaaaaaaaaaaaaaaaaaaaaaaaaaaaaaaaaaaaaaaaaaaaaaaaaaaaaaaaaaaaaaaaaaagcccagccggctccccaacctctaccgaggagggcacctctgagtccgccacccccgagagcggccctggcacctccaccgagcccagcgagggcagcgcacccggcagccctgccggcagccccacctccacagaggagggaaccagcaccgagcccagcgaaggcagcgccccaggcaccagcaccgagcctagtgagcaggagattaaacggatcaacaagatcagaagaagacttgtgaaagacagcaacaccaagaaggccggcaagacaggccccatgaaaaccctgctggttagagtgatgacacccgatctgagagagcggctggaaaacctgagaaagaagcctgaaaatatcccccagcccatcagcaatacatctagagccaacctgaataagctgctgaccgattacaccgaaatgaagaaggcgatcctgcatgtgtactgggaagagttccagaaggaccctgtgggcctgatgagccgggtggcccagcctgccagcaagaagatcgatcagaacaagctgaaacctgagatggacgagaagggcaacctgaccaccgccggctttgcctgctctcagtgtggccagcccctgttcgtgtacaagctggagcaggtgtctgagaagggcaaggcttacaccaactacttcggacggtgcaatgtggccgagcacgaaaagctgatcctgctggcccagctgaagcccgagaaggatagcgacgaagccgtgacatatagcctgggaaagtttgggcagagggccctggatttctacagcattcatgtgaccaaggagtccacccaccccgtgaagcccctggcccagatcgccggaaacagatacgcctccggacctgtgggaaaggccctgagcgacgcatgtatgggcacaatcgcctccttcctgtctaagtaccaggacatcatcatcgaacaccagaaggtggtgaagggcaaccagaagagactggagagcctgcgggagctggccggcaaggaaaacctggaataccctagcgtgaccctgccacctcagcctcacaccaaggagggcgttgatgcctacaacgaagtgatcgcccgggtgcgaatgtgggtgaacctgaacctgtggcagaagctgaagctaagcagagatgatgccaagcctctgctgagactgaagggattcccttcctttcctctggtcgagagacaggccaacgaagtggactggtgggacatggtgtgtaacgtgaagaagctgatcaacgagaaaaaggaggatggcaaggtgttttggcagaatctggctggctacaagagacaggaagccctgagaccatacctgagcagcgaggaagatcggaagaagggaaagaaattcgctcggtaccagctgggcgacctgctgctgcacctggaaaagaagcacggcgaggactggggaaaggtgtacgacgaggcctgggagcggattgacaagaaagtggaaggcctgagcaagcacatcaagctggaagaggaacggagaagcgaggacgcccagagcaaggccgccctgaccgactggctgcgggctaaggccagcttcgtgatcgagggcctgaaggaggccgacaaggacgagttctgcagatgcgagctgaagctgcagaagtggtacggggacctgcggggaaagcccttcgccatcgaagccgagaacagcatcctggacatcagcggcttcagcaagcagtacaactgtgccttcatctggcagaaggacggcgtgaagaagctgaacctgtacctgatcatcaactacttcaagggcggcaagctgcggttcaagaagatcaaacctgaagccttcgaagccaacagattctacaccgtgatcaacaaaaagagcggcgagatcgtgcccatggaggtgaacttcaacttcgacgaccccaacctgatcatcctgcctctggcctttggcaagagacagggcagagaattcatctggaacgacctgctgtccctggaaaccggcagcctgaagctggccaacggaagagtgatcgagaagacactgtacaacagaagaacccggcaggatgagcctgccctgttcgtggccctgaccttcgagcggcgggaggtcctggactcctccaatatcaaaccaatgaacctgatcggcgtggcaagaggcgaaaacatccccgccgtgatcgccctgaccgaccccgagggctgcccactgagccggtttaaggatagcctgggaaacccaacccacatcctgagaatcggcgagagctataaggagaagcagcggaccatccaggccaagaaggaggtggagcagcggagagccggcggctacagccggaagtacgccagcaaagccaagaatctggcagacgatatggtgagaaacaccgctagagatctgctgtactacgccgtgacccaggatgccatgctgatcttcgccaacctgagccggggcttcggccggcagggcaagcggaccttcatggccgagagacagtacacacggatggaggactggctgaccgccaagctggcctacgagggcctgagcaagacctacctgtccaagacactggcccagtacacctccaagacatgcagcaactgtgggtttaccatcaccagcgccgactacgacagggtgctggagaagctgaagaagacagcaacaggctggatgaccacaattaacggcaaggagctgaaggtggagggccagattacctactacaacagatacaagagacagaacgtagtcaaggacctgtccgtcgagctggatagactgagcgaagaatctgtgaacaacgacatctcctcctggacaaagggcagaagcggagaagctctgagcctcctgaagaaaagattctcccatagacccgtgcaggagaagttcgtgtgcctgaactgcggcttcgagacacacgcagccgagcaagccgccctgaacatcgccagatcctggctgttcctgcggagccaggagtacaagaaataccagacaaacaagacaaccggcaacaccgataagagagccttcgtcgagacctggcagtccttttaccggaagaagcttaaggaggtgtggaaacctgccgtgcggtctggcggatctggcggaggctccaccagccccaagaaaaagagaaaagtctaagctgccttctgcggggcttgccttctggccatgcccttcttctctcccttgcacctgtacctcttggtctttgaataaagcctgagtaggaaggctagcaaaaaaaaaaaaaaaaaaaaaaaaaaaaaaaaaaaaaaaaaaaaaaaaaaaaaaaaaaaaaaaaaaaaaaaaaaaaaaaa

SEQ ID NO: 10484 - RNA, 8787 nt, synthetic construct
  source 1..8787: mol_type = other RNA
aggaaataagagagaaaagaagagtaagaagaaatataagagccaccatggcccctaagaagaagcgtaaagtgagccggatgaaccacgaccaggagttcgacccccctaaggtgtaccctcccgtccccgccgagaagagaaagcccatccgggtcctgagcctgttcgatggcatcgccaccggtctgctggtgctgaaggacctgggcatccaggtggataggtacattgcctccgaggtgtgcgaggactccatcaccgtgggaatggtgcgtcatcagggcaagatcatgtacgtgggcgacgtgcggagcgtgacacagaagcatatccaggagtggggccctttcgacctggtgatcggcggcagcccttgcaatgacctgagcatcgtgaacccagcccggaagggcctgtacgagggaaccggcagactgttcttcgagttttacagactgctgcacgacgcccggcctaaggaaggcgacgaccggcccttcttttggctgttcgagaatgtggtggccatgggagtcagcgacaagcgggatattagccggttcctggagagcaaccccgtgatgatcgatgccaaggaagtgagcgccgcccaccgggccagatacttctggggcaatctgcctggcatgaacagacccctggccagcaccgtgaacgacaagctggagctgcaggagtgcctggagcacggccggatcgccaagttcagcaaggtgagaaccatcaccacccgaagcaacagcatcaaacaaggcaaggaccagcactttcctgtgttcatgaacgagaaggaggacatcctgtggtgtaccgagatggagagagtgttcgggttcccagtccactacacagatgtcagcaacatgtctagactggccagacagagactgctgggaagaagctggtccgtccctgtgatcagacacctgttcgcccctctgaaggagtacttcgcctgcgtgagcagcggcaacagcaacgccaacagccggggccccagcttctctagcggcctggtgccactgtccctgagagggagccacatgggccccatggagatctacaaaaccgtgagcgcctggaagcggcagcctgtgcgcgtgctgagcctgtttcggaatatcgataaagtcctgaaaagcctgggattcctggagagcggctctggctccggcggtggcaccctgaagtacgtggaggatgtgacaaacgtggtcagacgggatgtggagaagtggggccccttcgatctggtgtacggcagcacccaacccctgggcagctcttgtgaccggtgccctggctggtacatgtttcagttccaccggatcctgcagtacgccctgccgagacaggagtcccagcggccattcttttggattttcatggacaacttgctgctgaccgaggatgaccaggaaactaccactcggttcctgcagaccgaagccgtgaccctgcaggacgtgagaggccgggactaccagaacgccatgcgggtgtggtccaacatccctggactgaaaagcaagcacgcacctctgacccctaaagaagaggagtacctgcaggcccaggtgcggagcagaagcaagctggacgcccctaaggtggatctgctggtgaagaattgcctcctgcccctgagagagtacttcaagtatttcagccagaatagtctgcccctgggaggcagcggcggcggcgcccagaggtgggaggccttcgaggacgtggccctgtacttcacccagaaggagtgggagctgctgagggacggcgacaaggtgctgtaccaggagcagatgctgaggaactaccaggccctggtgagcctgggctaccagggccccacccccgacctgatctgcaggatccagaggggcgacatggagctgtgggtgtgcgacgacgaggaccccaaggagagcatgtggagcgagggcctgggcggcccaagcagcggcgcccctcctcccagcggcggcaggcggcccaagcagcggcgcccctcctcccagcggcggcagcccagccggctccccaacctctaccgaggagggcacctctgagtccgccacccccgagagcggccctggcacctccaccgagcccagcgagggcagcgcacccggcagccctgccggcagccccacctccacagaggagggaaccagcaccgagcccagcgaaggcagcgccccaggcaccagcaccgagcctagtgagcaggagattaaacggatcaacaagatcagaagaagacttgtgaaagacagcaacaccaagaaggccggcaagacaggccccatgaaaaccctgctggttagagtgatgacacccgatctgagagagcggctggaaaacctgagaaagaagcctgaaaatatcccccagcccatcagcaatacatctagagccaacctgaataagctgctgaccgattacaccgaaatgaagaaggcgatcctgcatgtgtactgggaagagttccagaaggaccctgtgggcctgatgagccgggtggcccagcctgccagcaagaagatcgatcagaacaagctgaaacctgagatggacgagaagggcaacctgaccaccgccggctttgcctgctctcagtgtggccagcccctgttcgtgtacaagctggagcaggtgtctgagaagggcaaggcttacaccaactacttcggacggtgcaatgtggccgagcacgaaaagctgatcctgctggcccagctgaagcccgagaaggatagcgacgaagccgtgacatatagcctgggaaagtttgggcagagggccctggatttctacagcattcatgtgaccaaggagtccacccaccccgtgaagcccctggcccagatcgccggaaacagatacgcctccggacctgtgggaaaggccctgagcgacgcatgtatgggcacaatcgcctccttcctgtctaagtaccaggacatcatcatcgaacaccagaaggtggtgaagggcaaccagaagagactggagagcctgcgggagctggccggcaaggaaaacctggaataccctagcgtgaccctgccacctcagcctcacaccaaggagggcgttgatgcctacaacgaagtgatcgcccgggtgcgaatgtgggtgaacctgaacctgtggcagaagctgaagctaagcagagatgatgccaagcctctgctgagactgaagggattcccttcctttcctctggtcgagagacaggccaacgaagtggactggtgggacatggtgtgtaacgtgaagaagctgatcaacgagaaaaaggaggatggcaaggtgttttggcagaatctggctggctacaagagacaggaagccctgagaccatacctgagcagcgaggaagatcggaagaagggaaagaaattcgctcggtaccagctgggcgacctgctgctgcacctggaaaagaagcacggcgaggactggggaaaggtgtacgacgaggcctgggagcggattgacaagaaagtggaaggcctgagcaagcacatcaagctggaagaggaacggagaagcgaggacgcccagagcaaggccgccctgaccgactggctgcgggctaaggccagcttcgtgatcgagggcctgaaggaggccgacaaggacgagttctgcagatgcgagctgaagctgcagaagtggtacggggacctgcggggaaagcccttcgccatcgaagccgagaacagcatcctggacatcagcggcttcagcaagcagtacaactgtgccttcatctggcagaaggacggcgtgaagaagctgaacctgtacctgatcatcaactacttcaagggcggcaagctgcggttcaagaagatcaaacctgaagccttcgaagccaacagattctacaccgtgatcaacaaaaagagcggcgagatcgtgcccatggaggtgaacttcaacttcgacgaccccaacctgatcatcctgcctctggcctttggcaagagacagggcagagaattcatctggaacgacctgctgtccctggaaaccggcagcctgaagctggccaacggaagagtgatcgagaagacactgtacaacagaagaacccggcaggatgagcctgccctgttcgtggccctgaccttcgagcggcgggaggtcctggactcctccaatatcaaaccaatgaacctgatcggcgtggcaagaggcgaaaacatccccgccgtgatcgccctgaccgaccccgagggctgcccactgagccggtttaaggatagcctgggaaacccaacccacatcctgagaatcggcgagagctataaggagaagcagcggaccatccaggccaagaaggaggtggagcagcggagagccggcggctacagccggaagtacgccagcaaagccaagaatctggcagacgatatggtgagaaacaccgctagagatctgctgtactacgccgtgacccaggatgccatgctgatcttcgccaacctgagccggggcttcggccggcagggcaagcggaccttcatggccgagagacagtacacacggatggaggactggctgaccgccaagctggcctacgagggcctgagcaagacctacctgtccaagacactggcccagtacacctccaagacatgcagcaactgtgggtttaccatcaccagcgccgactacgacagggtgctggagaagctgaagaagacagcaacaggctggatgaccacaattaacggcaaggagctgaaggtggagggccagattacctactacaacagatacaagagacagaacgtagtcaaggacctgtccgtcgagctggatagactgagcgaagaatctgtgaacaacgacatctcctcctggacaaagggcagaagcggagaagctctgagcctcctgaagaaaagattctcccatagacccgtgcaggagaagttcgtgtgcctgaactgcggcttcgagacacacgcagccgagcaagccgccctgaacatcgccagatcctggctgttcctgcggagccaggagtacaagaaataccagacaaacaagacaaccggcaacaccgataagagagccttcgtcgagacctggcagtccttttaccggaagaagcttaaggaggtgtggaaacctgccgtgcggtctggcggatctggcggaggctccaccagccccaagaaaaagagaaaagtctaagctgccttctgcggggcttgccttctggccatgcccttcttctctcccttgcacctgtacctcttggtctttgaataaagcctgagtaggaaggctagcaaaaaaaaaaaaaaaaaaaaaaaaaaaaaaaaaaaaaaaaaaaaaaaaaaaaaaaaaaaaaaaaaaaaaaaaaaaaaaaagcccagccggctccccaacctctaccgaggagggcacctctgagtccgccacccccgagagcggccctggcacctccaccgagcccagcgagggcagcgcacccggcagccctgccggcagccccacctccacagaggagggaaccagcaccgagcccagcgaaggcagcgccccaggcaccagcaccgagcctagtgagcaggagattaaacggatcaacaagatcagaagaagacttgtgaaagacagcaacaccaagaaggccggcaagacaggccccatgaaaaccctgctggttagagtgatgacacccgatctgagagagcggctggaaaacctgagaaagaagcctgaaaatatcccccagcccatcagcaatacatctagagccaacctgaataagctgctgaccgattacaccgaaatgaagaaggcgatcctgcatgtgtactgggaagagttccagaaggaccctgtgggcctgatgagccgggtggcccagcctgccagcaagaagatcgatcagaacaagctgaaacctgagatggacgagaagggcaacctgaccaccgccggctttgcctgctctcagtgtggccagcccctgttcgtgtacaagctggagcaggtgtctgagaagggcaaggcttacaccaactacttcggacggtgcaatgtggccgagcacgaaaagctgatcctgctggcccagctgaagcccgagaaggatagcgacgaagccgtgacatatagcctgggaaagtttgggcagagggccctggatttctacagcattcatgtgaccaaggagtccacccaccccgtgaagcccctggcccagatcgccggaaacagatacgcctccggacctgtgggaaaggccctgagcgacgcatgtatgggcacaatcgcctccttcctgtctaagtaccaggacatcatcatcgaacaccagaaggtggtgaagggcaaccagaagagactggagagcctgcgggagctggccggcaaggaaaacctggaataccctagcgtgaccctgccacctcagcctcacaccaaggagggcgttgatgcctacaacgaagtgatcgcccgggtgcgaatgtgggtgaacctgaacctgtggcagaagctgaagctaagcagagatgatgccaagcctctgctgagactgaagggattcccttcctttcctctggtcgagagacaggccaacgaagtggactggtgggacatggtgtgtaacgtgaagaagctgatcaacgagaaaaaggaggatggcaaggtgttttggcagaatctggctggctacaagagacaggaagccctgagaccatacctgagcagcgaggaagatcggaagaagggaaagaaattcgctcggtaccagctgggcgacctgctgctgcacctggaaaagaagcacggcgaggactggggaaaggtgtacgacgaggcctgggagcggattgacaagaaagtggaaggcctgagcaagcacatcaagctggaagaggaacggagaagcgaggacgcccagagcaaggccgccctgaccgactggctgcgggctaaggccagcttcgtgatcgagggcctgaaggaggccgacaaggacgagttctgcagatgcgagctgaagctgcagaagtggtacggggacctgcggggaaagcccttcgccatcgaagccgagaacagcatcctggacatcagcggcttcagcaagcagtacaactgtgccttcatctggcagaaggacggcgtgaagaagctgaacctgtacctgatcatcaactacttcaagggcggcaagctgcggttcaagaagatcaaacctgaagccttcgaagccaacagattctacaccgtgatcaacaaaaagagcggcgagatcgtgcccatggaggtgaacttcaacttcgacgaccccaacctgatcatcctgcctctggcctttggcaagagacagggcagagaattcatctggaacgacctgctgtccctggaaaccggcagcctgaagctggccaacggaagagtgatcgagaagacactgtacaacagaagaacccggcaggatgagcctgccctgttcgtggccctgaccttcgagcggcgggaggtcctggactcctccaatatcaaaccaatgaacctgatcggcgtggcaagaggcgaaaacatccccgccgtgatcgccctgaccgaccccgagggctgcccactgagccggtttaaggatagcctgggaaacccaacccacatcctgagaatcggcgagagctataaggagaagcagcggaccatccaggccaagaaggaggtggagcagcggagagccggcggctacagccggaagtacgccagcaaagccaagaatctggcagacgatatggtgagaaacaccgctagagatctgctgtactacgccgtgacccaggatgccatgctgatcttcgccaacctgagccggggcttcggccggcagggcaagcggaccttcatggccgagagacagtacacacggatggaggactggctgaccgccaagctggcctacgagggcctgagcaagacctacctgtccaagacactggcccagtacacctccaagacatgcagcaactgtgggtttaccatcaccagcgccgactacgacagggtgctggagaagctgaagaagacagcaacaggctggatgaccacaattaacggcaaggagctgaaggtggagggccagattacctactacaacagatacaagagacagaacgtagtcaaggacctgtccgtcgagctggatagactgagcgaagaatctgtgaacaacgacatctcctcctggacaaagggcagaagcggagaagctctgagcctcctgaagaaaagattctcccatagacccgtgcaggagaagttcgtgtgcctgaactgcggcttcgagacacacgcagccgagcaagccgccctgaacatcgccagatcctggctgttcctgcggagccaggagtacaagaaataccagacaaacaagacaaccggcaacaccgataagagagccttcgtcgagacctggcagtccttttaccggaagaagcttaaggaggtgtggaaacctgccgtgcggtctggcggatctggcggaggctccaccagccccaagaaaaagagaaaagtctaagctgccttctgcggggcttgccttctggccatgcccttcttctctcccttgcacctgtacctcttggtctttgaataaagcctgagtaggaaggctagcaaaaaaaaaaaaaaaaaaaaaaaaaaaaaaaaaaaaaaaaaaaaaaaaaaaaaaaaaaaaaaaaaaaaaaaaaaaaaaaa

SEQ ID NO: 10485 - RNA, 8787 nt, synthetic construct
  source 1..8787: mol_type = other RNA
aggaaataagagagaaaagaagagtaagaagaaatataagagccaccatggcccctaagaagaagcgtaaagtgagccggatgaaccacgaccaggagttcgacccccctaaggtgtaccctcccgtccccgccgagaagagaaagcccatccgggtcctgagcctgttcgatggcatcgccaccggtctgctggtgctgaaggacctgggcatccaggtggataggtacattgcctccgaggtgtgcgaggactccatcaccgtgggaatggtgcgtcatcagggcaagatcatgtacgtgggcgacgtgcggagcgtgacacagaagcatatccaggagtggggccctttcgacctggtgatcggcggcagcccttgcaatgacctgagcatcgtgaacccagcccggaagggcctgtacgagggaaccggcagactgttcttcgagttttacagactgctgcacgacgcccggcctaaggaaggcgacgaccggcccttcttttggctgttcgagaatgtggtggccatgggagtcagcgacaagcgggatattagccggttcctggagagcaaccccgtgatgatcgatgccaaggaagtgagcgccgcccaccgggccagatacttctggggcaatctgcctggcatgaacagacccctggccagcaccgtgaacgacaagctggagctgcaggagtgcctggagcacggccggatcgccaagttcagcaaggtgagaaccatcaccacccgaagcaacagcatcaaacaaggcaaggaccagcactttcctgtgttcatgaacgagaaggaggacatcctgtggtgtaccgagatggagagagtgttcgggttcccagtccactacacagatgtcagcaacatgtctagactggccagacagagactgctgggaagaagctggtccgtccctgtgatcagacacctgttcgcccctctgaaggagtacttcgcctgcgtgagcagcggcaacagcaacgccaacagccggggccccagcttctctagcggcctggtgccactgtccctgagagggagccacatgggccccatggagatctacaaaaccgtgagcgcctggaagcggcagcctgtgcgcgtgctgagcctgtttcggaatatcgataaagtcctgaaaagcctgggattcctggagagcggctctggctccggcggtggcaccctgaagtacgtggaggatgtgacaaacgtggtcagacgggatgtggagaagtggggccccttcgatctggtgtacggcagcacccaacccctgggcagctcttgtgaccggtgccctggctggtacatgtttcagttccaccggatcctgcagtacgccctgccgagacaggagtcccagcggccattcttttggattttcatggacaacttgctgctgaccgaggatgaccaggaaactaccactcggttcctgcagaccgaagccgtgaccctgcaggacgtgagaggccgggactaccagaacgccatgcgggtgtggtccaacatccctggactgaaaagcaagcacgcacctctgacccctaaagaagaggagtacctgcaggcccaggtgcggagcagaagcaagctggacgcccctaaggtggatctgctggtgaagaattgcctcctgcccctgagagagtacttcaagtatttcagccagaatagtctgcccctgggaggcagcggcggcggccccaaggtgcccgtgagcttcgaggacgtggccatgtacttcaccaagaccgagtggaagctgctggacctgaagcagaggatcctgtacaagcaggtgatgctggagaactacggccacctggtgagcctgggcttcgccttcagcaagcccaggctggtgagccagctggagaggggcgagggcccctgggtggccgacagcctgaggggccaggccgaggccgagagccacgccggcgagggcggcccaagcagcggcgcccctcctcccagcggcggcaggcggcccaagcagcggcgcccctcctcccagcggcggcagcccagccggctccccaacctctaccgaggagggcacctctgagtccgccacccccgagagcggccctggcacctccaccgagcccagcgagggcagcgcacccggcagccctgccggcagccccacctccacagaggagggaaccagcaccgagcccagcgaaggcagcgccccaggcaccagcaccgagcctagtgagcaggagattaaacggatcaacaagatcagaagaagacttgtgaaagacagcaacaccaagaaggccggcaagacaggccccatgaaaaccctgctggttagagtgatgacacccgatctgagagagcggctggaaaacctgagaaagaagcctgaaaatatcccccagcccatcagcaatacatctagagccaacctgaataagctgctgaccgattacaccgaaatgaagaaggcgatcctgcatgtgtactgggaagagttccagaaggaccctgtgggcctgatgagccgggtggcccagcctgccagcaagaagatcgatcagaacaagctgaaacctgagatggacgagaagggcaacctgaccaccgccggctttgcctgctctcagtgtggccagcccctgttcgtgtacaagctggagcaggtgtctgagaagggcaaggcttacaccaactacttcggacggtgcaatgtggccgagcacgaaaagctgatcctgctggcccagctgaagcccgagaaggatagcgacgaagccgtgacatatagcctgggaaagtttgggcagagggccctggatttctacagcattcatgtgaccaaggagtccacccaccccgtgaagcccctggcccagatcgccggaaacagatacgcctccggacctgtgggaaaggccctgagcgacgcatgtatgggcacaatcgcctccttcctgtctaagtaccaggacatcatcatcgaacaccagaaggtggtgaagggcaaccagaagagactggagagcctgcgggagctggccggcaaggaaaacctggaataccctagcgtgaccctgccacctcagcctcacaccaaggagggcgttgatgcctacaacgaagtgatcgcccgggtgcgaatgtgggtgaacctgaacctgtggcagaagctgaagctaagcagagatgatgccaagcctctgctgagactgaagggattcccttcctttcctctggtcgagagacaggccaacgaagtggactggtgggacatggtgtgtaacgtgaagaagctgatcaacgagaaaaaggaggatggcaaggtgttttggcagaatctggctggctacaagagacaggaagccctgagaccatacctgagcagcgaggaagatcggaagaagggaaagaaattcgctcggtaccagctgggcgacctgctgctgcacctggaaaagaagcacggcgaggactggggaaaggtgtacgacgaggcctgggagcggattgacaagaaagtggaaggcctgagcaagcacatcaagctggaagaggaacggagaagcgaggacgcccagagcaaggccgccctgaccgactggctgcgggctaaggccagcttcgtgatcgagggcctgaaggaggccgacaaggacgagttctgcagatgcgagctgaagctgcagaagtggtacggggacctgcggggaaagcccttcgccatcgaagccgagaacagcatcctggacatcagcggcttcagcaagcagtacaactgtgccttcatctggcagaaggacggcgtgaagaagctgaacctgtacctgatcatcaactacttcaagggcggcaagctgcggttcaagaagatcaaacctgaagccttcgaagccaacagattctacaccgtgatcaacaaaaagagcggcgagatcgtgcccatggaggtgaacttcaacttcgacgaccccaacctgatcatcctgcctctggcctttggcaagagacagggcagagaattcatctggaacgacctgctgtccctggaaaccggcagcctgaagctggccaacggaagagtgatcgagaagacactgtacaacagaagaacccggcaggatgagcctgccctgttcgtggccctgaccttcgagcggcgggaggtcctggactcctccaatatcaaaccaatgaacctgatcggcgtggcaagaggcgaaaacatccccgccgtgatcgccctgaccgaccccgagggctgcccactgagccggtttaaggatagcctgggaaacccaacccacatcctgagaatcggcgagagctataaggagaagcagcggaccatccaggccaagaaggaggtggagcagcggagagccggcggctacagccggaagtacgccagcaaagccaagaatctggcagacgatatggtgagaaacaccgctagagatctgctgtactacgccgtgacccaggatgccatgctgatcttcgccaacctgagccggggcttcggccggcagggcaagcggaccttcatggccgagagacagtacacacggatggaggactggctgaccgccaagctggcctacgagggcctgagcaagacctacctgtccaagacactggcccagtacacctccaagacatgcagcaactgtgggtttaccatcaccagcgccgactacgacagggtgctggagaagctgaagaagacagcaacaggctggatgaccacaattaacggcaaggagctgaaggtggagggccagattacctactacaacagatacaagagacagaacgtagtcaaggacctgtccgtcgagctggatagactgagcgaagaatctgtgaacaacgacatctcctcctggacaaagggcagaagcggagaagctctgagcctcctgaagaaaagattctcccatagacccgtgcaggagaagttcgtgtgcctgaactgcggcttcgagacacacgcagccgagcaagccgccctgaacatcgccagatcctggctgttcctgcggagccaggagtacaagaaataccagacaaacaagacaaccggcaacaccgataagagagccttcgtcgagacctggcagtccttttaccggaagaagcttaaggaggtgtggaaacctgccgtgcggtctggcggatctggcggaggctccaccagccccaagaaaaagagaaaagtctaagctgccttctgcggggcttgccttctggccatgcccttcttctctcccttgcacctgtacctcttggtctttgaataaagcctgagtaggaaggctagcaaaaaaaaaaaaaaaaaaaaaaaaaaaaaaaaaaaaaaaaaaaaaaaaaaaaaaaaaaaaaaaaaaaaaaaaaaaaaaaagcccagccggctccccaacctctaccgaggagggcacctctgagtccgccacccccgagagcggccctggcacctccaccgagcccagcgagggcagcgcacccggcagccctgccggcagccccacctccacagaggagggaaccagcaccgagcccagcgaaggcagcgccccaggcaccagcaccgagcctagtgagcaggagattaaacggatcaacaagatcagaagaagacttgtgaaagacagcaacaccaagaaggccggcaagacaggccccatgaaaaccctgctggttagagtgatgacacccgatctgagagagcggctggaaaacctgagaaagaagcctgaaaatatcccccagcccatcagcaatacatctagagccaacctgaataagctgctgaccgattacaccgaaatgaagaaggcgatcctgcatgtgtactgggaagagttccagaaggaccctgtgggcctgatgagccgggtggcccagcctgccagcaagaagatcgatcagaacaagctgaaacctgagatggacgagaagggcaacctgaccaccgccggctttgcctgctctcagtgtggccagcccctgttcgtgtacaagctggagcaggtgtctgagaagggcaaggcttacaccaactacttcggacggtgcaatgtggccgagcacgaaaagctgatcctgctggcccagctgaagcccgagaaggatagcgacgaagccgtgacatatagcctgggaaagtttgggcagagggccctggatttctacagcattcatgtgaccaaggagtccacccaccccgtgaagcccctggcccagatcgccggaaacagatacgcctccggacctgtgggaaaggccctgagcgacgcatgtatgggcacaatcgcctccttcctgtctaagtaccaggacatcatcatcgaacaccagaaggtggtgaagggcaaccagaagagactggagagcctgcgggagctggccggcaaggaaaacctggaataccctagcgtgaccctgccacctcagcctcacaccaaggagggcgttgatgcctacaacgaagtgatcgcccgggtgcgaatgtgggtgaacctgaacctgtggcagaagctgaagctaagcagagatgatgccaagcctctgctgagactgaagggattcccttcctttcctctggtcgagagacaggccaacgaagtggactggtgggacatggtgtgtaacgtgaagaagctgatcaacgagaaaaaggaggatggcaaggtgttttggcagaatctggctggctacaagagacaggaagccctgagaccatacctgagcagcgaggaagatcggaagaagggaaagaaattcgctcggtaccagctgggcgacctgctgctgcacctggaaaagaagcacggcgaggactggggaaaggtgtacgacgaggcctgggagcggattgacaagaaagtggaaggcctgagcaagcacatcaagctggaagaggaacggagaagcgaggacgcccagagcaaggccgccctgaccgactggctgcgggctaaggccagcttcgtgatcgagggcctgaaggaggccgacaaggacgagttctgcagatgcgagctgaagctgcagaagtggtacggggacctgcggggaaagcccttcgccatcgaagccgagaacagcatcctggacatcagcggcttcagcaagcagtacaactgtgccttcatctggcagaaggacggcgtgaagaagctgaacctgtacctgatcatcaactacttcaagggcggcaagctgcggttcaagaagatcaaacctgaagccttcgaagccaacagattctacaccgtgatcaacaaaaagagcggcgagatcgtgcccatggaggtgaacttcaacttcgacgaccccaacctgatcatcctgcctctggcctttggcaagagacagggcagagaattcatctggaacgacctgctgtccctggaaaccggcagcctgaagctggccaacggaagagtgatcgagaagacactgtacaacagaagaacccggcaggatgagcctgccctgttcgtggccctgaccttcgagcggcgggaggtcctggactcctccaatatcaaaccaatgaacctgatcggcgtggcaagaggcgaaaacatccccgccgtgatcgccctgaccgaccccgagggctgcccactgagccggtttaaggatagcctgggaaacccaacccacatcctgagaatcggcgagagctataaggagaagcagcggaccatccaggccaagaaggaggtggagcagcggagagccggcggctacagccggaagtacgccagcaaagccaagaatctggcagacgatatggtgagaaacaccgctagagatctgctgtactacgccgtgacccaggatgccatgctgatcttcgccaacctgagccggggcttcggccggcagggcaagcggaccttcatggccgagagacagtacacacggatggaggactggctgaccgccaagctggcctacgagggcctgagcaagacctacctgtccaagacactggcccagtacacctccaagacatgcagcaactgtgggtttaccatcaccagcgccgactacgacagggtgctggagaagctgaagaagacagcaacaggctggatgaccacaattaacggcaaggagctgaaggtggagggccagattacctactacaacagatacaagagacagaacgtagtcaaggacctgtccgtcgagctggatagactgagcgaagaatctgtgaacaacgacatctcctcctggacaaagggcagaagcggagaagctctgagcctcctgaagaaaagattctcccatagacccgtgcaggagaagttcgtgtgcctgaactgcggcttcgagacacacgcagccgagcaagccgccctgaacatcgccagatcctggctgttcctgcggagccaggagtacaagaaataccagacaaacaagacaaccggcaacaccgataagagagccttcgtcgagacctggcagtccttttaccggaagaagcttaaggaggtgtggaaacctgccgtgcggtctggcggatctggcggaggctccaccagccccaagaaaaagagaaaagtctaagctgccttctgcggggcttgccttctggccatgcccttcttctctcccttgcacctgtacctcttggtctttgaataaagcctgagtaggaaggctagcaaaaaaaaaaaaaaaaaaaaaaaaaaaaaaaaaaaaaaaaaaaaaaaaaaaaaaaaaaaaaaaaaaaaaaaaaaaaaaaa

SEQ ID NO: 10486 - RNA, 8787 nt, synthetic construct
  source 1..8787: mol_type = other RNA
aggaaataagagagaaaagaagagtaagaagaaatataagagccaccatggcccctaagaagaagcgtaaagtgagccggatgaaccacgaccaggagttcgacccccctaaggtgtaccctcccgtccccgccgagaagagaaagcccatccgggtcctgagcctgttcgatggcatcgccaccggtctgctggtgctgaaggacctgggcatccaggtggataggtacattgcctccgaggtgtgcgaggactccatcaccgtgggaatggtgcgtcatcagggcaagatcatgtacgtgggcgacgtgcggagcgtgacacagaagcatatccaggagtggggccctttcgacctggtgatcggcggcagcccttgcaatgacctgagcatcgtgaacccagcccggaagggcctgtacgagggaaccggcagactgttcttcgagttttacagactgctgcacgacgcccggcctaaggaaggcgacgaccggcccttcttttggctgttcgagaatgtggtggccatgggagtcagcgacaagcgggatattagccggttcctggagagcaaccccgtgatgatcgatgccaaggaagtgagcgccgcccaccgggccagatacttctggggcaatctgcctggcatgaacagacccctggccagcaccgtgaacgacaagctggagctgcaggagtgcctggagcacggccggatcgccaagttcagcaaggtgagaaccatcaccacccgaagcaacagcatcaaacaaggcaaggaccagcactttcctgtgttcatgaacgagaaggaggacatcctgtggtgtaccgagatggagagagtgttcgggttcccagtccactacacagatgtcagcaacatgtctagactggccagacagagactgctgggaagaagctggtccgtccctgtgatcagacacctgttcgcccctctgaaggagtacttcgcctgcgtgagcagcggcaacagcaacgccaacagccggggccccagcttctctagcggcctggtgccactgtccctgagagggagccacatgggccccatggagatctacaaaaccgtgagcgcctggaagcggcagcctgtgcgcgtgctgagcctgtttcggaatatcgataaagtcctgaaaagcctgggattcctggagagcggctctggctccggcggtggcaccctgaagtacgtggaggatgtgacaaacgtggtcagacgggatgtggagaagtggggccccttcgatctggtgtacggcagcacccaacccctgggcagctcttgtgaccggtgccctggctggtacatgtttcagttccaccggatcctgcagtacgccctgccgagacaggagtcccagcggccattcttttggattttcatggacaacttgctgctgaccgaggatgaccaggaaactaccactcggttcctgcagaccgaagccgtgaccctgcaggacgtgagaggccgggactaccagaacgccatgcgggtgtggtccaacatccctggactgaaaagcaagcacgcacctctgacccctaaagaagaggagtacctgcaggcccaggtgcggagcagaagcaagctggacgcccctaaggtggatctgctggtgaagaattgcctcctgcccctgagagagtacttcaagtatttcagccagaatagtctgcccctgggaggcagcggcggcggcagccagggcagcgtgagcttcaaggacgtgaccgtgggcttcacccaggaggagtggcagcacctggaccccagccagaagagcctgtacagggacgtgatgctggagaactacagccacctggtgagcgtgggctactgcgtgaccaagcccgagctgatcttcaggctggagcagggcgaggagccctgggtgctggaggaggagttccccaggcccggcttcctggagttctggaagaccggcggcccaagcagcggcgcccctcctcccagcggcggcaggcggcccaagcagcggcgcccctcctcccagcggcggcagcccagccggctccccaacctctaccgaggagggcacctctgagtccgccacccccgagagcggccctggcacctccaccgagcccagcgagggcagcgcacccggcagccctgccggcagccccacctccacagaggagggaaccagcaccgagcccagcgaaggcagcgccccaggcaccagcaccgagcctagtgagcaggagattaaacggatcaacaagatcagaagaagacttgtgaaagacagcaacaccaagaaggccggcaagacaggccccatgaaaaccctgctggttagagtgatgacacccgatctgagagagcggctggaaaacctgagaaagaagcctgaaaatatcccccagcccatcagcaatacatctagagccaacctgaataagctgctgaccgattacaccgaaatgaagaaggcgatcctgcatgtgtactgggaagagttccagaaggaccctgtgggcctgatgagccgggtggcccagcctgccagcaagaagatcgatcagaacaagctgaaacctgagatggacgagaagggcaacctgaccaccgccggctttgcctgctctcagtgtggccagcccctgttcgtgtacaagctggagcaggtgtctgagaagggcaaggcttacaccaactacttcggacggtgcaatgtggccgagcacgaaaagctgatcctgctggcccagctgaagcccgagaaggatagcgacgaagccgtgacatatagcctgggaaagtttgggcagagggccctggatttctacagcattcatgtgaccaaggagtccacccaccccgtgaagcccctggcccagatcgccggaaacagatacgcctccggacctgtgggaaaggccctgagcgacgcatgtatgggcacaatcgcctccttcctgtctaagtaccaggacatcatcatcgaacaccagaaggtggtgaagggcaaccagaagagactggagagcctgcgggagctggccggcaaggaaaacctggaataccctagcgtgaccctgccacctcagcctcacaccaaggagggcgttgatgcctacaacgaagtgatcgcccgggtgcgaatgtgggtgaacctgaacctgtggcagaagctgaagctaagcagagatgatgccaagcctctgctgagactgaagggattcccttcctttcctctggtcgagagacaggccaacgaagtggactggtgggacatggtgtgtaacgtgaagaagctgatcaacgagaaaaaggaggatggcaaggtgttttggcagaatctggctggctacaagagacaggaagccctgagaccatacctgagcagcgaggaagatcggaagaagggaaagaaattcgctcggtaccagctgggcgacctgctgctgcacctggaaaagaagcacggcgaggactggggaaaggtgtacgacgaggcctgggagcggattgacaagaaagtggaaggcctgagcaagcacatcaagctggaagaggaacggagaagcgaggacgcccagagcaaggccgccctgaccgactggctgcgggctaaggccagcttcgtgatcgagggcctgaaggaggccgacaaggacgagttctgcagatgcgagctgaagctgcagaagtggtacggggacctgcggggaaagcccttcgccatcgaagccgagaacagcatcctggacatcagcggcttcagcaagcagtacaactgtgccttcatctggcagaaggacggcgtgaagaagctgaacctgtacctgatcatcaactacttcaagggcggcaagctgcggttcaagaagatcaaacctgaagccttcgaagccaacagattctacaccgtgatcaacaaaaagagcggcgagatcgtgcccatggaggtgaacttcaacttcgacgaccccaacctgatcatcctgcctctggcctttggcaagagacagggcagagaattcatctggaacgacctgctgtccctggaaaccggcagcctgaagctggccaacggaagagtgatcgagaagacactgtacaacagaagaacccggcaggatgagcctgccctgttcgtggccctgaccttcgagcggcgggaggtcctggactcctccaatatcaaaccaatgaacctgatcggcgtggcaagaggcgaaaacatccccgccgtgatcgccctgaccgaccccgagggctgcccactgagccggtttaaggatagcctgggaaacccaacccacatcctgagaatcggcgagagctataaggagaagcagcggaccatccaggccaagaaggaggtggagcagcggagagccggcggctacagccggaagtacgccagcaaagccaagaatctggcagacgatatggtgagaaacaccgctagagatctgctgtactacgccgtgacccaggatgccatgctgatcttcgccaacctgagccggggcttcggccggcagggcaagcggaccttcatggccgagagacagtacacacggatggaggactggctgaccgccaagctggcctacgagggcctgagcaagacctacctgtccaagacactggcccagtacacctccaagacatgcagcaactgtgggtttaccatcaccagcgccgactacgacagggtgctggagaagctgaagaagacagcaacaggctggatgaccacaattaacggcaaggagctgaaggtggagggccagattacctactacaacagatacaagagacagaacgtagtcaaggacctgtccgtcgagctggatagactgagcgaagaatctgtgaacaacgacatctcctcctggacaaagggcagaagcggagaagctctgagcctcctgaagaaaagattctcccatagacccgtgcaggagaagttcgtgtgcctgaactgcggcttcgagacacacgcagccgagcaagccgccctgaacatcgccagatcctggctgttcctgcggagccaggagtacaagaaataccagacaaacaagacaaccggcaacaccgataagagagccttcgtcgagacctggcagtccttttaccggaagaagcttaaggaggtgtggaaacctgccgtgcggtctggcggatctggcggaggctccaccagccccaagaaaaagagaaaagtctaagctgccttctgcggggcttgccttctggccatgcccttcttctctcccttgcacctgtacctcttggtctttgaataaagcctgagtaggaaggctagcaaaaaaaaaaaaaaaaaaaaaaaaaaaaaaaaaaaaaaaaaaaaaaaaaaaaaaaaaaaaaaaaaaaaaaaaaaaaaaaagcccagccggctccccaacctctaccgaggagggcacctctgagtccgccacccccgagagcggccctggcacctccaccgagcccagcgagggcagcgcacccggcagccctgccggcagccccacctccacagaggagggaaccagcaccgagcccagcgaaggcagcgccccaggcaccagcaccgagcctagtgagcaggagattaaacggatcaacaagatcagaagaagacttgtgaaagacagcaacaccaagaaggccggcaagacaggccccatgaaaaccctgctggttagagtgatgacacccgatctgagagagcggctggaaaacctgagaaagaagcctgaaaatatcccccagcccatcagcaatacatctagagccaacctgaataagctgctgaccgattacaccgaaatgaagaaggcgatcctgcatgtgtactgggaagagttccagaaggaccctgtgggcctgatgagccgggtggcccagcctgccagcaagaagatcgatcagaacaagctgaaacctgagatggacgagaagggcaacctgaccaccgccggctttgcctgctctcagtgtggccagcccctgttcgtgtacaagctggagcaggtgtctgagaagggcaaggcttacaccaactacttcggacggtgcaatgtggccgagcacgaaaagctgatcctgctggcccagctgaagcccgagaaggatagcgacgaagccgtgacatatagcctgggaaagtttgggcagagggccctggatttctacagcattcatgtgaccaaggagtccacccaccccgtgaagcccctggcccagatcgccggaaacagatacgcctccggacctgtgggaaaggccctgagcgacgcatgtatgggcacaatcgcctccttcctgtctaagtaccaggacatcatcatcgaacaccagaaggtggtgaagggcaaccagaagagactggagagcctgcgggagctggccggcaaggaaaacctggaataccctagcgtgaccctgccacctcagcctcacaccaaggagggcgttgatgcctacaacgaagtgatcgcccgggtgcgaatgtgggtgaacctgaacctgtggcagaagctgaagctaagcagagatgatgccaagcctctgctgagactgaagggattcccttcctttcctctggtcgagagacaggccaacgaagtggactggtgggacatggtgtgtaacgtgaagaagctgatcaacgagaaaaaggaggatggcaaggtgttttggcagaatctggctggctacaagagacaggaagccctgagaccatacctgagcagcgaggaagatcggaagaagggaaagaaattcgctcggtaccagctgggcgacctgctgctgcacctggaaaagaagcacggcgaggactggggaaaggtgtacgacgaggcctgggagcggattgacaagaaagtggaaggcctgagcaagcacatcaagctggaagaggaacggagaagcgaggacgcccagagcaaggccgccctgaccgactggctgcgggctaaggccagcttcgtgatcgagggcctgaaggaggccgacaaggacgagttctgcagatgcgagctgaagctgcagaagtggtacggggacctgcggggaaagcccttcgccatcgaagccgagaacagcatcctggacatcagcggcttcagcaagcagtacaactgtgccttcatctggcagaaggacggcgtgaagaagctgaacctgtacctgatcatcaactacttcaagggcggcaagctgcggttcaagaagatcaaacctgaagccttcgaagccaacagattctacaccgtgatcaacaaaaagagcggcgagatcgtgcccatggaggtgaacttcaacttcgacgaccccaacctgatcatcctgcctctggcctttggcaagagacagggcagagaattcatctggaacgacctgctgtccctggaaaccggcagcctgaagctggccaacggaagagtgatcgagaagacactgtacaacagaagaacccggcaggatgagcctgccctgttcgtggccctgaccttcgagcggcgggaggtcctggactcctccaatatcaaaccaatgaacctgatcggcgtggcaagaggcgaaaacatccccgccgtgatcgccctgaccgaccccgagggctgcccactgagccggtttaaggatagcctgggaaacccaacccacatcctgagaatcggcgagagctataaggagaagcagcggaccatccaggccaagaaggaggtggagcagcggagagccggcggctacagccggaagtacgccagcaaagccaagaatctggcagacgatatggtgagaaacaccgctagagatctgctgtactacgccgtgacccaggatgccatgctgatcttcgccaacctgagccggggcttcggccggcagggcaagcggaccttcatggccgagagacagtacacacggatggaggactggctgaccgccaagctggcctacgagggcctgagcaagacctacctgtccaagacactggcccagtacacctccaagacatgcagcaactgtgggtttaccatcaccagcgccgactacgacagggtgctggagaagctgaagaagacagcaacaggctggatgaccacaattaacggcaaggagctgaaggtggagggccagattacctactacaacagatacaagagacagaacgtagtcaaggacctgtccgtcgagctggatagactgagcgaagaatctgtgaacaacgacatctcctcctggacaaagggcagaagcggagaagctctgagcctcctgaagaaaagattctcccatagacccgtgcaggagaagttcgtgtgcctgaactgcggcttcgagacacacgcagccgagcaagccgccctgaacatcgccagatcctggctgttcctgcggagccaggagtacaagaaataccagacaaacaagacaaccggcaacaccgataagagagccttcgtcgagacctggcagtccttttaccggaagaagcttaaggaggtgtggaaacctgccgtgcggtctggcggatctggcggaggctccaccagccccaagaaaaagagaaaagtctaagctgccttctgcggggcttgccttctggccatgcccttcttctctcccttgcacctgtacctcttggtctttgaataaagcctgagtaggaaggctagcaaaaaaaaaaaaaaaaaaaaaaaaaaaaaaaaaaaaaaaaaaaaaaaaaaaaaaaaaaaaaaaaaaaaaaaaaaaaaaaa

SEQ ID NO: 10487 - RNA, 8787 nt, synthetic construct
  source 1..8787: mol_type = other RNA
aggaaataagagagaaaagaagagtaagaagaaatataagagccaccatggcccctaagaagaagcgtaaagtgagccggatgaaccacgaccaggagttcgacccccctaaggtgtaccctcccgtccccgccgagaagagaaagcccatccgggtcctgagcctgttcgatggcatcgccaccggtctgctggtgctgaaggacctgggcatccaggtggataggtacattgcctccgaggtgtgcgaggactccatcaccgtgggaatggtgcgtcatcagggcaagatcatgtacgtgggcgacgtgcggagcgtgacacagaagcatatccaggagtggggccctttcgacctggtgatcggcggcagcccttgcaatgacctgagcatcgtgaacccagcccggaagggcctgtacgagggaaccggcagactgttcttcgagttttacagactgctgcacgacgcccggcctaaggaaggcgacgaccggcccttcttttggctgttcgagaatgtggtggccatgggagtcagcgacaagcgggatattagccggttcctggagagcaaccccgtgatgatcgatgccaaggaagtgagcgccgcccaccgggccagatacttctggggcaatctgcctggcatgaacagacccctggccagcaccgtgaacgacaagctggagctgcaggagtgcctggagcacggccggatcgccaagttcagcaaggtgagaaccatcaccacccgaagcaacagcatcaaacaaggcaaggaccagcactttcctgtgttcatgaacgagaaggaggacatcctgtggtgtaccgagatggagagagtgttcgggttcccagtccactacacagatgtcagcaacatgtctagactggccagacagagactgctgggaagaagctggtccgtccctgtgatcagacacctgttcgcccctctgaaggagtacttcgcctgcgtgagcagcggcaacagcaacgccaacagccggggccccagcttctctagcggcctggtgccactgtccctgagagggagccacatgggccccatggagatctacaaaaccgtgagcgcctggaagcggcagcctgtgcgcgtgctgagcctgtttcggaatatcgataaagtcctgaaaagcctgggattcctggagagcggctctggctccggcggtggcaccctgaagtacgtggaggatgtgacaaacgtggtcagacgggatgtggagaagtggggccccttcgatctggtgtacggcagcacccaacccctgggcagctcttgtgaccggtgccctggctggtacatgtttcagttccaccggatcctgcagtacgccctgccgagacaggagtcccagcggccattcttttggattttcatggacaacttgctgctgaccgaggatgaccaggaaactaccactcggttcctgcagaccgaagccgtgaccctgcaggacgtgagaggccgggactaccagaacgccatgcgggtgtggtccaacatccctggactgaaaagcaagcacgcacctctgacccctaaagaagaggagtacctgcaggcccaggtgcggagcagaagcaagctggacgcccctaaggtggatctgctggtgaagaattgcctcctgcccctgagagagtacttcaagtatttcagccagaatagtctgcccctgggaggcagcggcggcggcatgggcctgctgaccttcagggacgtggccatcgagttcagcctggaggagtggcagtgcctggacaccgcccagcagaacctgtacaggaacgtgatgctggagaactacaggaacctggccttcctgggcatcgccgtgagcaagcccgacctgatcacctgcctggagcagggcaaggagccctggaacatgaagaggcacgagatggtggacgagccccccggcgtgtgcccccacttcggcggcccaagcagcggcgcccctcctcccagcggcggcaggcggcccaagcagcggcgcccctcctcccagcggcggcagcccagccggctccccaacctctaccgaggagggcacctctgagtccgccacccccgagagcggccctggcacctccaccgagcccagcgagggcagcgcacccggcagccctgccggcagccccacctccacagaggagggaaccagcaccgagcccagcgaaggcagcgccccaggcaccagcaccgagcctagtgagcaggagattaaacggatcaacaagatcagaagaagacttgtgaaagacagcaacaccaagaaggccggcaagacaggccccatgaaaaccctgctggttagagtgatgacacccgatctgagagagcggctggaaaacctgagaaagaagcctgaaaatatcccccagcccatcagcaatacatctagagccaacctgaataagctgctgaccgattacaccgaaatgaagaaggcgatcctgcatgtgtactgggaagagttccagaaggaccctgtgggcctgatgagccgggtggcccagcctgccagcaagaagatcgatcagaacaagctgaaacctgagatggacgagaagggcaacctgaccaccgccggctttgcctgctctcagtgtggccagcccctgttcgtgtacaagctggagcaggtgtctgagaagggcaaggcttacaccaactacttcggacggtgcaatgtggccgagcacgaaaagctgatcctgctggcccagctgaagcccgagaaggatagcgacgaagccgtgacatatagcctgggaaagtttgggcagagggccctggatttctacagcattcatgtgaccaaggagtccacccaccccgtgaagcccctggcccagatcgccggaaacagatacgcctccggacctgtgggaaaggccctgagcgacgcatgtatgggcacaatcgcctccttcctgtctaagtaccaggacatcatcatcgaacaccagaaggtggtgaagggcaaccagaagagactggagagcctgcgggagctggccggcaaggaaaacctggaataccctagcgtgaccctgccacctcagcctcacaccaaggagggcgttgatgcctacaacgaagtgatcgcccgggtgcgaatgtgggtgaacctgaacctgtggcagaagctgaagctaagcagagatgatgccaagcctctgctgagactgaagggattcccttcctttcctctggtcgagagacaggccaacgaagtggactggtgggacatggtgtgtaacgtgaagaagctgatcaacgagaaaaaggaggatggcaaggtgttttggcagaatctggctggctacaagagacaggaagccctgagaccatacctgagcagcgaggaagatcggaagaagggaaagaaattcgctcggtaccagctgggcgacctgctgctgcacctggaaaagaagcacggcgaggactggggaaaggtgtacgacgaggcctgggagcggattgacaagaaagtggaaggcctgagcaagcacatcaagctggaagaggaacggagaagcgaggacgcccagagcaaggccgccctgaccgactggctgcgggctaaggccagcttcgtgatcgagggcctgaaggaggccgacaaggacgagttctgcagatgcgagctgaagctgcagaagtggtacggggacctgcggggaaagcccttcgccatcgaagccgagaacagcatcctggacatcagcggcttcagcaagcagtacaactgtgccttcatctggcagaaggacggcgtgaagaagctgaacctgtacctgatcatcaactacttcaagggcggcaagctgcggttcaagaagatcaaacctgaagccttcgaagccaacagattctacaccgtgatcaacaaaaagagcggcgagatcgtgcccatggaggtgaacttcaacttcgacgaccccaacctgatcatcctgcctctggcctttggcaagagacagggcagagaattcatctggaacgacctgctgtccctggaaaccggcagcctgaagctggccaacggaagagtgatcgagaagacactgtacaacagaagaacccggcaggatgagcctgccctgttcgtggccctgaccttcgagcggcgggaggtcctggactcctccaatatcaaaccaatgaacctgatcggcgtggcaagaggcgaaaacatccccgccgtgatcgccctgaccgaccccgagggctgcccactgagccggtttaaggatagcctgggaaacccaacccacatcctgagaatcggcgagagctataaggagaagcagcggaccatccaggccaagaaggaggtggagcagcggagagccggcggctacagccggaagtacgccagcaaagccaagaatctggcagacgatatggtgagaaacaccgctagagatctgctgtactacgccgtgacccaggatgccatgctgatcttcgccaacctgagccggggcttcggccggcagggcaagcggaccttcatggccgagagacagtacacacggatggaggactggctgaccgccaagctggcctacgagggcctgagcaagacctacctgtccaagacactggcccagtacacctccaagacatgcagcaactgtgggtttaccatcaccagcgccgactacgacagggtgctggagaagctgaagaagacagcaacaggctggatgaccacaattaacggcaaggagctgaaggtggagggccagattacctactacaacagatacaagagacagaacgtagtcaaggacctgtccgtcgagctggatagactgagcgaagaatctgtgaacaacgacatctcctcctggacaaagggcagaagcggagaagctctgagcctcctgaagaaaagattctcccatagacccgtgcaggagaagttcgtgtgcctgaactgcggcttcgagacacacgcagccgagcaagccgccctgaacatcgccagatcctggctgttcctgcggagccaggagtacaagaaataccagacaaacaagacaaccggcaacaccgataagagagccttcgtcgagacctggcagtccttttaccggaagaagcttaaggaggtgtggaaacctgccgtgcggtctggcggatctggcggaggctccaccagccccaagaaaaagagaaaagtctaagctgccttctgcggggcttgccttctggccatgcccttcttctctcccttgcacctgtacctcttggtctttgaataaagcctgagtaggaaggctagcaaaaaaaaaaaaaaaaaaaaaaaaaaaaaaaaaaaaaaaaaaaaaaaaaaaaaaaaaaaaaaaaaaaaaaaaaaaaaaaagcccagccggctccccaacctctaccgaggagggcacctctgagtccgccacccccgagagcggccctggcacctccaccgagcccagcgagggcagcgcacccggcagccctgccggcagccccacctccacagaggagggaaccagcaccgagcccagcgaaggcagcgccccaggcaccagcaccgagcctagtgagcaggagattaaacggatcaacaagatcagaagaagacttgtgaaagacagcaacaccaagaaggccggcaagacaggccccatgaaaaccctgctggttagagtgatgacacccgatctgagagagcggctggaaaacctgagaaagaagcctgaaaatatcccccagcccatcagcaatacatctagagccaacctgaataagctgctgaccgattacaccgaaatgaagaaggcgatcctgcatgtgtactgggaagagttccagaaggaccctgtgggcctgatgagccgggtggcccagcctgccagcaagaagatcgatcagaacaagctgaaacctgagatggacgagaagggcaacctgaccaccgccggctttgcctgctctcagtgtggccagcccctgttcgtgtacaagctggagcaggtgtctgagaagggcaaggcttacaccaactacttcggacggtgcaatgtggccgagcacgaaaagctgatcctgctggcccagctgaagcccgagaaggatagcgacgaagccgtgacatatagcctgggaaagtttgggcagagggccctggatttctacagcattcatgtgaccaaggagtccacccaccccgtgaagcccctggcccagatcgccggaaacagatacgcctccggacctgtgggaaaggccctgagcgacgcatgtatgggcacaatcgcctccttcctgtctaagtaccaggacatcatcatcgaacaccagaaggtggtgaagggcaaccagaagagactggagagcctgcgggagctggccggcaaggaaaacctggaataccctagcgtgaccctgccacctcagcctcacaccaaggagggcgttgatgcctacaacgaagtgatcgcccgggtgcgaatgtgggtgaacctgaacctgtggcagaagctgaagctaagcagagatgatgccaagcctctgctgagactgaagggattcccttcctttcctctggtcgagagacaggccaacgaagtggactggtgggacatggtgtgtaacgtgaagaagctgatcaacgagaaaaaggaggatggcaaggtgttttggcagaatctggctggctacaagagacaggaagccctgagaccatacctgagcagcgaggaagatcggaagaagggaaagaaattcgctcggtaccagctgggcgacctgctgctgcacctggaaaagaagcacggcgaggactggggaaaggtgtacgacgaggcctgggagcggattgacaagaaagtggaaggcctgagcaagcacatcaagctggaagaggaacggagaagcgaggacgcccagagcaaggccgccctgaccgactggctgcgggctaaggccagcttcgtgatcgagggcctgaaggaggccgacaaggacgagttctgcagatgcgagctgaagctgcagaagtggtacggggacctgcggggaaagcccttcgccatcgaagccgagaacagcatcctggacatcagcggcttcagcaagcagtacaactgtgccttcatctggcagaaggacggcgtgaagaagctgaacctgtacctgatcatcaactacttcaagggcggcaagctgcggttcaagaagatcaaacctgaagccttcgaagccaacagattctacaccgtgatcaacaaaaagagcggcgagatcgtgcccatggaggtgaacttcaacttcgacgaccccaacctgatcatcctgcctctggcctttggcaagagacagggcagagaattcatctggaacgacctgctgtccctggaaaccggcagcctgaagctggccaacggaagagtgatcgagaagacactgtacaacagaagaacccggcaggatgagcctgccctgttcgtggccctgaccttcgagcggcgggaggtcctggactcctccaatatcaaaccaatgaacctgatcggcgtggcaagaggcgaaaacatccccgccgtgatcgccctgaccgaccccgagggctgcccactgagccggtttaaggatagcctgggaaacccaacccacatcctgagaatcggcgagagctataaggagaagcagcggaccatccaggccaagaaggaggtggagcagcggagagccggcggctacagccggaagtacgccagcaaagccaagaatctggcagacgatatggtgagaaacaccgctagagatctgctgtactacgccgtgacccaggatgccatgctgatcttcgccaacctgagccggggcttcggccggcagggcaagcggaccttcatggccgagagacagtacacacggatggaggactggctgaccgccaagctggcctacgagggcctgagcaagacctacctgtccaagacactggcccagtacacctccaagacatgcagcaactgtgggtttaccatcaccagcgccgactacgacagggtgctggagaagctgaagaagacagcaacaggctggatgaccacaattaacggcaaggagctgaaggtggagggccagattacctactacaacagatacaagagacagaacgtagtcaaggacctgtccgtcgagctggatagactgagcgaagaatctgtgaacaacgacatctcctcctggacaaagggcagaagcggagaagctctgagcctcctgaagaaaagattctcccatagacccgtgcaggagaagttcgtgtgcctgaactgcggcttcgagacacacgcagccgagcaagccgccctgaacatcgccagatcctggctgttcctgcggagccaggagtacaagaaataccagacaaacaagacaaccggcaacaccgataagagagccttcgtcgagacctggcagtccttttaccggaagaagcttaaggaggtgtggaaacctgccgtgcggtctggcggatctggcggaggctccaccagccccaagaaaaagagaaaagtctaagctgccttctgcggggcttgccttctggccatgcccttcttctctcccttgcacctgtacctcttggtctttgaataaagcctgagtaggaaggctagcaaaaaaaaaaaaaaaaaaaaaaaaaaaaaaaaaaaaaaaaaaaaaaaaaaaaaaaaaaaaaaaaaaaaaaaaaaaaaaaa

SEQ ID NO: 10488 - RNA, 8787 nt, synthetic construct
  source 1..8787: mol_type = other RNA
aggaaataagagagaaaagaagagtaagaagaaatataagagccaccatggcccctaagaagaagcgtaaagtgagccggatgaaccacgaccaggagttcgacccccctaaggtgtaccctcccgtccccgccgagaagagaaagcccatccgggtcctgagcctgttcgatggcatcgccaccggtctgctggtgctgaaggacctgggcatccaggtggataggtacattgcctccgaggtgtgcgaggactccatcaccgtgggaatggtgcgtcatcagggcaagatcatgtacgtgggcgacgtgcggagcgtgacacagaagcatatccaggagtggggccctttcgacctggtgatcggcggcagcccttgcaatgacctgagcatcgtgaacccagcccggaagggcctgtacgagggaaccggcagactgttcttcgagttttacagactgctgcacgacgcccggcctaaggaaggcgacgaccggcccttcttttggctgttcgagaatgtggtggccatgggagtcagcgacaagcgggatattagccggttcctggagagcaaccccgtgatgatcgatgccaaggaagtgagcgccgcccaccgggccagatacttctggggcaatctgcctggcatgaacagacccctggccagcaccgtgaacgacaagctggagctgcaggagtgcctggagcacggccggatcgccaagttcagcaaggtgagaaccatcaccacccgaagcaacagcatcaaacaaggcaaggaccagcactttcctgtgttcatgaacgagaaggaggacatcctgtggtgtaccgagatggagagagtgttcgggttcccagtccactacacagatgtcagcaacatgtctagactggccagacagagactgctgggaagaagctggtccgtccctgtgatcagacacctgttcgcccctctgaaggagtacttcgcctgcgtgagcagcggcaacagcaacgccaacagccggggccccagcttctctagcggcctggtgccactgtccctgagagggagccacatgggccccatggagatctacaaaaccgtgagcgcctggaagcggcagcctgtgcgcgtgctgagcctgtttcggaatatcgataaagtcctgaaaagcctgggattcctggagagcggctctggctccggcggtggcaccctgaagtacgtggaggatgtgacaaacgtggtcagacgggatgtggagaagtggggccccttcgatctggtgtacggcagcacccaacccctgggcagctcttgtgaccggtgccctggctggtacatgtttcagttccaccggatcctgcagtacgccctgccgagacaggagtcccagcggccattcttttggattttcatggacaacttgctgctgaccgaggatgaccaggaaactaccactcggttcctgcagaccgaagccgtgaccctgcaggacgtgagaggccgggactaccagaacgccatgcgggtgtggtccaacatccctggactgaaaagcaagcacgcacctctgacccctaaagaagaggagtacctgcaggcccaggtgcggagcagaagcaagctggacgcccctaaggtggatctgctggtgaagaattgcctcctgcccctgagagagtacttcaagtatttcagccagaatagtctgcccctgggaggcagcggcggcggcagcaaggtgcccgtgaccttcggcgacctggccatctacttcagccaggaggagtgggagtggctgagccccatccagaaggacctgtacgaggacgtgatgctggagaactaccagaacctggtgagcctgggcctgagcttcaggaggcccaacgtgatcaccctgctggagaagggcagggccccctggatggtggagcccgtgaggaagaggagggtgctggacagcaggagcaagtacggcggcccaagcagcggcgcccctcctcccagcggcggcaggcggcccaagcagcggcgcccctcctcccagcggcggcagcccagccggctccccaacctctaccgaggagggcacctctgagtccgccacccccgagagcggccctggcacctccaccgagcccagcgagggcagcgcacccggcagccctgccggcagccccacctccacagaggagggaaccagcaccgagcccagcgaaggcagcgccccaggcaccagcaccgagcctagtgagcaggagattaaacggatcaacaagatcagaagaagacttgtgaaagacagcaacaccaagaaggccggcaagacaggccccatgaaaaccctgctggttagagtgatgacacccgatctgagagagcggctggaaaacctgagaaagaagcctgaaaatatcccccagcccatcagcaatacatctagagccaacctgaataagctgctgaccgattacaccgaaatgaagaaggcgatcctgcatgtgtactgggaagagttccagaaggaccctgtgggcctgatgagccgggtggcccagcctgccagcaagaagatcgatcagaacaagctgaaacctgagatggacgagaagggcaacctgaccaccgccggctttgcctgctctcagtgtggccagcccctgttcgtgtacaagctggagcaggtgtctgagaagggcaaggcttacaccaactacttcggacggtgcaatgtggccgagcacgaaaagctgatcctgctggcccagctgaagcccgagaaggatagcgacgaagccgtgacatatagcctgggaaagtttgggcagagggccctggatttctacagcattcatgtgaccaaggagtccacccaccccgtgaagcccctggcccagatcgccggaaacagatacgcctccggacctgtgggaaaggccctgagcgacgcatgtatgggcacaatcgcctccttcctgtctaagtaccaggacatcatcatcgaacaccagaaggtggtgaagggcaaccagaagagactggagagcctgcgggagctggccggcaaggaaaacctggaataccctagcgtgaccctgccacctcagcctcacaccaaggagggcgttgatgcctacaacgaagtgatcgcccgggtgcgaatgtgggtgaacctgaacctgtggcagaagctgaagctaagcagagatgatgccaagcctctgctgagactgaagggattcccttcctttcctctggtcgagagacaggccaacgaagtggactggtgggacatggtgtgtaacgtgaagaagctgatcaacgagaaaaaggaggatggcaaggtgttttggcagaatctggctggctacaagagacaggaagccctgagaccatacctgagcagcgaggaagatcggaagaagggaaagaaattcgctcggtaccagctgggcgacctgctgctgcacctggaaaagaagcacggcgaggactggggaaaggtgtacgacgaggcctgggagcggattgacaagaaagtggaaggcctgagcaagcacatcaagctggaagaggaacggagaagcgaggacgcccagagcaaggccgccctgaccgactggctgcgggctaaggccagcttcgtgatcgagggcctgaaggaggccgacaaggacgagttctgcagatgcgagctgaagctgcagaagtggtacggggacctgcggggaaagcccttcgccatcgaagccgagaacagcatcctggacatcagcggcttcagcaagcagtacaactgtgccttcatctggcagaaggacggcgtgaagaagctgaacctgtacctgatcatcaactacttcaagggcggcaagctgcggttcaagaagatcaaacctgaagccttcgaagccaacagattctacaccgtgatcaacaaaaagagcggcgagatcgtgcccatggaggtgaacttcaacttcgacgaccccaacctgatcatcctgcctctggcctttggcaagagacagggcagagaattcatctggaacgacctgctgtccctggaaaccggcagcctgaagctggccaacggaagagtgatcgagaagacactgtacaacagaagaacccggcaggatgagcctgccctgttcgtggccctgaccttcgagcggcgggaggtcctggactcctccaatatcaaaccaatgaacctgatcggcgtggcaagaggcgaaaacatccccgccgtgatcgccctgaccgaccccgagggctgcccactgagccggtttaaggatagcctgggaaacccaacccacatcctgagaatcggcgagagctataaggagaagcagcggaccatccaggccaagaaggaggtggagcagcggagagccggcggctacagccggaagtacgccagcaaagccaagaatctggcagacgatatggtgagaaacaccgctagagatctgctgtactacgccgtgacccaggatgccatgctgatcttcgccaacctgagccggggcttcggccggcagggcaagcggaccttcatggccgagagacagtacacacggatggaggactggctgaccgccaagctggcctacgagggcctgagcaagacctacctgtccaagacactggcccagtacacctccaagacatgcagcaactgtgggtttaccatcaccagcgccgactacgacagggtgctggagaagctgaagaagacagcaacaggctggatgaccacaattaacggcaaggagctgaaggtggagggccagattacctactacaacagatacaagagacagaacgtagtcaaggacctgtccgtcgagctggatagactgagcgaagaatctgtgaacaacgacatctcctcctggacaaagggcagaagcggagaagctctgagcctcctgaagaaaagattctcccatagacccgtgcaggagaagttcgtgtgcctgaactgcggcttcgagacacacgcagccgagcaagccgccctgaacatcgccagatcctggctgttcctgcggagccaggagtacaagaaataccagacaaacaagacaaccggcaacaccgataagagagccttcgtcgagacctggcagtccttttaccggaagaagcttaaggaggtgtggaaacctgccgtgcggtctggcggatctggcggaggctccaccagccccaagaaaaagagaaaagtctaagctgccttctgcggggcttgccttctggccatgcccttcttctctcccttgcacctgtacctcttggtctttgaataaagcctgagtaggaaggctagcaaaaaaaaaaaaaaaaaaaaaaaaaaaaaaaaaaaaaaaaaaaaaaaaaaaaaaaaaaaaaaaaaaaaaaaaaaaaaaaagcccagccggctccccaacctctaccgaggagggcacctctgagtccgccacccccgagagcggccctggcacctccaccgagcccagcgagggcagcgcacccggcagccctgccggcagccccacctccacagaggagggaaccagcaccgagcccagcgaaggcagcgccccaggcaccagcaccgagcctagtgagcaggagattaaacggatcaacaagatcagaagaagacttgtgaaagacagcaacaccaagaaggccggcaagacaggccccatgaaaaccctgctggttagagtgatgacacccgatctgagagagcggctggaaaacctgagaaagaagcctgaaaatatcccccagcccatcagcaatacatctagagccaacctgaataagctgctgaccgattacaccgaaatgaagaaggcgatcctgcatgtgtactgggaagagttccagaaggaccctgtgggcctgatgagccgggtggcccagcctgccagcaagaagatcgatcagaacaagctgaaacctgagatggacgagaagggcaacctgaccaccgccggctttgcctgctctcagtgtggccagcccctgttcgtgtacaagctggagcaggtgtctgagaagggcaaggcttacaccaactacttcggacggtgcaatgtggccgagcacgaaaagctgatcctgctggcccagctgaagcccgagaaggatagcgacgaagccgtgacatatagcctgggaaagtttgggcagagggccctggatttctacagcattcatgtgaccaaggagtccacccaccccgtgaagcccctggcccagatcgccggaaacagatacgcctccggacctgtgggaaaggccctgagcgacgcatgtatgggcacaatcgcctccttcctgtctaagtaccaggacatcatcatcgaacaccagaaggtggtgaagggcaaccagaagagactggagagcctgcgggagctggccggcaaggaaaacctggaataccctagcgtgaccctgccacctcagcctcacaccaaggagggcgttgatgcctacaacgaagtgatcgcccgggtgcgaatgtgggtgaacctgaacctgtggcagaagctgaagctaagcagagatgatgccaagcctctgctgagactgaagggattcccttcctttcctctggtcgagagacaggccaacgaagtggactggtgggacatggtgtgtaacgtgaagaagctgatcaacgagaaaaaggaggatggcaaggtgttttggcagaatctggctggctacaagagacaggaagccctgagaccatacctgagcagcgaggaagatcggaagaagggaaagaaattcgctcggtaccagctgggcgacctgctgctgcacctggaaaagaagcacggcgaggactggggaaaggtgtacgacgaggcctgggagcggattgacaagaaagtggaaggcctgagcaagcacatcaagctggaagaggaacggagaagcgaggacgcccagagcaaggccgccctgaccgactggctgcgggctaaggccagcttcgtgatcgagggcctgaaggaggccgacaaggacgagttctgcagatgcgagctgaagctgcagaagtggtacggggacctgcggggaaagcccttcgccatcgaagccgagaacagcatcctggacatcagcggcttcagcaagcagtacaactgtgccttcatctggcagaaggacggcgtgaagaagctgaacctgtacctgatcatcaactacttcaagggcggcaagctgcggttcaagaagatcaaacctgaagccttcgaagccaacagattctacaccgtgatcaacaaaaagagcggcgagatcgtgcccatggaggtgaacttcaacttcgacgaccccaacctgatcatcctgcctctggcctttggcaagagacagggcagagaattcatctggaacgacctgctgtccctggaaaccggcagcctgaagctggccaacggaagagtgatcgagaagacactgtacaacagaagaacccggcaggatgagcctgccctgttcgtggccctgaccttcgagcggcgggaggtcctggactcctccaatatcaaaccaatgaacctgatcggcgtggcaagaggcgaaaacatccccgccgtgatcgccctgaccgaccccgagggctgcccactgagccggtttaaggatagcctgggaaacccaacccacatcctgagaatcggcgagagctataaggagaagcagcggaccatccaggccaagaaggaggtggagcagcggagagccggcggctacagccggaagtacgccagcaaagccaagaatctggcagacgatatggtgagaaacaccgctagagatctgctgtactacgccgtgacccaggatgccatgctgatcttcgccaacctgagccggggcttcggccggcagggcaagcggaccttcatggccgagagacagtacacacggatggaggactggctgaccgccaagctggcctacgagggcctgagcaagacctacctgtccaagacactggcccagtacacctccaagacatgcagcaactgtgggtttaccatcaccagcgccgactacgacagggtgctggagaagctgaagaagacagcaacaggctggatgaccacaattaacggcaaggagctgaaggtggagggccagattacctactacaacagatacaagagacagaacgtagtcaaggacctgtccgtcgagctggatagactgagcgaagaatctgtgaacaacgacatctcctcctggacaaagggcagaagcggagaagctctgagcctcctgaagaaaagattctcccatagacccgtgcaggagaagttcgtgtgcctgaactgcggcttcgagacacacgcagccgagcaagccgccctgaacatcgccagatcctggctgttcctgcggagccaggagtacaagaaataccagacaaacaagacaaccggcaacaccgataagagagccttcgtcgagacctggcagtccttttaccggaagaagcttaaggaggtgtggaaacctgccgtgcggtctggcggatctggcggaggctccaccagccccaagaaaaagagaaaagtctaagctgccttctgcggggcttgccttctggccatgcccttcttctctcccttgcacctgtacctcttggtctttgaataaagcctgagtaggaaggctagcaaaaaaaaaaaaaaaaaaaaaaaaaaaaaaaaaaaaaaaaaaaaaaaaaaaaaaaaaaaaaaaaaaaaaaaaaaaaaaaa

SEQ ID NO: 10489 - RNA, 8787 nt, synthetic construct
  source 1..8787: mol_type = other RNA
aggaaataagagagaaaagaagagtaagaagaaatataagagccaccatggcccctaagaagaagcgtaaagtgagccggatgaaccacgaccaggagttcgacccccctaaggtgtaccctcccgtccccgccgagaagagaaagcccatccgggtcctgagcctgttcgatggcatcgccaccggtctgctggtgctgaaggacctgggcatccaggtggataggtacattgcctccgaggtgtgcgaggactccatcaccgtgggaatggtgcgtcatcagggcaagatcatgtacgtgggcgacgtgcggagcgtgacacagaagcatatccaggagtggggccctttcgacctggtgatcggcggcagcccttgcaatgacctgagcatcgtgaacccagcccggaagggcctgtacgagggaaccggcagactgttcttcgagttttacagactgctgcacgacgcccggcctaaggaaggcgacgaccggcccttcttttggctgttcgagaatgtggtggccatgggagtcagcgacaagcgggatattagccggttcctggagagcaaccccgtgatgatcgatgccaaggaagtgagcgccgcccaccgggccagatacttctggggcaatctgcctggcatgaacagacccctggccagcaccgtgaacgacaagctggagctgcaggagtgcctggagcacggccggatcgccaagttcagcaaggtgagaaccatcaccacccgaagcaacagcatcaaacaaggcaaggaccagcactttcctgtgttcatgaacgagaaggaggacatcctgtggtgtaccgagatggagagagtgttcgggttcccagtccactacacagatgtcagcaacatgtctagactggccagacagagactgctgggaagaagctggtccgtccctgtgatcagacacctgttcgcccctctgaaggagtacttcgcctgcgtgagcagcggcaacagcaacgccaacagccggggccccagcttctctagcggcctggtgccactgtccctgagagggagccacatgggccccatggagatctacaaaaccgtgagcgcctggaagcggcagcctgtgcgcgtgctgagcctgtttcggaatatcgataaagtcctgaaaagcctgggattcctggagagcggctctggctccggcggtggcaccctgaagtacgtggaggatgtgacaaacgtggtcagacgggatgtggagaagtggggccccttcgatctggtgtacggcagcacccaacccctgggcagctcttgtgaccggtgccctggctggtacatgtttcagttccaccggatcctgcagtacgccctgccgagacaggagtcccagcggccattcttttggattttcatggacaacttgctgctgaccgaggatgaccaggaaactaccactcggttcctgcagaccgaagccgtgaccctgcaggacgtgagaggccgggactaccagaacgccatgcgggtgtggtccaacatccctggactgaaaagcaagcacgcacctctgacccctaaagaagaggagtacctgcaggcccaggtgcggagcagaagcaagctggacgcccctaaggtggatctgctggtgaagaattgcctcctgcccctgagagagtacttcaagtatttcagccagaatagtctgcccctgggaggcagcggcggcggcgcccccctgcccctgaccttcgaggacgtggccgtgtacttcagcgagcaggagtggaggaacctggaggcctggcagaaggagctgtacaagcaggtgatgaggaccaactacgagatcctggtgagcctggacgacggcctgcccaagcccgagctgatcagctggctggagcagggcagggagctgttcaagaactggggcgagagccagaagagcggcaacatcatctgcttcagcgccggcggcccaagcagcggcgcccctcctcccagcggcggcaggcggcccaagcagcggcgcccctcctcccagcggcggcagcccagccggctccccaacctctaccgaggagggcacctctgagtccgccacccccgagagcggccctggcacctccaccgagcccagcgagggcagcgcacccggcagccctgccggcagccccacctccacagaggagggaaccagcaccgagcccagcgaaggcagcgccccaggcaccagcaccgagcctagtgagcaggagattaaacggatcaacaagatcagaagaagacttgtgaaagacagcaacaccaagaaggccggcaagacaggccccatgaaaaccctgctggttagagtgatgacacccgatctgagagagcggctggaaaacctgagaaagaagcctgaaaatatcccccagcccatcagcaatacatctagagccaacctgaataagctgctgaccgattacaccgaaatgaagaaggcgatcctgcatgtgtactgggaagagttccagaaggaccctgtgggcctgatgagccgggtggcccagcctgccagcaagaagatcgatcagaacaagctgaaacctgagatggacgagaagggcaacctgaccaccgccggctttgcctgctctcagtgtggccagcccctgttcgtgtacaagctggagcaggtgtctgagaagggcaaggcttacaccaactacttcggacggtgcaatgtggccgagcacgaaaagctgatcctgctggcccagctgaagcccgagaaggatagcgacgaagccgtgacatatagcctgggaaagtttgggcagagggccctggatttctacagcattcatgtgaccaaggagtccacccaccccgtgaagcccctggcccagatcgccggaaacagatacgcctccggacctgtgggaaaggccctgagcgacgcatgtatgggcacaatcgcctccttcctgtctaagtaccaggacatcatcatcgaacaccagaaggtggtgaagggcaaccagaagagactggagagcctgcgggagctggccggcaaggaaaacctggaataccctagcgtgaccctgccacctcagcctcacaccaaggagggcgttgatgcctacaacgaagtgatcgcccgggtgcgaatgtgggtgaacctgaacctgtggcagaagctgaagctaagcagagatgatgccaagcctctgctgagactgaagggattcccttcctttcctctggtcgagagacaggccaacgaagtggactggtgggacatggtgtgtaacgtgaagaagctgatcaacgagaaaaaggaggatggcaaggtgttttggcagaatctggctggctacaagagacaggaagccctgagaccatacctgagcagcgaggaagatcggaagaagggaaagaaattcgctcggtaccagctgggcgacctgctgctgcacctggaaaagaagcacggcgaggactggggaaaggtgtacgacgaggcctgggagcggattgacaagaaagtggaaggcctgagcaagcacatcaagctggaagaggaacggagaagcgaggacgcccagagcaaggccgccctgaccgactggctgcgggctaaggccagcttcgtgatcgagggcctgaaggaggccgacaaggacgagttctgcagatgcgagctgaagctgcagaagtggtacggggacctgcggggaaagcccttcgccatcgaagccgagaacagcatcctggacatcagcggcttcagcaagcagtacaactgtgccttcatctggcagaaggacggcgtgaagaagctgaacctgtacctgatcatcaactacttcaagggcggcaagctgcggttcaagaagatcaaacctgaagccttcgaagccaacagattctacaccgtgatcaacaaaaagagcggcgagatcgtgcccatggaggtgaacttcaacttcgacgaccccaacctgatcatcctgcctctggcctttggcaagagacagggcagagaattcatctggaacgacctgctgtccctggaaaccggcagcctgaagctggccaacggaagagtgatcgagaagacactgtacaacagaagaacccggcaggatgagcctgccctgttcgtggccctgaccttcgagcggcgggaggtcctggactcctccaatatcaaaccaatgaacctgatcggcgtggcaagaggcgaaaacatccccgccgtgatcgccctgaccgaccccgagggctgcccactgagccggtttaaggatagcctgggaaacccaacccacatcctgagaatcggcgagagctataaggagaagcagcggaccatccaggccaagaaggaggtggagcagcggagagccggcggctacagccggaagtacgccagcaaagccaagaatctggcagacgatatggtgagaaacaccgctagagatctgctgtactacgccgtgacccaggatgccatgctgatcttcgccaacctgagccggggcttcggccggcagggcaagcggaccttcatggccgagagacagtacacacggatggaggactggctgaccgccaagctggcctacgagggcctgagcaagacctacctgtccaagacactggcccagtacacctccaagacatgcagcaactgtgggtttaccatcaccagcgccgactacgacagggtgctggagaagctgaagaagacagcaacaggctggatgaccacaattaacggcaaggagctgaaggtggagggccagattacctactacaacagatacaagagacagaacgtagtcaaggacctgtccgtcgagctggatagactgagcgaagaatctgtgaacaacgacatctcctcctggacaaagggcagaagcggagaagctctgagcctcctgaagaaaagattctcccatagacccgtgcaggagaagttcgtgtgcctgaactgcggcttcgagacacacgcagccgagcaagccgccctgaacatcgccagatcctggctgttcctgcggagccaggagtacaagaaataccagacaaacaagacaaccggcaacaccgataagagagccttcgtcgagacctggcagtccttttaccggaagaagcttaaggaggtgtggaaacctgccgtgcggtctggcggatctggcggaggctccaccagccccaagaaaaagagaaaagtctaagctgccttctgcggggcttgccttctggccatgcccttcttctctcccttgcacctgtacctcttggtctttgaataaagcctgagtaggaaggctagcaaaaaaaaaaaaaaaaaaaaaaaaaaaaaaaaaaaaaaaaaaaaaaaaaaaaaaaaaaaaaaaaaaaaaaaaaaaaaaaagcccagccggctccccaacctctaccgaggagggcacctctgagtccgccacccccgagagcggccctggcacctccaccgagcccagcgagggcagcgcacccggcagccctgccggcagccccacctccacagaggagggaaccagcaccgagcccagcgaaggcagcgccccaggcaccagcaccgagcctagtgagcaggagattaaacggatcaacaagatcagaagaagacttgtgaaagacagcaacaccaagaaggccggcaagacaggccccatgaaaaccctgctggttagagtgatgacacccgatctgagagagcggctggaaaacctgagaaagaagcctgaaaatatcccccagcccatcagcaatacatctagagccaacctgaataagctgctgaccgattacaccgaaatgaagaaggcgatcctgcatgtgtactgggaagagttccagaaggaccctgtgggcctgatgagccgggtggcccagcctgccagcaagaagatcgatcagaacaagctgaaacctgagatggacgagaagggcaacctgaccaccgccggctttgcctgctctcagtgtggccagcccctgttcgtgtacaagctggagcaggtgtctgagaagggcaaggcttacaccaactacttcggacggtgcaatgtggccgagcacgaaaagctgatcctgctggcccagctgaagcccgagaaggatagcgacgaagccgtgacatatagcctgggaaagtttgggcagagggccctggatttctacagcattcatgtgaccaaggagtccacccaccccgtgaagcccctggcccagatcgccggaaacagatacgcctccggacctgtgggaaaggccctgagcgacgcatgtatgggcacaatcgcctccttcctgtctaagtaccaggacatcatcatcgaacaccagaaggtggtgaagggcaaccagaagagactggagagcctgcgggagctggccggcaaggaaaacctggaataccctagcgtgaccctgccacctcagcctcacaccaaggagggcgttgatgcctacaacgaagtgatcgcccgggtgcgaatgtgggtgaacctgaacctgtggcagaagctgaagctaagcagagatgatgccaagcctctgctgagactgaagggattcccttcctttcctctggtcgagagacaggccaacgaagtggactggtgggacatggtgtgtaacgtgaagaagctgatcaacgagaaaaaggaggatggcaaggtgttttggcagaatctggctggctacaagagacaggaagccctgagaccatacctgagcagcgaggaagatcggaagaagggaaagaaattcgctcggtaccagctgggcgacctgctgctgcacctggaaaagaagcacggcgaggactggggaaaggtgtacgacgaggcctgggagcggattgacaagaaagtggaaggcctgagcaagcacatcaagctggaagaggaacggagaagcgaggacgcccagagcaaggccgccctgaccgactggctgcgggctaaggccagcttcgtgatcgagggcctgaaggaggccgacaaggacgagttctgcagatgcgagctgaagctgcagaagtggtacggggacctgcggggaaagcccttcgccatcgaagccgagaacagcatcctggacatcagcggcttcagcaagcagtacaactgtgccttcatctggcagaaggacggcgtgaagaagctgaacctgtacctgatcatcaactacttcaagggcggcaagctgcggttcaagaagatcaaacctgaagccttcgaagccaacagattctacaccgtgatcaacaaaaagagcggcgagatcgtgcccatggaggtgaacttcaacttcgacgaccccaacctgatcatcctgcctctggcctttggcaagagacagggcagagaattcatctggaacgacctgctgtccctggaaaccggcagcctgaagctggccaacggaagagtgatcgagaagacactgtacaacagaagaacccggcaggatgagcctgccctgttcgtggccctgaccttcgagcggcgggaggtcctggactcctccaatatcaaaccaatgaacctgatcggcgtggcaagaggcgaaaacatccccgccgtgatcgccctgaccgaccccgagggctgcccactgagccggtttaaggatagcctgggaaacccaacccacatcctgagaatcggcgagagctataaggagaagcagcggaccatccaggccaagaaggaggtggagcagcggagagccggcggctacagccggaagtacgccagcaaagccaagaatctggcagacgatatggtgagaaacaccgctagagatctgctgtactacgccgtgacccaggatgccatgctgatcttcgccaacctgagccggggcttcggccggcagggcaagcggaccttcatggccgagagacagtacacacggatggaggactggctgaccgccaagctggcctacgagggcctgagcaagacctacctgtccaagacactggcccagtacacctccaagacatgcagcaactgtgggtttaccatcaccagcgccgactacgacagggtgctggagaagctgaagaagacagcaacaggctggatgaccacaattaacggcaaggagctgaaggtggagggccagattacctactacaacagatacaagagacagaacgtagtcaaggacctgtccgtcgagctggatagactgagcgaagaatctgtgaacaacgacatctcctcctggacaaagggcagaagcggagaagctctgagcctcctgaagaaaagattctcccatagacccgtgcaggagaagttcgtgtgcctgaactgcggcttcgagacacacgcagccgagcaagccgccctgaacatcgccagatcctggctgttcctgcggagccaggagtacaagaaataccagacaaacaagacaaccggcaacaccgataagagagccttcgtcgagacctggcagtccttttaccggaagaagcttaaggaggtgtggaaacctgccgtgcggtctggcggatctggcggaggctccaccagccccaagaaaaagagaaaagtctaagctgccttctgcggggcttgccttctggccatgcccttcttctctcccttgcacctgtacctcttggtctttgaataaagcctgagtaggaaggctagcaaaaaaaaaaaaaaaaaaaaaaaaaaaaaaaaaaaaaaaaaaaaaaaaaaaaaaaaaaaaaaaaaaaaaaaaaaaaaaaa

SEQ ID NO: 10490 - RNA, 8787 nt, synthetic construct
  source 1..8787: mol_type = other RNA
aggaaataagagagaaaagaagagtaagaagaaatataagagccaccatggcccctaagaagaagcgtaaagtgagccggatgaaccacgaccaggagttcgacccccctaaggtgtaccctcccgtccccgccgagaagagaaagcccatccgggtcctgagcctgttcgatggcatcgccaccggtctgctggtgctgaaggacctgggcatccaggtggataggtacattgcctccgaggtgtgcgaggactccatcaccgtgggaatggtgcgtcatcagggcaagatcatgtacgtgggcgacgtgcggagcgtgacacagaagcatatccaggagtggggccctttcgacctggtgatcggcggcagcccttgcaatgacctgagcatcgtgaacccagcccggaagggcctgtacgagggaaccggcagactgttcttcgagttttacagactgctgcacgacgcccggcctaaggaaggcgacgaccggcccttcttttggctgttcgagaatgtggtggccatgggagtcagcgacaagcgggatattagccggttcctggagagcaaccccgtgatgatcgatgccaaggaagtgagcgccgcccaccgggccagatacttctggggcaatctgcctggcatgaacagacccctggccagcaccgtgaacgacaagctggagctgcaggagtgcctggagcacggccggatcgccaagttcagcaaggtgagaaccatcaccacccgaagcaacagcatcaaacaaggcaaggaccagcactttcctgtgttcatgaacgagaaggaggacatcctgtggtgtaccgagatggagagagtgttcgggttcccagtccactacacagatgtcagcaacatgtctagactggccagacagagactgctgggaagaagctggtccgtccctgtgatcagacacctgttcgcccctctgaaggagtacttcgcctgcgtgagcagcggcaacagcaacgccaacagccggggccccagcttctctagcggcctggtgccactgtccctgagagggagccacatgggccccatggagatctacaaaaccgtgagcgcctggaagcggcagcctgtgcgcgtgctgagcctgtttcggaatatcgataaagtcctgaaaagcctgggattcctggagagcggctctggctccggcggtggcaccctgaagtacgtggaggatgtgacaaacgtggtcagacgggatgtggagaagtggggccccttcgatctggtgtacggcagcacccaacccctgggcagctcttgtgaccggtgccctggctggtacatgtttcagttccaccggatcctgcagtacgccctgccgagacaggagtcccagcggccattcttttggattttcatggacaacttgctgctgaccgaggatgaccaggaaactaccactcggttcctgcagaccgaagccgtgaccctgcaggacgtgagaggccgggactaccagaacgccatgcgggtgtggtccaacatccctggactgaaaagcaagcacgcacctctgacccctaaagaagaggagtacctgcaggcccaggtgcggagcagaagcaagctggacgcccctaaggtggatctgctggtgaagaattgcctcctgcccctgagagagtacttcaagtatttcagccagaatagtctgcccctgggaggcagcggcggcggcagctacggcagcttcagcttcgaggacgtgaccgtgggcttcacccaggaggagtggcagcacctgggccccgcccagaggatcctgtacagggacgtgatgctggagaactacagccacctggtgagcgtgggctgctgcatccccaagcccgaggtgatcctgaagctggagcagggcgagcagccctggatcctggaggaggagagccccagccagagctaccccggcctgcccaccgacggcggcccaagcagcggcgcccctcctcccagcggcggcaggcggcccaagcagcggcgcccctcctcccagcggcggcagcccagccggctccccaacctctaccgaggagggcacctctgagtccgccacccccgagagcggccctggcacctccaccgagcccagcgagggcagcgcacccggcagccctgccggcagccccacctccacagaggagggaaccagcaccgagcccagcgaaggcagcgccccaggcaccagcaccgagcctagtgagcaggagattaaacggatcaacaagatcagaagaagacttgtgaaagacagcaacaccaagaaggccggcaagacaggccccatgaaaaccctgctggttagagtgatgacacccgatctgagagagcggctggaaaacctgagaaagaagcctgaaaatatcccccagcccatcagcaatacatctagagccaacctgaataagctgctgaccgattacaccgaaatgaagaaggcgatcctgcatgtgtactgggaagagttccagaaggaccctgtgggcctgatgagccgggtggcccagcctgccagcaagaagatcgatcagaacaagctgaaacctgagatggacgagaagggcaacctgaccaccgccggctttgcctgctctcagtgtggccagcccctgttcgtgtacaagctggagcaggtgtctgagaagggcaaggcttacaccaactacttcggacggtgcaatgtggccgagcacgaaaagctgatcctgctggcccagctgaagcccgagaaggatagcgacgaagccgtgacatatagcctgggaaagtttgggcagagggccctggatttctacagcattcatgtgaccaaggagtccacccaccccgtgaagcccctggcccagatcgccggaaacagatacgcctccggacctgtgggaaaggccctgagcgacgcatgtatgggcacaatcgcctccttcctgtctaagtaccaggacatcatcatcgaacaccagaaggtggtgaagggcaaccagaagagactggagagcctgcgggagctggccggcaaggaaaacctggaataccctagcgtgaccctgccacctcagcctcacaccaaggagggcgttgatgcctacaacgaagtgatcgcccgggtgcgaatgtgggtgaacctgaacctgtggcagaagctgaagctaagcagagatgatgccaagcctctgctgagactgaagggattcccttcctttcctctggtcgagagacaggccaacgaagtggactggtgggacatggtgtgtaacgtgaagaagctgatcaacgagaaaaaggaggatggcaaggtgttttggcagaatctggctggctacaagagacaggaagccctgagaccatacctgagcagcgaggaagatcggaagaagggaaagaaattcgctcggtaccagctgggcgacctgctgctgcacctggaaaagaagcacggcgaggactggggaaaggtgtacgacgaggcctgggagcggattgacaagaaagtggaaggcctgagcaagcacatcaagctggaagaggaacggagaagcgaggacgcccagagcaaggccgccctgaccgactggctgcgggctaaggccagcttcgtgatcgagggcctgaaggaggccgacaaggacgagttctgcagatgcgagctgaagctgcagaagtggtacggggacctgcggggaaagcccttcgccatcgaagccgagaacagcatcctggacatcagcggcttcagcaagcagtacaactgtgccttcatctggcagaaggacggcgtgaagaagctgaacctgtacctgatcatcaactacttcaagggcggcaagctgcggttcaagaagatcaaacctgaagccttcgaagccaacagattctacaccgtgatcaacaaaaagagcggcgagatcgtgcccatggaggtgaacttcaacttcgacgaccccaacctgatcatcctgcctctggcctttggcaagagacagggcagagaattcatctggaacgacctgctgtccctggaaaccggcagcctgaagctggccaacggaagagtgatcgagaagacactgtacaacagaagaacccggcaggatgagcctgccctgttcgtggccctgaccttcgagcggcgggaggtcctggactcctccaatatcaaaccaatgaacctgatcggcgtggcaagaggcgaaaacatccccgccgtgatcgccctgaccgaccccgagggctgcccactgagccggtttaaggatagcctgggaaacccaacccacatcctgagaatcggcgagagctataaggagaagcagcggaccatccaggccaagaaggaggtggagcagcggagagccggcggctacagccggaagtacgccagcaaagccaagaatctggcagacgatatggtgagaaacaccgctagagatctgctgtactacgccgtgacccaggatgccatgctgatcttcgccaacctgagccggggcttcggccggcagggcaagcggaccttcatggccgagagacagtacacacggatggaggactggctgaccgccaagctggcctacgagggcctgagcaagacctacctgtccaagacactggcccagtacacctccaagacatgcagcaactgtgggtttaccatcaccagcgccgactacgacagggtgctggagaagctgaagaagacagcaacaggctggatgaccacaattaacggcaaggagctgaaggtggagggccagattacctactacaacagatacaagagacagaacgtagtcaaggacctgtccgtcgagctggatagactgagcgaagaatctgtgaacaacgacatctcctcctggacaaagggcagaagcggagaagctctgagcctcctgaagaaaagattctcccatagacccgtgcaggagaagttcgtgtgcctgaactgcggcttcgagacacacgcagccgagcaagccgccctgaacatcgccagatcctggctgttcctgcggagccaggagtacaagaaataccagacaaacaagacaaccggcaacaccgataagagagccttcgtcgagacctggcagtccttttaccggaagaagcttaaggaggtgtggaaacctgccgtgcggtctggcggatctggcggaggctccaccagccccaagaaaaagagaaaagtctaagctgccttctgcggggcttgccttctggccatgcccttcttctctcccttgcacctgtacctcttggtctttgaataaagcctgagtaggaaggctagcaaaaaaaaaaaaaaaaaaaaaaaaaaaaaaaaaaaaaaaaaaaaaaaaaaaaaaaaaaaaaaaaaaaaaaaaaaaaaaaagcccagccggctccccaacctctaccgaggagggcacctctgagtccgccacccccgagagcggccctggcacctccaccgagcccagcgagggcagcgcacccggcagccctgccggcagccccacctccacagaggagggaaccagcaccgagcccagcgaaggcagcgccccaggcaccagcaccgagcctagtgagcaggagattaaacggatcaacaagatcagaagaagacttgtgaaagacagcaacaccaagaaggccggcaagacaggccccatgaaaaccctgctggttagagtgatgacacccgatctgagagagcggctggaaaacctgagaaagaagcctgaaaatatcccccagcccatcagcaatacatctagagccaacctgaataagctgctgaccgattacaccgaaatgaagaaggcgatcctgcatgtgtactgggaagagttccagaaggaccctgtgggcctgatgagccgggtggcccagcctgccagcaagaagatcgatcagaacaagctgaaacctgagatggacgagaagggcaacctgaccaccgccggctttgcctgctctcagtgtggccagcccctgttcgtgtacaagctggagcaggtgtctgagaagggcaaggcttacaccaactacttcggacggtgcaatgtggccgagcacgaaaagctgatcctgctggcccagctgaagcccgagaaggatagcgacgaagccgtgacatatagcctgggaaagtttgggcagagggccctggatttctacagcattcatgtgaccaaggagtccacccaccccgtgaagcccctggcccagatcgccggaaacagatacgcctccggacctgtgggaaaggccctgagcgacgcatgtatgggcacaatcgcctccttcctgtctaagtaccaggacatcatcatcgaacaccagaaggtggtgaagggcaaccagaagagactggagagcctgcgggagctggccggcaaggaaaacctggaataccctagcgtgaccctgccacctcagcctcacaccaaggagggcgttgatgcctacaacgaagtgatcgcccgggtgcgaatgtgggtgaacctgaacctgtggcagaagctgaagctaagcagagatgatgccaagcctctgctgagactgaagggattcccttcctttcctctggtcgagagacaggccaacgaagtggactggtgggacatggtgtgtaacgtgaagaagctgatcaacgagaaaaaggaggatggcaaggtgttttggcagaatctggctggctacaagagacaggaagccctgagaccatacctgagcagcgaggaagatcggaagaagggaaagaaattcgctcggtaccagctgggcgacctgctgctgcacctggaaaagaagcacggcgaggactggggaaaggtgtacgacgaggcctgggagcggattgacaagaaagtggaaggcctgagcaagcacatcaagctggaagaggaacggagaagcgaggacgcccagagcaaggccgccctgaccgactggctgcgggctaaggccagcttcgtgatcgagggcctgaaggaggccgacaaggacgagttctgcagatgcgagctgaagctgcagaagtggtacggggacctgcggggaaagcccttcgccatcgaagccgagaacagcatcctggacatcagcggcttcagcaagcagtacaactgtgccttcatctggcagaaggacggcgtgaagaagctgaacctgtacctgatcatcaactacttcaagggcggcaagctgcggttcaagaagatcaaacctgaagccttcgaagccaacagattctacaccgtgatcaacaaaaagagcggcgagatcgtgcccatggaggtgaacttcaacttcgacgaccccaacctgatcatcctgcctctggcctttggcaagagacagggcagagaattcatctggaacgacctgctgtccctggaaaccggcagcctgaagctggccaacggaagagtgatcgagaagacactgtacaacagaagaacccggcaggatgagcctgccctgttcgtggccctgaccttcgagcggcgggaggtcctggactcctccaatatcaaaccaatgaacctgatcggcgtggcaagaggcgaaaacatccccgccgtgatcgccctgaccgaccccgagggctgcccactgagccggtttaaggatagcctgggaaacccaacccacatcctgagaatcggcgagagctataaggagaagcagcggaccatccaggccaagaaggaggtggagcagcggagagccggcggctacagccggaagtacgccagcaaagccaagaatctggcagacgatatggtgagaaacaccgctagagatctgctgtactacgccgtgacccaggatgccatgctgatcttcgccaacctgagccggggcttcggccggcagggcaagcggaccttcatggccgagagacagtacacacggatggaggactggctgaccgccaagctggcctacgagggcctgagcaagacctacctgtccaagacactggcccagtacacctccaagacatgcagcaactgtgggtttaccatcaccagcgccgactacgacagggtgctggagaagctgaagaagacagcaacaggctggatgaccacaattaacggcaaggagctgaaggtggagggccagattacctactacaacagatacaagagacagaacgtagtcaaggacctgtccgtcgagctggatagactgagcgaagaatctgtgaacaacgacatctcctcctggacaaagggcagaagcggagaagctctgagcctcctgaagaaaagattctcccatagacccgtgcaggagaagttcgtgtgcctgaactgcggcttcgagacacacgcagccgagcaagccgccctgaacatcgccagatcctggctgttcctgcggagccaggagtacaagaaataccagacaaacaagacaaccggcaacaccgataagagagccttcgtcgagacctggcagtccttttaccggaagaagcttaaggaggtgtggaaacctgccgtgcggtctggcggatctggcggaggctccaccagccccaagaaaaagagaaaagtctaagctgccttctgcggggcttgccttctggccatgcccttcttctctcccttgcacctgtacctcttggtctttgaataaagcctgagtaggaaggctagcaaaaaaaaaaaaaaaaaaaaaaaaaaaaaaaaaaaaaaaaaaaaaaaaaaaaaaaaaaaaaaaaaaaaaaaaaaaaaaaa

SEQ ID NO: 10491 - RNA, 8787 nt, synthetic construct
  source 1..8787: mol_type = other RNA
aggaaataagagagaaaagaagagtaagaagaaatataagagccaccatggcccctaagaagaagcgtaaagtgagccggatgaaccacgaccaggagttcgacccccctaaggtgtaccctcccgtccccgccgagaagagaaagcccatccgggtcctgagcctgttcgatggcatcgccaccggtctgctggtgctgaaggacctgggcatccaggtggataggtacattgcctccgaggtgtgcgaggactccatcaccgtgggaatggtgcgtcatcagggcaagatcatgtacgtgggcgacgtgcggagcgtgacacagaagcatatccaggagtggggccctttcgacctggtgatcggcggcagcccttgcaatgacctgagcatcgtgaacccagcccggaagggcctgtacgagggaaccggcagactgttcttcgagttttacagactgctgcacgacgcccggcctaaggaaggcgacgaccggcccttcttttggctgttcgagaatgtggtggccatgggagtcagcgacaagcgggatattagccggttcctggagagcaaccccgtgatgatcgatgccaaggaagtgagcgccgcccaccgggccagatacttctggggcaatctgcctggcatgaacagacccctggccagcaccgtgaacgacaagctggagctgcaggagtgcctggagcacggccggatcgccaagttcagcaaggtgagaaccatcaccacccgaagcaacagcatcaaacaaggcaaggaccagcactttcctgtgttcatgaacgagaaggaggacatcctgtggtgtaccgagatggagagagtgttcgggttcccagtccactacacagatgtcagcaacatgtctagactggccagacagagactgctgggaagaagctggtccgtccctgtgatcagacacctgttcgcccctctgaaggagtacttcgcctgcgtgagcagcggcaacagcaacgccaacagccggggccccagcttctctagcggcctggtgccactgtccctgagagggagccacatgggccccatggagatctacaaaaccgtgagcgcctggaagcggcagcctgtgcgcgtgctgagcctgtttcggaatatcgataaagtcctgaaaagcctgggattcctggagagcggctctggctccggcggtggcaccctgaagtacgtggaggatgtgacaaacgtggtcagacgggatgtggagaagtggggccccttcgatctggtgtacggcagcacccaacccctgggcagctcttgtgaccggtgccctggctggtacatgtttcagttccaccggatcctgcagtacgccctgccgagacaggagtcccagcggccattcttttggattttcatggacaacttgctgctgaccgaggatgaccaggaaactaccactcggttcctgcagaccgaagccgtgaccctgcaggacgtgagaggccgggactaccagaacgccatgcgggtgtggtccaacatccctggactgaaaagcaagcacgcacctctgacccctaaagaagaggagtacctgcaggcccaggtgcggagcagaagcaagctggacgcccctaaggtggatctgctggtgaagaattgcctcctgcccctgagagagtacttcaagtatttcagccagaatagtctgcccctgggaggcagcggcggcggccccagcggcctggtgaccttcgaggaggtggccgtgtacttcaccagggaggagggcgccctgctggaccccacccagagggccctgtacagggacgtgatgcaggagaactacgagaccgtggtgctgctgggcttccccgtgagcaagcccgacgtgatcagccagctggagaggggcgaggagccctgggtgcccgacctgcagggcagcgagaaggaggtgctgcccagggccgcctgcggcggcccaagcagcggcgcccctcctcccagcggcggcaggcggcccaagcagcggcgcccctcctcccagcggcggcagcccagccggctccccaacctctaccgaggagggcacctctgagtccgccacccccgagagcggccctggcacctccaccgagcccagcgagggcagcgcacccggcagccctgccggcagccccacctccacagaggagggaaccagcaccgagcccagcgaaggcagcgccccaggcaccagcaccgagcctagtgagcaggagattaaacggatcaacaagatcagaagaagacttgtgaaagacagcaacaccaagaaggccggcaagacaggccccatgaaaaccctgctggttagagtgatgacacccgatctgagagagcggctggaaaacctgagaaagaagcctgaaaatatcccccagcccatcagcaatacatctagagccaacctgaataagctgctgaccgattacaccgaaatgaagaaggcgatcctgcatgtgtactgggaagagttccagaaggaccctgtgggcctgatgagccgggtggcccagcctgccagcaagaagatcgatcagaacaagctgaaacctgagatggacgagaagggcaacctgaccaccgccggctttgcctgctctcagtgtggccagcccctgttcgtgtacaagctggagcaggtgtctgagaagggcaaggcttacaccaactacttcggacggtgcaatgtggccgagcacgaaaagctgatcctgctggcccagctgaagcccgagaaggatagcgacgaagccgtgacatatagcctgggaaagtttgggcagagggccctggatttctacagcattcatgtgaccaaggagtccacccaccccgtgaagcccctggcccagatcgccggaaacagatacgcctccggacctgtgggaaaggccctgagcgacgcatgtatgggcacaatcgcctccttcctgtctaagtaccaggacatcatcatcgaacaccagaaggtggtgaagggcaaccagaagagactggagagcctgcgggagctggccggcaaggaaaacctggaataccctagcgtgaccctgccacctcagcctcacaccaaggagggcgttgatgcctacaacgaagtgatcgcccgggtgcgaatgtgggtgaacctgaacctgtggcagaagctgaagctaagcagagatgatgccaagcctctgctgagactgaagggattcccttcctttcctctggtcgagagacaggccaacgaagtggactggtgggacatggtgtgtaacgtgaagaagctgatcaacgagaaaaaggaggatggcaaggtgttttggcagaatctggctggctacaagagacaggaagccctgagaccatacctgagcagcgaggaagatcggaagaagggaaagaaattcgctcggtaccagctgggcgacctgctgctgcacctggaaaagaagcacggcgaggactggggaaaggtgtacgacgaggcctgggagcggattgacaagaaagtggaaggcctgagcaagcacatcaagctggaagaggaacggagaagcgaggacgcccagagcaaggccgccctgaccgactggctgcgggctaaggccagcttcgtgatcgagggcctgaaggaggccgacaaggacgagttctgcagatgcgagctgaagctgcagaagtggtacggggacctgcggggaaagcccttcgccatcgaagccgagaacagcatcctggacatcagcggcttcagcaagcagtacaactgtgccttcatctggcagaaggacggcgtgaagaagctgaacctgtacctgatcatcaactacttcaagggcggcaagctgcggttcaagaagatcaaacctgaagccttcgaagccaacagattctacaccgtgatcaacaaaaagagcggcgagatcgtgcccatggaggtgaacttcaacttcgacgaccccaacctgatcatcctgcctctggcctttggcaagagacagggcagagaattcatctggaacgacctgctgtccctggaaaccggcagcctgaagctggccaacggaagagtgatcgagaagacactgtacaacagaagaacccggcaggatgagcctgccctgttcgtggccctgaccttcgagcggcgggaggtcctggactcctccaatatcaaaccaatgaacctgatcggcgtggcaagaggcgaaaacatccccgccgtgatcgccctgaccgaccccgagggctgcccactgagccggtttaaggatagcctgggaaacccaacccacatcctgagaatcggcgagagctataaggagaagcagcggaccatccaggccaagaaggaggtggagcagcggagagccggcggctacagccggaagtacgccagcaaagccaagaatctggcagacgatatggtgagaaacaccgctagagatctgctgtactacgccgtgacccaggatgccatgctgatcttcgccaacctgagccggggcttcggccggcagggcaagcggaccttcatggccgagagacagtacacacggatggaggactggctgaccgccaagctggcctacgagggcctgagcaagacctacctgtccaagacactggcccagtacacctccaagacatgcagcaactgtgggtttaccatcaccagcgccgactacgacagggtgctggagaagctgaagaagacagcaacaggctggatgaccacaattaacggcaaggagctgaaggtggagggccagattacctactacaacagatacaagagacagaacgtagtcaaggacctgtccgtcgagctggatagactgagcgaagaatctgtgaacaacgacatctcctcctggacaaagggcagaagcggagaagctctgagcctcctgaagaaaagattctcccatagacccgtgcaggagaagttcgtgtgcctgaactgcggcttcgagacacacgcagccgagcaagccgccctgaacatcgccagatcctggctgttcctgcggagccaggagtacaagaaataccagacaaacaagacaaccggcaacaccgataagagagccttcgtcgagacctggcagtccttttaccggaagaagcttaaggaggtgtggaaacctgccgtgcggtctggcggatctggcggaggctccaccagccccaagaaaaagagaaaagtctaagctgccttctgcggggcttgccttctggccatgcccttcttctctcccttgcacctgtacctcttggtctttgaataaagcctgagtaggaaggctagcaaaaaaaaaaaaaaaaaaaaaaaaaaaaaaaaaaaaaaaaaaaaaaaaaaaaaaaaaaaaaaaaaaaaaaaaaaaaaaaagcccagccggctccccaacctctaccgaggagggcacctctgagtccgccacccccgagagcggccctggcacctccaccgagcccagcgagggcagcgcacccggcagccctgccggcagccccacctccacagaggagggaaccagcaccgagcccagcgaaggcagcgccccaggcaccagcaccgagcctagtgagcaggagattaaacggatcaacaagatcagaagaagacttgtgaaagacagcaacaccaagaaggccggcaagacaggccccatgaaaaccctgctggttagagtgatgacacccgatctgagagagcggctggaaaacctgagaaagaagcctgaaaatatcccccagcccatcagcaatacatctagagccaacctgaataagctgctgaccgattacaccgaaatgaagaaggcgatcctgcatgtgtactgggaagagttccagaaggaccctgtgggcctgatgagccgggtggcccagcctgccagcaagaagatcgatcagaacaagctgaaacctgagatggacgagaagggcaacctgaccaccgccggctttgcctgctctcagtgtggccagcccctgttcgtgtacaagctggagcaggtgtctgagaagggcaaggcttacaccaactacttcggacggtgcaatgtggccgagcacgaaaagctgatcctgctggcccagctgaagcccgagaaggatagcgacgaagccgtgacatatagcctgggaaagtttgggcagagggccctggatttctacagcattcatgtgaccaaggagtccacccaccccgtgaagcccctggcccagatcgccggaaacagatacgcctccggacctgtgggaaaggccctgagcgacgcatgtatgggcacaatcgcctccttcctgtctaagtaccaggacatcatcatcgaacaccagaaggtggtgaagggcaaccagaagagactggagagcctgcgggagctggccggcaaggaaaacctggaataccctagcgtgaccctgccacctcagcctcacaccaaggagggcgttgatgcctacaacgaagtgatcgcccgggtgcgaatgtgggtgaacctgaacctgtggcagaagctgaagctaagcagagatgatgccaagcctctgctgagactgaagggattcccttcctttcctctggtcgagagacaggccaacgaagtggactggtgggacatggtgtgtaacgtgaagaagctgatcaacgagaaaaaggaggatggcaaggtgttttggcagaatctggctggctacaagagacaggaagccctgagaccatacctgagcagcgaggaagatcggaagaagggaaagaaattcgctcggtaccagctgggcgacctgctgctgcacctggaaaagaagcacggcgaggactggggaaaggtgtacgacgaggcctgggagcggattgacaagaaagtggaaggcctgagcaagcacatcaagctggaagaggaacggagaagcgaggacgcccagagcaaggccgccctgaccgactggctgcgggctaaggccagcttcgtgatcgagggcctgaaggaggccgacaaggacgagttctgcagatgcgagctgaagctgcagaagtggtacggggacctgcggggaaagcccttcgccatcgaagccgagaacagcatcctggacatcagcggcttcagcaagcagtacaactgtgccttcatctggcagaaggacggcgtgaagaagctgaacctgtacctgatcatcaactacttcaagggcggcaagctgcggttcaagaagatcaaacctgaagccttcgaagccaacagattctacaccgtgatcaacaaaaagagcggcgagatcgtgcccatggaggtgaacttcaacttcgacgaccccaacctgatcatcctgcctctggcctttggcaagagacagggcagagaattcatctggaacgacctgctgtccctggaaaccggcagcctgaagctggccaacggaagagtgatcgagaagacactgtacaacagaagaacccggcaggatgagcctgccctgttcgtggccctgaccttcgagcggcgggaggtcctggactcctccaatatcaaaccaatgaacctgatcggcgtggcaagaggcgaaaacatccccgccgtgatcgccctgaccgaccccgagggctgcccactgagccggtttaaggatagcctgggaaacccaacccacatcctgagaatcggcgagagctataaggagaagcagcggaccatccaggccaagaaggaggtggagcagcggagagccggcggctacagccggaagtacgccagcaaagccaagaatctggcagacgatatggtgagaaacaccgctagagatctgctgtactacgccgtgacccaggatgccatgctgatcttcgccaacctgagccggggcttcggccggcagggcaagcggaccttcatggccgagagacagtacacacggatggaggactggctgaccgccaagctggcctacgagggcctgagcaagacctacctgtccaagacactggcccagtacacctccaagacatgcagcaactgtgggtttaccatcaccagcgccgactacgacagggtgctggagaagctgaagaagacagcaacaggctggatgaccacaattaacggcaaggagctgaaggtggagggccagattacctactacaacagatacaagagacagaacgtagtcaaggacctgtccgtcgagctggatagactgagcgaagaatctgtgaacaacgacatctcctcctggacaaagggcagaagcggagaagctctgagcctcctgaagaaaagattctcccatagacccgtgcaggagaagttcgtgtgcctgaactgcggcttcgagacacacgcagccgagcaagccgccctgaacatcgccagatcctggctgttcctgcggagccaggagtacaagaaataccagacaaacaagacaaccggcaacaccgataagagagccttcgtcgagacctggcagtccttttaccggaagaagcttaaggaggtgtggaaacctgccgtgcggtctggcggatctggcggaggctccaccagccccaagaaaaagagaaaagtctaagctgccttctgcggggcttgccttctggccatgcccttcttctctcccttgcacctgtacctcttggtctttgaataaagcctgagtaggaaggctagcaaaaaaaaaaaaaaaaaaaaaaaaaaaaaaaaaaaaaaaaaaaaaaaaaaaaaaaaaaaaaaaaaaaaaaaaaaaaaaaa

SEQ ID NO: 10492 - RNA, 8787 nt, synthetic construct
  source 1..8787: mol_type = other RNA
aggaaataagagagaaaagaagagtaagaagaaatataagagccaccatggcccctaagaagaagcgtaaagtgagccggatgaaccacgaccaggagttcgacccccctaaggtgtaccctcccgtccccgccgagaagagaaagcccatccgggtcctgagcctgttcgatggcatcgccaccggtctgctggtgctgaaggacctgggcatccaggtggataggtacattgcctccgaggtgtgcgaggactccatcaccgtgggaatggtgcgtcatcagggcaagatcatgtacgtgggcgacgtgcggagcgtgacacagaagcatatccaggagtggggccctttcgacctggtgatcggcggcagcccttgcaatgacctgagcatcgtgaacccagcccggaagggcctgtacgagggaaccggcagactgttcttcgagttttacagactgctgcacgacgcccggcctaaggaaggcgacgaccggcccttcttttggctgttcgagaatgtggtggccatgggagtcagcgacaagcgggatattagccggttcctggagagcaaccccgtgatgatcgatgccaaggaagtgagcgccgcccaccgggccagatacttctggggcaatctgcctggcatgaacagacccctggccagcaccgtgaacgacaagctggagctgcaggagtgcctggagcacggccggatcgccaagttcagcaaggtgagaaccatcaccacccgaagcaacagcatcaaacaaggcaaggaccagcactttcctgtgttcatgaacgagaaggaggacatcctgtggtgtaccgagatggagagagtgttcgggttcccagtccactacacagatgtcagcaacatgtctagactggccagacagagactgctgggaagaagctggtccgtccctgtgatcagacacctgttcgcccctctgaaggagtacttcgcctgcgtgagcagcggcaacagcaacgccaacagccggggccccagcttctctagcggcctggtgccactgtccctgagagggagccacatgggccccatggagatctacaaaaccgtgagcgcctggaagcggcagcctgtgcgcgtgctgagcctgtttcggaatatcgataaagtcctgaaaagcctgggattcctggagagcggctctggctccggcggtggcaccctgaagtacgtggaggatgtgacaaacgtggtcagacgggatgtggagaagtggggccccttcgatctggtgtacggcagcacccaacccctgggcagctcttgtgaccggtgccctggctggtacatgtttcagttccaccggatcctgcagtacgccctgccgagacaggagtcccagcggccattcttttggattttcatggacaacttgctgctgaccgaggatgaccaggaaactaccactcggttcctgcagaccgaagccgtgaccctgcaggacgtgagaggccgggactaccagaacgccatgcgggtgtggtccaacatccctggactgaaaagcaagcacgcacctctgacccctaaagaagaggagtacctgcaggcccaggtgcggagcagaagcaagctggacgcccctaaggtggatctgctggtgaagaattgcctcctgcccctgagagagtacttcaagtatttcagccagaatagtctgcccctgggaggcagcggcggcggcatggccttcagggacgtggccgtggacttcacccaggaggagtggatgctgctgagccccgcccagaggagcctgtacagggaggtgatgctggagaactacagcaacctggtgagcctgggcatccccttcagcaagcccaagctgatcacccagctggagcagggcaaggagacctggagggaggagaggaagtgcccccccgccaacggcccccccgagcccaagcccgagctgcacctgggcggcccaagcagcggcgcccctcctcccagcggcggcaggcggcccaagcagcggcgcccctcctcccagcggcggcagcccagccggctccccaacctctaccgaggagggcacctctgagtccgccacccccgagagcggccctggcacctccaccgagcccagcgagggcagcgcacccggcagccctgccggcagccccacctccacagaggagggaaccagcaccgagcccagcgaaggcagcgccccaggcaccagcaccgagcctagtgagcaggagattaaacggatcaacaagatcagaagaagacttgtgaaagacagcaacaccaagaaggccggcaagacaggccccatgaaaaccctgctggttagagtgatgacacccgatctgagagagcggctggaaaacctgagaaagaagcctgaaaatatcccccagcccatcagcaatacatctagagccaacctgaataagctgctgaccgattacaccgaaatgaagaaggcgatcctgcatgtgtactgggaagagttccagaaggaccctgtgggcctgatgagccgggtggcccagcctgccagcaagaagatcgatcagaacaagctgaaacctgagatggacgagaagggcaacctgaccaccgccggctttgcctgctctcagtgtggccagcccctgttcgtgtacaagctggagcaggtgtctgagaagggcaaggcttacaccaactacttcggacggtgcaatgtggccgagcacgaaaagctgatcctgctggcccagctgaagcccgagaaggatagcgacgaagccgtgacatatagcctgggaaagtttgggcagagggccctggatttctacagcattcatgtgaccaaggagtccacccaccccgtgaagcccctggcccagatcgccggaaacagatacgcctccggacctgtgggaaaggccctgagcgacgcatgtatgggcacaatcgcctccttcctgtctaagtaccaggacatcatcatcgaacaccagaaggtggtgaagggcaaccagaagagactggagagcctgcgggagctggccggcaaggaaaacctggaataccctagcgtgaccctgccacctcagcctcacaccaaggagggcgttgatgcctacaacgaagtgatcgcccgggtgcgaatgtgggtgaacctgaacctgtggcagaagctgaagctaagcagagatgatgccaagcctctgctgagactgaagggattcccttcctttcctctggtcgagagacaggccaacgaagtggactggtgggacatggtgtgtaacgtgaagaagctgatcaacgagaaaaaggaggatggcaaggtgttttggcagaatctggctggctacaagagacaggaagccctgagaccatacctgagcagcgaggaagatcggaagaagggaaagaaattcgctcggtaccagctgggcgacctgctgctgcacctggaaaagaagcacggcgaggactggggaaaggtgtacgacgaggcctgggagcggattgacaagaaagtggaaggcctgagcaagcacatcaagctggaagaggaacggagaagcgaggacgcccagagcaaggccgccctgaccgactggctgcgggctaaggccagcttcgtgatcgagggcctgaaggaggccgacaaggacgagttctgcagatgcgagctgaagctgcagaagtggtacggggacctgcggggaaagcccttcgccatcgaagccgagaacagcatcctggacatcagcggcttcagcaagcagtacaactgtgccttcatctggcagaaggacggcgtgaagaagctgaacctgtacctgatcatcaactacttcaagggcggcaagctgcggttcaagaagatcaaacctgaagccttcgaagccaacagattctacaccgtgatcaacaaaaagagcggcgagatcgtgcccatggaggtgaacttcaacttcgacgaccccaacctgatcatcctgcctctggcctttggcaagagacagggcagagaattcatctggaacgacctgctgtccctggaaaccggcagcctgaagctggccaacggaagagtgatcgagaagacactgtacaacagaagaacccggcaggatgagcctgccctgttcgtggccctgaccttcgagcggcgggaggtcctggactcctccaatatcaaaccaatgaacctgatcggcgtggcaagaggcgaaaacatccccgccgtgatcgccctgaccgaccccgagggctgcccactgagccggtttaaggatagcctgggaaacccaacccacatcctgagaatcggcgagagctataaggagaagcagcggaccatccaggccaagaaggaggtggagcagcggagagccggcggctacagccggaagtacgccagcaaagccaagaatctggcagacgatatggtgagaaacaccgctagagatctgctgtactacgccgtgacccaggatgccatgctgatcttcgccaacctgagccggggcttcggccggcagggcaagcggaccttcatggccgagagacagtacacacggatggaggactggctgaccgccaagctggcctacgagggcctgagcaagacctacctgtccaagacactggcccagtacacctccaagacatgcagcaactgtgggtttaccatcaccagcgccgactacgacagggtgctggagaagctgaagaagacagcaacaggctggatgaccacaattaacggcaaggagctgaaggtggagggccagattacctactacaacagatacaagagacagaacgtagtcaaggacctgtccgtcgagctggatagactgagcgaagaatctgtgaacaacgacatctcctcctggacaaagggcagaagcggagaagctctgagcctcctgaagaaaagattctcccatagacccgtgcaggagaagttcgtgtgcctgaactgcggcttcgagacacacgcagccgagcaagccgccctgaacatcgccagatcctggctgttcctgcggagccaggagtacaagaaataccagacaaacaagacaaccggcaacaccgataagagagccttcgtcgagacctggcagtccttttaccggaagaagcttaaggaggtgtggaaacctgccgtgcggtctggcggatctggcggaggctccaccagccccaagaaaaagagaaaagtctaagctgccttctgcggggcttgccttctggccatgcccttcttctctcccttgcacctgtacctcttggtctttgaataaagcctgagtaggaaggctagcaaaaaaaaaaaaaaaaaaaaaaaaaaaaaaaaaaaaaaaaaaaaaaaaaaaaaaaaaaaaaaaaaaaaaaaaaaaaaaaagcccagccggctccccaacctctaccgaggagggcacctctgagtccgccacccccgagagcggccctggcacctccaccgagcccagcgagggcagcgcacccggcagccctgccggcagccccacctccacagaggagggaaccagcaccgagcccagcgaaggcagcgccccaggcaccagcaccgagcctagtgagcaggagattaaacggatcaacaagatcagaagaagacttgtgaaagacagcaacaccaagaaggccggcaagacaggccccatgaaaaccctgctggttagagtgatgacacccgatctgagagagcggctggaaaacctgagaaagaagcctgaaaatatcccccagcccatcagcaatacatctagagccaacctgaataagctgctgaccgattacaccgaaatgaagaaggcgatcctgcatgtgtactgggaagagttccagaaggaccctgtgggcctgatgagccgggtggcccagcctgccagcaagaagatcgatcagaacaagctgaaacctgagatggacgagaagggcaacctgaccaccgccggctttgcctgctctcagtgtggccagcccctgttcgtgtacaagctggagcaggtgtctgagaagggcaaggcttacaccaactacttcggacggtgcaatgtggccgagcacgaaaagctgatcctgctggcccagctgaagcccgagaaggatagcgacgaagccgtgacatatagcctgggaaagtttgggcagagggccctggatttctacagcattcatgtgaccaaggagtccacccaccccgtgaagcccctggcccagatcgccggaaacagatacgcctccggacctgtgggaaaggccctgagcgacgcatgtatgggcacaatcgcctccttcctgtctaagtaccaggacatcatcatcgaacaccagaaggtggtgaagggcaaccagaagagactggagagcctgcgggagctggccggcaaggaaaacctggaataccctagcgtgaccctgccacctcagcctcacaccaaggagggcgttgatgcctacaacgaagtgatcgcccgggtgcgaatgtgggtgaacctgaacctgtggcagaagctgaagctaagcagagatgatgccaagcctctgctgagactgaagggattcccttcctttcctctggtcgagagacaggccaacgaagtggactggtgggacatggtgtgtaacgtgaagaagctgatcaacgagaaaaaggaggatggcaaggtgttttggcagaatctggctggctacaagagacaggaagccctgagaccatacctgagcagcgaggaagatcggaagaagggaaagaaattcgctcggtaccagctgggcgacctgctgctgcacctggaaaagaagcacggcgaggactggggaaaggtgtacgacgaggcctgggagcggattgacaagaaagtggaaggcctgagcaagcacatcaagctggaagaggaacggagaagcgaggacgcccagagcaaggccgccctgaccgactggctgcgggctaaggccagcttcgtgatcgagggcctgaaggaggccgacaaggacgagttctgcagatgcgagctgaagctgcagaagtggtacggggacctgcggggaaagcccttcgccatcgaagccgagaacagcatcctggacatcagcggcttcagcaagcagtacaactgtgccttcatctggcagaaggacggcgtgaagaagctgaacctgtacctgatcatcaactacttcaagggcggcaagctgcggttcaagaagatcaaacctgaagccttcgaagccaacagattctacaccgtgatcaacaaaaagagcggcgagatcgtgcccatggaggtgaacttcaacttcgacgaccccaacctgatcatcctgcctctggcctttggcaagagacagggcagagaattcatctggaacgacctgctgtccctggaaaccggcagcctgaagctggccaacggaagagtgatcgagaagacactgtacaacagaagaacccggcaggatgagcctgccctgttcgtggccctgaccttcgagcggcgggaggtcctggactcctccaatatcaaaccaatgaacctgatcggcgtggcaagaggcgaaaacatccccgccgtgatcgccctgaccgaccccgagggctgcccactgagccggtttaaggatagcctgggaaacccaacccacatcctgagaatcggcgagagctataaggagaagcagcggaccatccaggccaagaaggaggtggagcagcggagagccggcggctacagccggaagtacgccagcaaagccaagaatctggcagacgatatggtgagaaacaccgctagagatctgctgtactacgccgtgacccaggatgccatgctgatcttcgccaacctgagccggggcttcggccggcagggcaagcggaccttcatggccgagagacagtacacacggatggaggactggctgaccgccaagctggcctacgagggcctgagcaagacctacctgtccaagacactggcccagtacacctccaagacatgcagcaactgtgggtttaccatcaccagcgccgactacgacagggtgctggagaagctgaagaagacagcaacaggctggatgaccacaattaacggcaaggagctgaaggtggagggccagattacctactacaacagatacaagagacagaacgtagtcaaggacctgtccgtcgagctggatagactgagcgaagaatctgtgaacaacgacatctcctcctggacaaagggcagaagcggagaagctctgagcctcctgaagaaaagattctcccatagacccgtgcaggagaagttcgtgtgcctgaactgcggcttcgagacacacgcagccgagcaagccgccctgaacatcgccagatcctggctgttcctgcggagccaggagtacaagaaataccagacaaacaagacaaccggcaacaccgataagagagccttcgtcgagacctggcagtccttttaccggaagaagcttaaggaggtgtggaaacctgccgtgcggtctggcggatctggcggaggctccaccagccccaagaaaaagagaaaagtctaagctgccttctgcggggcttgccttctggccatgcccttcttctctcccttgcacctgtacctcttggtctttgaataaagcctgagtaggaaggctagcaaaaaaaaaaaaaaaaaaaaaaaaaaaaaaaaaaaaaaaaaaaaaaaaaaaaaaaaaaaaaaaaaaaaaaaaaaaaaaaa

SEQ ID NO: 10493 - RNA, 8787 nt, synthetic construct
  source 1..8787: mol_type = other RNA
aggaaataagagagaaaagaagagtaagaagaaatataagagccaccatggcccctaagaagaagcgtaaagtgagccggatgaaccacgaccaggagttcgacccccctaaggtgtaccctcccgtccccgccgagaagagaaagcccatccgggtcctgagcctgttcgatggcatcgccaccggtctgctggtgctgaaggacctgggcatccaggtggataggtacattgcctccgaggtgtgcgaggactccatcaccgtgggaatggtgcgtcatcagggcaagatcatgtacgtgggcgacgtgcggagcgtgacacagaagcatatccaggagtggggccctttcgacctggtgatcggcggcagcccttgcaatgacctgagcatcgtgaacccagcccggaagggcctgtacgagggaaccggcagactgttcttcgagttttacagactgctgcacgacgcccggcctaaggaaggcgacgaccggcccttcttttggctgttcgagaatgtggtggccatgggagtcagcgacaagcgggatattagccggttcctggagagcaaccccgtgatgatcgatgccaaggaagtgagcgccgcccaccgggccagatacttctggggcaatctgcctggcatgaacagacccctggccagcaccgtgaacgacaagctggagctgcaggagtgcctggagcacggccggatcgccaagttcagcaaggtgagaaccatcaccacccgaagcaacagcatcaaacaaggcaaggaccagcactttcctgtgttcatgaacgagaaggaggacatcctgtggtgtaccgagatggagagagtgttcgggttcccagtccactacacagatgtcagcaacatgtctagactggccagacagagactgctgggaagaagctggtccgtccctgtgatcagacacctgttcgcccctctgaaggagtacttcgcctgcgtgagcagcggcaacagcaacgccaacagccggggccccagcttctctagcggcctggtgccactgtccctgagagggagccacatgggccccatggagatctacaaaaccgtgagcgcctggaagcggcagcctgtgcgcgtgctgagcctgtttcggaatatcgataaagtcctgaaaagcctgggattcctggagagcggctctggctccggcggtggcaccctgaagtacgtggaggatgtgacaaacgtggtcagacgggatgtggagaagtggggccccttcgatctggtgtacggcagcacccaacccctgggcagctcttgtgaccggtgccctggctggtacatgtttcagttccaccggatcctgcagtacgccctgccgagacaggagtcccagcggccattcttttggattttcatggacaacttgctgctgaccgaggatgaccaggaaactaccactcggttcctgcagaccgaagccgtgaccctgcaggacgtgagaggccgggactaccagaacgccatgcgggtgtggtccaacatccctggactgaaaagcaagcacgcacctctgacccctaaagaagaggagtacctgcaggcccaggtgcggagcagaagcaagctggacgcccctaaggtggatctgctggtgaagaattgcctcctgcccctgagagagtacttcaagtatttcagccagaatagtctgcccctgggaggcagcggcggcggcatgggcctgctgaccttccaggacgtgaccgtggacttcacccaggaggagtgggagtgcctggacctgggccagaggggcctgtacagggacgtgatgctggagaactacggcaacctggcctgcctgggcctggtggtgagcaagcccgacctggtgaccttcctggagcagatgaaggacccctggaacgtgaggaggatcgagaccgccatctaccccggcatgtgcctgctgaacatcggcggcccaagcagcggcgcccctcctcccagcggcggcaggcggcccaagcagcggcgcccctcctcccagcggcggcagcccagccggctccccaacctctaccgaggagggcacctctgagtccgccacccccgagagcggccctggcacctccaccgagcccagcgagggcagcgcacccggcagccctgccggcagccccacctccacagaggagggaaccagcaccgagcccagcgaaggcagcgccccaggcaccagcaccgagcctagtgagcaggagattaaacggatcaacaagatcagaagaagacttgtgaaagacagcaacaccaagaaggccggcaagacaggccccatgaaaaccctgctggttagagtgatgacacccgatctgagagagcggctggaaaacctgagaaagaagcctgaaaatatcccccagcccatcagcaatacatctagagccaacctgaataagctgctgaccgattacaccgaaatgaagaaggcgatcctgcatgtgtactgggaagagttccagaaggaccctgtgggcctgatgagccgggtggcccagcctgccagcaagaagatcgatcagaacaagctgaaacctgagatggacgagaagggcaacctgaccaccgccggctttgcctgctctcagtgtggccagcccctgttcgtgtacaagctggagcaggtgtctgagaagggcaaggcttacaccaactacttcggacggtgcaatgtggccgagcacgaaaagctgatcctgctggcccagctgaagcccgagaaggatagcgacgaagccgtgacatatagcctgggaaagtttgggcagagggccctggatttctacagcattcatgtgaccaaggagtccacccaccccgtgaagcccctggcccagatcgccggaaacagatacgcctccggacctgtgggaaaggccctgagcgacgcatgtatgggcacaatcgcctccttcctgtctaagtaccaggacatcatcatcgaacaccagaaggtggtgaagggcaaccagaagagactggagagcctgcgggagctggccggcaaggaaaacctggaataccctagcgtgaccctgccacctcagcctcacaccaaggagggcgttgatgcctacaacgaagtgatcgcccgggtgcgaatgtgggtgaacctgaacctgtggcagaagctgaagctaagcagagatgatgccaagcctctgctgagactgaagggattcccttcctttcctctggtcgagagacaggccaacgaagtggactggtgggacatggtgtgtaacgtgaagaagctgatcaacgagaaaaaggaggatggcaaggtgttttggcagaatctggctggctacaagagacaggaagccctgagaccatacctgagcagcgaggaagatcggaagaagggaaagaaattcgctcggtaccagctgggcgacctgctgctgcacctggaaaagaagcacggcgaggactggggaaaggtgtacgacgaggcctgggagcggattgacaagaaagtggaaggcctgagcaagcacatcaagctggaagaggaacggagaagcgaggacgcccagagcaaggccgccctgaccgactggctgcgggctaaggccagcttcgtgatcgagggcctgaaggaggccgacaaggacgagttctgcagatgcgagctgaagctgcagaagtggtacggggacctgcggggaaagcccttcgccatcgaagccgagaacagcatcctggacatcagcggcttcagcaagcagtacaactgtgccttcatctggcagaaggacggcgtgaagaagctgaacctgtacctgatcatcaactacttcaagggcggcaagctgcggttcaagaagatcaaacctgaagccttcgaagccaacagattctacaccgtgatcaacaaaaagagcggcgagatcgtgcccatggaggtgaacttcaacttcgacgaccccaacctgatcatcctgcctctggcctttggcaagagacagggcagagaattcatctggaacgacctgctgtccctggaaaccggcagcctgaagctggccaacggaagagtgatcgagaagacactgtacaacagaagaacccggcaggatgagcctgccctgttcgtggccctgaccttcgagcggcgggaggtcctggactcctccaatatcaaaccaatgaacctgatcggcgtggcaagaggcgaaaacatccccgccgtgatcgccctgaccgaccccgagggctgcccactgagccggtttaaggatagcctgggaaacccaacccacatcctgagaatcggcgagagctataaggagaagcagcggaccatccaggccaagaaggaggtggagcagcggagagccggcggctacagccggaagtacgccagcaaagccaagaatctggcagacgatatggtgagaaacaccgctagagatctgctgtactacgccgtgacccaggatgccatgctgatcttcgccaacctgagccggggcttcggccggcagggcaagcggaccttcatggccgagagacagtacacacggatggaggactggctgaccgccaagctggcctacgagggcctgagcaagacctacctgtccaagacactggcccagtacacctccaagacatgcagcaactgtgggtttaccatcaccagcgccgactacgacagggtgctggagaagctgaagaagacagcaacaggctggatgaccacaattaacggcaaggagctgaaggtggagggccagattacctactacaacagatacaagagacagaacgtagtcaaggacctgtccgtcgagctggatagactgagcgaagaatctgtgaacaacgacatctcctcctggacaaagggcagaagcggagaagctctgagcctcctgaagaaaagattctcccatagacccgtgcaggagaagttcgtgtgcctgaactgcggcttcgagacacacgcagccgagcaagccgccctgaacatcgccagatcctggctgttcctgcggagccaggagtacaagaaataccagacaaacaagacaaccggcaacaccgataagagagccttcgtcgagacctggcagtccttttaccggaagaagcttaaggaggtgtggaaacctgccgtgcggtctggcggatctggcggaggctccaccagccccaagaaaaagagaaaagtctaagctgccttctgcggggcttgccttctggccatgcccttcttctctcccttgcacctgtacctcttggtctttgaataaagcctgagtaggaaggctagcaaaaaaaaaaaaaaaaaaaaaaaaaaaaaaaaaaaaaaaaaaaaaaaaaaaaaaaaaaaaaaaaaaaaaaaaaaaaaaaagcccagccggctccccaacctctaccgaggagggcacctctgagtccgccacccccgagagcggccctggcacctccaccgagcccagcgagggcagcgcacccggcagccctgccggcagccccacctccacagaggagggaaccagcaccgagcccagcgaaggcagcgccccaggcaccagcaccgagcctagtgagcaggagattaaacggatcaacaagatcagaagaagacttgtgaaagacagcaacaccaagaaggccggcaagacaggccccatgaaaaccctgctggttagagtgatgacacccgatctgagagagcggctggaaaacctgagaaagaagcctgaaaatatcccccagcccatcagcaatacatctagagccaacctgaataagctgctgaccgattacaccgaaatgaagaaggcgatcctgcatgtgtactgggaagagttccagaaggaccctgtgggcctgatgagccgggtggcccagcctgccagcaagaagatcgatcagaacaagctgaaacctgagatggacgagaagggcaacctgaccaccgccggctttgcctgctctcagtgtggccagcccctgttcgtgtacaagctggagcaggtgtctgagaagggcaaggcttacaccaactacttcggacggtgcaatgtggccgagcacgaaaagctgatcctgctggcccagctgaagcccgagaaggatagcgacgaagccgtgacatatagcctgggaaagtttgggcagagggccctggatttctacagcattcatgtgaccaaggagtccacccaccccgtgaagcccctggcccagatcgccggaaacagatacgcctccggacctgtgggaaaggccctgagcgacgcatgtatgggcacaatcgcctccttcctgtctaagtaccaggacatcatcatcgaacaccagaaggtggtgaagggcaaccagaagagactggagagcctgcgggagctggccggcaaggaaaacctggaataccctagcgtgaccctgccacctcagcctcacaccaaggagggcgttgatgcctacaacgaagtgatcgcccgggtgcgaatgtgggtgaacctgaacctgtggcagaagctgaagctaagcagagatgatgccaagcctctgctgagactgaagggattcccttcctttcctctggtcgagagacaggccaacgaagtggactggtgggacatggtgtgtaacgtgaagaagctgatcaacgagaaaaaggaggatggcaaggtgttttggcagaatctggctggctacaagagacaggaagccctgagaccatacctgagcagcgaggaagatcggaagaagggaaagaaattcgctcggtaccagctgggcgacctgctgctgcacctggaaaagaagcacggcgaggactggggaaaggtgtacgacgaggcctgggagcggattgacaagaaagtggaaggcctgagcaagcacatcaagctggaagaggaacggagaagcgaggacgcccagagcaaggccgccctgaccgactggctgcgggctaaggccagcttcgtgatcgagggcctgaaggaggccgacaaggacgagttctgcagatgcgagctgaagctgcagaagtggtacggggacctgcggggaaagcccttcgccatcgaagccgagaacagcatcctggacatcagcggcttcagcaagcagtacaactgtgccttcatctggcagaaggacggcgtgaagaagctgaacctgtacctgatcatcaactacttcaagggcggcaagctgcggttcaagaagatcaaacctgaagccttcgaagccaacagattctacaccgtgatcaacaaaaagagcggcgagatcgtgcccatggaggtgaacttcaacttcgacgaccccaacctgatcatcctgcctctggcctttggcaagagacagggcagagaattcatctggaacgacctgctgtccctggaaaccggcagcctgaagctggccaacggaagagtgatcgagaagacactgtacaacagaagaacccggcaggatgagcctgccctgttcgtggccctgaccttcgagcggcgggaggtcctggactcctccaatatcaaaccaatgaacctgatcggcgtggcaagaggcgaaaacatccccgccgtgatcgccctgaccgaccccgagggctgcccactgagccggtttaaggatagcctgggaaacccaacccacatcctgagaatcggcgagagctataaggagaagcagcggaccatccaggccaagaaggaggtggagcagcggagagccggcggctacagccggaagtacgccagcaaagccaagaatctggcagacgatatggtgagaaacaccgctagagatctgctgtactacgccgtgacccaggatgccatgctgatcttcgccaacctgagccggggcttcggccggcagggcaagcggaccttcatggccgagagacagtacacacggatggaggactggctgaccgccaagctggcctacgagggcctgagcaagacctacctgtccaagacactggcccagtacacctccaagacatgcagcaactgtgggtttaccatcaccagcgccgactacgacagggtgctggagaagctgaagaagacagcaacaggctggatgaccacaattaacggcaaggagctgaaggtggagggccagattacctactacaacagatacaagagacagaacgtagtcaaggacctgtccgtcgagctggatagactgagcgaagaatctgtgaacaacgacatctcctcctggacaaagggcagaagcggagaagctctgagcctcctgaagaaaagattctcccatagacccgtgcaggagaagttcgtgtgcctgaactgcggcttcgagacacacgcagccgagcaagccgccctgaacatcgccagatcctggctgttcctgcggagccaggagtacaagaaataccagacaaacaagacaaccggcaacaccgataagagagccttcgtcgagacctggcagtccttttaccggaagaagcttaaggaggtgtggaaacctgccgtgcggtctggcggatctggcggaggctccaccagccccaagaaaaagagaaaagtctaagctgccttctgcggggcttgccttctggccatgcccttcttctctcccttgcacctgtacctcttggtctttgaataaagcctgagtaggaaggctagcaaaaaaaaaaaaaaaaaaaaaaaaaaaaaaaaaaaaaaaaaaaaaaaaaaaaaaaaaaaaaaaaaaaaaaaaaaaaaaaa

SEQ ID NO: 10494 - RNA, 8787 nt, synthetic construct
  source 1..8787: mol_type = other RNA
aggaaataagagagaaaagaagagtaagaagaaatataagagccaccatggcccctaagaagaagcgtaaagtgagccggatgaaccacgaccaggagttcgacccccctaaggtgtaccctcccgtccccgccgagaagagaaagcccatccgggtcctgagcctgttcgatggcatcgccaccggtctgctggtgctgaaggacctgggcatccaggtggataggtacattgcctccgaggtgtgcgaggactccatcaccgtgggaatggtgcgtcatcagggcaagatcatgtacgtgggcgacgtgcggagcgtgacacagaagcatatccaggagtggggccctttcgacctggtgatcggcggcagcccttgcaatgacctgagcatcgtgaacccagcccggaagggcctgtacgagggaaccggcagactgttcttcgagttttacagactgctgcacgacgcccggcctaaggaaggcgacgaccggcccttcttttggctgttcgagaatgtggtggccatgggagtcagcgacaagcgggatattagccggttcctggagagcaaccccgtgatgatcgatgccaaggaagtgagcgccgcccaccgggccagatacttctggggcaatctgcctggcatgaacagacccctggccagcaccgtgaacgacaagctggagctgcaggagtgcctggagcacggccggatcgccaagttcagcaaggtgagaaccatcaccacccgaagcaacagcatcaaacaaggcaaggaccagcactttcctgtgttcatgaacgagaaggaggacatcctgtggtgtaccgagatggagagagtgttcgggttcccagtccactacacagatgtcagcaacatgtctagactggccagacagagactgctgggaagaagctggtccgtccctgtgatcagacacctgttcgcccctctgaaggagtacttcgcctgcgtgagcagcggcaacagcaacgccaacagccggggccccagcttctctagcggcctggtgccactgtccctgagagggagccacatgggccccatggagatctacaaaaccgtgagcgcctggaagcggcagcctgtgcgcgtgctgagcctgtttcggaatatcgataaagtcctgaaaagcctgggattcctggagagcggctctggctccggcggtggcaccctgaagtacgtggaggatgtgacaaacgtggtcagacgggatgtggagaagtggggccccttcgatctggtgtacggcagcacccaacccctgggcagctcttgtgaccggtgccctggctggtacatgtttcagttccaccggatcctgcagtacgccctgccgagacaggagtcccagcggccattcttttggattttcatggacaacttgctgctgaccgaggatgaccaggaaactaccactcggttcctgcagaccgaagccgtgaccctgcaggacgtgagaggccgggactaccagaacgccatgcgggtgtggtccaacatccctggactgaaaagcaagcacgcacctctgacccctaaagaagaggagtacctgcaggcccaggtgcggagcagaagcaagctggacgcccctaaggtggatctgctggtgaagaattgcctcctgcccctgagagagtacttcaagtatttcagccagaatagtctgcccctgggaggcagcggcggcggcatccagggcctgctgaccttcggcgacgtggccgtggccttcaccaggatcgagtggaggcacctggacgccgcccagagggccctgtacagggacgtgatgctggagaactacggcaacctggtgagcgtgggcctgctgagcagcaagcccaagctgatcgcccagctggagcagggcgccgagccctggatggaggtgagggaggcccccagcggcaccagggccgtgcccgactactggggcggcccaagcagcggcgcccctcctcccagcggcggcaggcggcccaagcagcggcgcccctcctcccagcggcggcagcccagccggctccccaacctctaccgaggagggcacctctgagtccgccacccccgagagcggccctggcacctccaccgagcccagcgagggcagcgcacccggcagccctgccggcagccccacctccacagaggagggaaccagcaccgagcccagcgaaggcagcgccccaggcaccagcaccgagcctagtgagcaggagattaaacggatcaacaagatcagaagaagacttgtgaaagacagcaacaccaagaaggccggcaagacaggccccatgaaaaccctgctggttagagtgatgacacccgatctgagagagcggctggaaaacctgagaaagaagcctgaaaatatcccccagcccatcagcaatacatctagagccaacctgaataagctgctgaccgattacaccgaaatgaagaaggcgatcctgcatgtgtactgggaagagttccagaaggaccctgtgggcctgatgagccgggtggcccagcctgccagcaagaagatcgatcagaacaagctgaaacctgagatggacgagaagggcaacctgaccaccgccggctttgcctgctctcagtgtggccagcccctgttcgtgtacaagctggagcaggtgtctgagaagggcaaggcttacaccaactacttcggacggtgcaatgtggccgagcacgaaaagctgatcctgctggcccagctgaagcccgagaaggatagcgacgaagccgtgacatatagcctgggaaagtttgggcagagggccctggatttctacagcattcatgtgaccaaggagtccacccaccccgtgaagcccctggcccagatcgccggaaacagatacgcctccggacctgtgggaaaggccctgagcgacgcatgtatgggcacaatcgcctccttcctgtctaagtaccaggacatcatcatcgaacaccagaaggtggtgaagggcaaccagaagagactggagagcctgcgggagctggccggcaaggaaaacctggaataccctagcgtgaccctgccacctcagcctcacaccaaggagggcgttgatgcctacaacgaagtgatcgcccgggtgcgaatgtgggtgaacctgaacctgtggcagaagctgaagctaagcagagatgatgccaagcctctgctgagactgaagggattcccttcctttcctctggtcgagagacaggccaacgaagtggactggtgggacatggtgtgtaacgtgaagaagctgatcaacgagaaaaaggaggatggcaaggtgttttggcagaatctggctggctacaagagacaggaagccctgagaccatacctgagcagcgaggaagatcggaagaagggaaagaaattcgctcggtaccagctgggcgacctgctgctgcacctggaaaagaagcacggcgaggactggggaaaggtgtacgacgaggcctgggagcggattgacaagaaagtggaaggcctgagcaagcacatcaagctggaagaggaacggagaagcgaggacgcccagagcaaggccgccctgaccgactggctgcgggctaaggccagcttcgtgatcgagggcctgaaggaggccgacaaggacgagttctgcagatgcgagctgaagctgcagaagtggtacggggacctgcggggaaagcccttcgccatcgaagccgagaacagcatcctggacatcagcggcttcagcaagcagtacaactgtgccttcatctggcagaaggacggcgtgaagaagctgaacctgtacctgatcatcaactacttcaagggcggcaagctgcggttcaagaagatcaaacctgaagccttcgaagccaacagattctacaccgtgatcaacaaaaagagcggcgagatcgtgcccatggaggtgaacttcaacttcgacgaccccaacctgatcatcctgcctctggcctttggcaagagacagggcagagaattcatctggaacgacctgctgtccctggaaaccggcagcctgaagctggccaacggaagagtgatcgagaagacactgtacaacagaagaacccggcaggatgagcctgccctgttcgtggccctgaccttcgagcggcgggaggtcctggactcctccaatatcaaaccaatgaacctgatcggcgtggcaagaggcgaaaacatccccgccgtgatcgccctgaccgaccccgagggctgcccactgagccggtttaaggatagcctgggaaacccaacccacatcctgagaatcggcgagagctataaggagaagcagcggaccatccaggccaagaaggaggtggagcagcggagagccggcggctacagccggaagtacgccagcaaagccaagaatctggcagacgatatggtgagaaacaccgctagagatctgctgtactacgccgtgacccaggatgccatgctgatcttcgccaacctgagccggggcttcggccggcagggcaagcggaccttcatggccgagagacagtacacacggatggaggactggctgaccgccaagctggcctacgagggcctgagcaagacctacctgtccaagacactggcccagtacacctccaagacatgcagcaactgtgggtttaccatcaccagcgccgactacgacagggtgctggagaagctgaagaagacagcaacaggctggatgaccacaattaacggcaaggagctgaaggtggagggccagattacctactacaacagatacaagagacagaacgtagtcaaggacctgtccgtcgagctggatagactgagcgaagaatctgtgaacaacgacatctcctcctggacaaagggcagaagcggagaagctctgagcctcctgaagaaaagattctcccatagacccgtgcaggagaagttcgtgtgcctgaactgcggcttcgagacacacgcagccgagcaagccgccctgaacatcgccagatcctggctgttcctgcggagccaggagtacaagaaataccagacaaacaagacaaccggcaacaccgataagagagccttcgtcgagacctggcagtccttttaccggaagaagcttaaggaggtgtggaaacctgccgtgcggtctggcggatctggcggaggctccaccagccccaagaaaaagagaaaagtctaagctgccttctgcggggcttgccttctggccatgcccttcttctctcccttgcacctgtacctcttggtctttgaataaagcctgagtaggaaggctagcaaaaaaaaaaaaaaaaaaaaaaaaaaaaaaaaaaaaaaaaaaaaaaaaaaaaaaaaaaaaaaaaaaaaaaaaaaaaaaaagcccagccggctccccaacctctaccgaggagggcacctctgagtccgccacccccgagagcggccctggcacctccaccgagcccagcgagggcagcgcacccggcagccctgccggcagccccacctccacagaggagggaaccagcaccgagcccagcgaaggcagcgccccaggcaccagcaccgagcctagtgagcaggagattaaacggatcaacaagatcagaagaagacttgtgaaagacagcaacaccaagaaggccggcaagacaggccccatgaaaaccctgctggttagagtgatgacacccgatctgagagagcggctggaaaacctgagaaagaagcctgaaaatatcccccagcccatcagcaatacatctagagccaacctgaataagctgctgaccgattacaccgaaatgaagaaggcgatcctgcatgtgtactgggaagagttccagaaggaccctgtgggcctgatgagccgggtggcccagcctgccagcaagaagatcgatcagaacaagctgaaacctgagatggacgagaagggcaacctgaccaccgccggctttgcctgctctcagtgtggccagcccctgttcgtgtacaagctggagcaggtgtctgagaagggcaaggcttacaccaactacttcggacggtgcaatgtggccgagcacgaaaagctgatcctgctggcccagctgaagcccgagaaggatagcgacgaagccgtgacatatagcctgggaaagtttgggcagagggccctggatttctacagcattcatgtgaccaaggagtccacccaccccgtgaagcccctggcccagatcgccggaaacagatacgcctccggacctgtgggaaaggccctgagcgacgcatgtatgggcacaatcgcctccttcctgtctaagtaccaggacatcatcatcgaacaccagaaggtggtgaagggcaaccagaagagactggagagcctgcgggagctggccggcaaggaaaacctggaataccctagcgtgaccctgccacctcagcctcacaccaaggagggcgttgatgcctacaacgaagtgatcgcccgggtgcgaatgtgggtgaacctgaacctgtggcagaagctgaagctaagcagagatgatgccaagcctctgctgagactgaagggattcccttcctttcctctggtcgagagacaggccaacgaagtggactggtgggacatggtgtgtaacgtgaagaagctgatcaacgagaaaaaggaggatggcaaggtgttttggcagaatctggctggctacaagagacaggaagccctgagaccatacctgagcagcgaggaagatcggaagaagggaaagaaattcgctcggtaccagctgggcgacctgctgctgcacctggaaaagaagcacggcgaggactggggaaaggtgtacgacgaggcctgggagcggattgacaagaaagtggaaggcctgagcaagcacatcaagctggaagaggaacggagaagcgaggacgcccagagcaaggccgccctgaccgactggctgcgggctaaggccagcttcgtgatcgagggcctgaaggaggccgacaaggacgagttctgcagatgcgagctgaagctgcagaagtggtacggggacctgcggggaaagcccttcgccatcgaagccgagaacagcatcctggacatcagcggcttcagcaagcagtacaactgtgccttcatctggcagaaggacggcgtgaagaagctgaacctgtacctgatcatcaactacttcaagggcggcaagctgcggttcaagaagatcaaacctgaagccttcgaagccaacagattctacaccgtgatcaacaaaaagagcggcgagatcgtgcccatggaggtgaacttcaacttcgacgaccccaacctgatcatcctgcctctggcctttggcaagagacagggcagagaattcatctggaacgacctgctgtccctggaaaccggcagcctgaagctggccaacggaagagtgatcgagaagacactgtacaacagaagaacccggcaggatgagcctgccctgttcgtggccctgaccttcgagcggcgggaggtcctggactcctccaatatcaaaccaatgaacctgatcggcgtggcaagaggcgaaaacatccccgccgtgatcgccctgaccgaccccgagggctgcccactgagccggtttaaggatagcctgggaaacccaacccacatcctgagaatcggcgagagctataaggagaagcagcggaccatccaggccaagaaggaggtggagcagcggagagccggcggctacagccggaagtacgccagcaaagccaagaatctggcagacgatatggtgagaaacaccgctagagatctgctgtactacgccgtgacccaggatgccatgctgatcttcgccaacctgagccggggcttcggccggcagggcaagcggaccttcatggccgagagacagtacacacggatggaggactggctgaccgccaagctggcctacgagggcctgagcaagacctacctgtccaagacactggcccagtacacctccaagacatgcagcaactgtgggtttaccatcaccagcgccgactacgacagggtgctggagaagctgaagaagacagcaacaggctggatgaccacaattaacggcaaggagctgaaggtggagggccagattacctactacaacagatacaagagacagaacgtagtcaaggacctgtccgtcgagctggatagactgagcgaagaatctgtgaacaacgacatctcctcctggacaaagggcagaagcggagaagctctgagcctcctgaagaaaagattctcccatagacccgtgcaggagaagttcgtgtgcctgaactgcggcttcgagacacacgcagccgagcaagccgccctgaacatcgccagatcctggctgttcctgcggagccaggagtacaagaaataccagacaaacaagacaaccggcaacaccgataagagagccttcgtcgagacctggcagtccttttaccggaagaagcttaaggaggtgtggaaacctgccgtgcggtctggcggatctggcggaggctccaccagccccaagaaaaagagaaaagtctaagctgccttctgcggggcttgccttctggccatgcccttcttctctcccttgcacctgtacctcttggtctttgaataaagcctgagtaggaaggctagcaaaaaaaaaaaaaaaaaaaaaaaaaaaaaaaaaaaaaaaaaaaaaaaaaaaaaaaaaaaaaaaaaaaaaaaaaaaaaaaa

SEQ ID NO: 10495 - RNA, 8787 nt, synthetic construct
  source 1..8787: mol_type = other RNA
aggaaataagagagaaaagaagagtaagaagaaatataagagccaccatggcccctaagaagaagcgtaaagtgagccggatgaaccacgaccaggagttcgacccccctaaggtgtaccctcccgtccccgccgagaagagaaagcccatccgggtcctgagcctgttcgatggcatcgccaccggtctgctggtgctgaaggacctgggcatccaggtggataggtacattgcctccgaggtgtgcgaggactccatcaccgtgggaatggtgcgtcatcagggcaagatcatgtacgtgggcgacgtgcggagcgtgacacagaagcatatccaggagtggggccctttcgacctggtgatcggcggcagcccttgcaatgacctgagcatcgtgaacccagcccggaagggcctgtacgagggaaccggcagactgttcttcgagttttacagactgctgcacgacgcccggcctaaggaaggcgacgaccggcccttcttttggctgttcgagaatgtggtggccatgggagtcagcgacaagcgggatattagccggttcctggagagcaaccccgtgatgatcgatgccaaggaagtgagcgccgcccaccgggccagatacttctggggcaatctgcctggcatgaacagacccctggccagcaccgtgaacgacaagctggagctgcaggagtgcctggagcacggccggatcgccaagttcagcaaggtgagaaccatcaccacccgaagcaacagcatcaaacaaggcaaggaccagcactttcctgtgttcatgaacgagaaggaggacatcctgtggtgtaccgagatggagagagtgttcgggttcccagtccactacacagatgtcagcaacatgtctagactggccagacagagactgctgggaagaagctggtccgtccctgtgatcagacacctgttcgcccctctgaaggagtacttcgcctgcgtgagcagcggcaacagcaacgccaacagccggggccccagcttctctagcggcctggtgccactgtccctgagagggagccacatgggccccatggagatctacaaaaccgtgagcgcctggaagcggcagcctgtgcgcgtgctgagcctgtttcggaatatcgataaagtcctgaaaagcctgggattcctggagagcggctctggctccggcggtggcaccctgaagtacgtggaggatgtgacaaacgtggtcagacgggatgtggagaagtggggccccttcgatctggtgtacggcagcacccaacccctgggcagctcttgtgaccggtgccctggctggtacatgtttcagttccaccggatcctgcagtacgccctgccgagacaggagtcccagcggccattcttttggattttcatggacaacttgctgctgaccgaggatgaccaggaaactaccactcggttcctgcagaccgaagccgtgaccctgcaggacgtgagaggccgggactaccagaacgccatgcgggtgtggtccaacatccctggactgaaaagcaagcacgcacctctgacccctaaagaagaggagtacctgcaggcccaggtgcggagcagaagcaagctggacgcccctaaggtggatctgctggtgaagaattgcctcctgcccctgagagagtacttcaagtatttcagccagaatagtctgcccctgggaggcagcggcggcggcctgctgaccttcgaggacgtggccctgttcttcaccgaggaggagtggcagctgctggaccccgcccagaagatcctgtactacaacgtgatgcaggagaactacgagaccgtgaccagcctgggcctgaagctgaagaacgacaccggcaacgaccagcccatcagcctgagcaccctggagatccaggccagcggctgcaaggtgctgaggaaggccaggatgaaggtggcccagaagaccggcggcccaagcagcggcgcccctcctcccagcggcggcaggcggcccaagcagcggcgcccctcctcccagcggcggcagcccagccggctccccaacctctaccgaggagggcacctctgagtccgccacccccgagagcggccctggcacctccaccgagcccagcgagggcagcgcacccggcagccctgccggcagccccacctccacagaggagggaaccagcaccgagcccagcgaaggcagcgccccaggcaccagcaccgagcctagtgagcaggagattaaacggatcaacaagatcagaagaagacttgtgaaagacagcaacaccaagaaggccggcaagacaggccccatgaaaaccctgctggttagagtgatgacacccgatctgagagagcggctggaaaacctgagaaagaagcctgaaaatatcccccagcccatcagcaatacatctagagccaacctgaataagctgctgaccgattacaccgaaatgaagaaggcgatcctgcatgtgtactgggaagagttccagaaggaccctgtgggcctgatgagccgggtggcccagcctgccagcaagaagatcgatcagaacaagctgaaacctgagatggacgagaagggcaacctgaccaccgccggctttgcctgctctcagtgtggccagcccctgttcgtgtacaagctggagcaggtgtctgagaagggcaaggcttacaccaactacttcggacggtgcaatgtggccgagcacgaaaagctgatcctgctggcccagctgaagcccgagaaggatagcgacgaagccgtgacatatagcctgggaaagtttgggcagagggccctggatttctacagcattcatgtgaccaaggagtccacccaccccgtgaagcccctggcccagatcgccggaaacagatacgcctccggacctgtgggaaaggccctgagcgacgcatgtatgggcacaatcgcctccttcctgtctaagtaccaggacatcatcatcgaacaccagaaggtggtgaagggcaaccagaagagactggagagcctgcgggagctggccggcaaggaaaacctggaataccctagcgtgaccctgccacctcagcctcacaccaaggagggcgttgatgcctacaacgaagtgatcgcccgggtgcgaatgtgggtgaacctgaacctgtggcagaagctgaagctaagcagagatgatgccaagcctctgctgagactgaagggattcccttcctttcctctggtcgagagacaggccaacgaagtggactggtgggacatggtgtgtaacgtgaagaagctgatcaacgagaaaaaggaggatggcaaggtgttttggcagaatctggctggctacaagagacaggaagccctgagaccatacctgagcagcgaggaagatcggaagaagggaaagaaattcgctcggtaccagctgggcgacctgctgctgcacctggaaaagaagcacggcgaggactggggaaaggtgtacgacgaggcctgggagcggattgacaagaaagtggaaggcctgagcaagcacatcaagctggaagaggaacggagaagcgaggacgcccagagcaaggccgccctgaccgactggctgcgggctaaggccagcttcgtgatcgagggcctgaaggaggccgacaaggacgagttctgcagatgcgagctgaagctgcagaagtggtacggggacctgcggggaaagcccttcgccatcgaagccgagaacagcatcctggacatcagcggcttcagcaagcagtacaactgtgccttcatctggcagaaggacggcgtgaagaagctgaacctgtacctgatcatcaactacttcaagggcggcaagctgcggttcaagaagatcaaacctgaagccttcgaagccaacagattctacaccgtgatcaacaaaaagagcggcgagatcgtgcccatggaggtgaacttcaacttcgacgaccccaacctgatcatcctgcctctggcctttggcaagagacagggcagagaattcatctggaacgacctgctgtccctggaaaccggcagcctgaagctggccaacggaagagtgatcgagaagacactgtacaacagaagaacccggcaggatgagcctgccctgttcgtggccctgaccttcgagcggcgggaggtcctggactcctccaatatcaaaccaatgaacctgatcggcgtggcaagaggcgaaaacatccccgccgtgatcgccctgaccgaccccgagggctgcccactgagccggtttaaggatagcctgggaaacccaacccacatcctgagaatcggcgagagctataaggagaagcagcggaccatccaggccaagaaggaggtggagcagcggagagccggcggctacagccggaagtacgccagcaaagccaagaatctggcagacgatatggtgagaaacaccgctagagatctgctgtactacgccgtgacccaggatgccatgctgatcttcgccaacctgagccggggcttcggccggcagggcaagcggaccttcatggccgagagacagtacacacggatggaggactggctgaccgccaagctggcctacgagggcctgagcaagacctacctgtccaagacactggcccagtacacctccaagacatgcagcaactgtgggtttaccatcaccagcgccgactacgacagggtgctggagaagctgaagaagacagcaacaggctggatgaccacaattaacggcaaggagctgaaggtggagggccagattacctactacaacagatacaagagacagaacgtagtcaaggacctgtccgtcgagctggatagactgagcgaagaatctgtgaacaacgacatctcctcctggacaaagggcagaagcggagaagctctgagcctcctgaagaaaagattctcccatagacccgtgcaggagaagttcgtgtgcctgaactgcggcttcgagacacacgcagccgagcaagccgccctgaacatcgccagatcctggctgttcctgcggagccaggagtacaagaaataccagacaaacaagacaaccggcaacaccgataagagagccttcgtcgagacctggcagtccttttaccggaagaagcttaaggaggtgtggaaacctgccgtgcggtctggcggatctggcggaggctccaccagccccaagaaaaagagaaaagtctaagctgccttctgcggggcttgccttctggccatgcccttcttctctcccttgcacctgtacctcttggtctttgaataaagcctgagtaggaaggctagcaaaaaaaaaaaaaaaaaaaaaaaaaaaaaaaaaaaaaaaaaaaaaaaaaaaaaaaaaaaaaaaaaaaaaaaaaaaaaaaagcccagccggctccccaacctctaccgaggagggcacctctgagtccgccacccccgagagcggccctggcacctccaccgagcccagcgagggcagcgcacccggcagccctgccggcagccccacctccacagaggagggaaccagcaccgagcccagcgaaggcagcgccccaggcaccagcaccgagcctagtgagcaggagattaaacggatcaacaagatcagaagaagacttgtgaaagacagcaacaccaagaaggccggcaagacaggccccatgaaaaccctgctggttagagtgatgacacccgatctgagagagcggctggaaaacctgagaaagaagcctgaaaatatcccccagcccatcagcaatacatctagagccaacctgaataagctgctgaccgattacaccgaaatgaagaaggcgatcctgcatgtgtactgggaagagttccagaaggaccctgtgggcctgatgagccgggtggcccagcctgccagcaagaagatcgatcagaacaagctgaaacctgagatggacgagaagggcaacctgaccaccgccggctttgcctgctctcagtgtggccagcccctgttcgtgtacaagctggagcaggtgtctgagaagggcaaggcttacaccaactacttcggacggtgcaatgtggccgagcacgaaaagctgatcctgctggcccagctgaagcccgagaaggatagcgacgaagccgtgacatatagcctgggaaagtttgggcagagggccctggatttctacagcattcatgtgaccaaggagtccacccaccccgtgaagcccctggcccagatcgccggaaacagatacgcctccggacctgtgggaaaggccctgagcgacgcatgtatgggcacaatcgcctccttcctgtctaagtaccaggacatcatcatcgaacaccagaaggtggtgaagggcaaccagaagagactggagagcctgcgggagctggccggcaaggaaaacctggaataccctagcgtgaccctgccacctcagcctcacaccaaggagggcgttgatgcctacaacgaagtgatcgcccgggtgcgaatgtgggtgaacctgaacctgtggcagaagctgaagctaagcagagatgatgccaagcctctgctgagactgaagggattcccttcctttcctctggtcgagagacaggccaacgaagtggactggtgggacatggtgtgtaacgtgaagaagctgatcaacgagaaaaaggaggatggcaaggtgttttggcagaatctggctggctacaagagacaggaagccctgagaccatacctgagcagcgaggaagatcggaagaagggaaagaaattcgctcggtaccagctgggcgacctgctgctgcacctggaaaagaagcacggcgaggactggggaaaggtgtacgacgaggcctgggagcggattgacaagaaagtggaaggcctgagcaagcacatcaagctggaagaggaacggagaagcgaggacgcccagagcaaggccgccctgaccgactggctgcgggctaaggccagcttcgtgatcgagggcctgaaggaggccgacaaggacgagttctgcagatgcgagctgaagctgcagaagtggtacggggacctgcggggaaagcccttcgccatcgaagccgagaacagcatcctggacatcagcggcttcagcaagcagtacaactgtgccttcatctggcagaaggacggcgtgaagaagctgaacctgtacctgatcatcaactacttcaagggcggcaagctgcggttcaagaagatcaaacctgaagccttcgaagccaacagattctacaccgtgatcaacaaaaagagcggcgagatcgtgcccatggaggtgaacttcaacttcgacgaccccaacctgatcatcctgcctctggcctttggcaagagacagggcagagaattcatctggaacgacctgctgtccctggaaaccggcagcctgaagctggccaacggaagagtgatcgagaagacactgtacaacagaagaacccggcaggatgagcctgccctgttcgtggccctgaccttcgagcggcgggaggtcctggactcctccaatatcaaaccaatgaacctgatcggcgtggcaagaggcgaaaacatccccgccgtgatcgccctgaccgaccccgagggctgcccactgagccggtttaaggatagcctgggaaacccaacccacatcctgagaatcggcgagagctataaggagaagcagcggaccatccaggccaagaaggaggtggagcagcggagagccggcggctacagccggaagtacgccagcaaagccaagaatctggcagacgatatggtgagaaacaccgctagagatctgctgtactacgccgtgacccaggatgccatgctgatcttcgccaacctgagccggggcttcggccggcagggcaagcggaccttcatggccgagagacagtacacacggatggaggactggctgaccgccaagctggcctacgagggcctgagcaagacctacctgtccaagacactggcccagtacacctccaagacatgcagcaactgtgggtttaccatcaccagcgccgactacgacagggtgctggagaagctgaagaagacagcaacaggctggatgaccacaattaacggcaaggagctgaaggtggagggccagattacctactacaacagatacaagagacagaacgtagtcaaggacctgtccgtcgagctggatagactgagcgaagaatctgtgaacaacgacatctcctcctggacaaagggcagaagcggagaagctctgagcctcctgaagaaaagattctcccatagacccgtgcaggagaagttcgtgtgcctgaactgcggcttcgagacacacgcagccgagcaagccgccctgaacatcgccagatcctggctgttcctgcggagccaggagtacaagaaataccagacaaacaagacaaccggcaacaccgataagagagccttcgtcgagacctggcagtccttttaccggaagaagcttaaggaggtgtggaaacctgccgtgcggtctggcggatctggcggaggctccaccagccccaagaaaaagagaaaagtctaagctgccttctgcggggcttgccttctggccatgcccttcttctctcccttgcacctgtacctcttggtctttgaataaagcctgagtaggaaggctagcaaaaaaaaaaaaaaaaaaaaaaaaaaaaaaaaaaaaaaaaaaaaaaaaaaaaaaaaaaaaaaaaaaaaaaaaaaaaaaaa

SEQ ID NO: 10496 - RNA, 8787 nt, synthetic construct
  source 1..8787: mol_type = other RNA
aggaaataagagagaaaagaagagtaagaagaaatataagagccaccatggcccctaagaagaagcgtaaagtgagccggatgaaccacgaccaggagttcgacccccctaaggtgtaccctcccgtccccgccgagaagagaaagcccatccgggtcctgagcctgttcgatggcatcgccaccggtctgctggtgctgaaggacctgggcatccaggtggataggtacattgcctccgaggtgtgcgaggactccatcaccgtgggaatggtgcgtcatcagggcaagatcatgtacgtgggcgacgtgcggagcgtgacacagaagcatatccaggagtggggccctttcgacctggtgatcggcggcagcccttgcaatgacctgagcatcgtgaacccagcccggaagggcctgtacgagggaaccggcagactgttcttcgagttttacagactgctgcacgacgcccggcctaaggaaggcgacgaccggcccttcttttggctgttcgagaatgtggtggccatgggagtcagcgacaagcgggatattagccggttcctggagagcaaccccgtgatgatcgatgccaaggaagtgagcgccgcccaccgggccagatacttctggggcaatctgcctggcatgaacagacccctggccagcaccgtgaacgacaagctggagctgcaggagtgcctggagcacggccggatcgccaagttcagcaaggtgagaaccatcaccacccgaagcaacagcatcaaacaaggcaaggaccagcactttcctgtgttcatgaacgagaaggaggacatcctgtggtgtaccgagatggagagagtgttcgggttcccagtccactacacagatgtcagcaacatgtctagactggccagacagagactgctgggaagaagctggtccgtccctgtgatcagacacctgttcgcccctctgaaggagtacttcgcctgcgtgagcagcggcaacagcaacgccaacagccggggccccagcttctctagcggcctggtgccactgtccctgagagggagccacatgggccccatggagatctacaaaaccgtgagcgcctggaagcggcagcctgtgcgcgtgctgagcctgtttcggaatatcgataaagtcctgaaaagcctgggattcctggagagcggctctggctccggcggtggcaccctgaagtacgtggaggatgtgacaaacgtggtcagacgggatgtggagaagtggggccccttcgatctggtgtacggcagcacccaacccctgggcagctcttgtgaccggtgccctggctggtacatgtttcagttccaccggatcctgcagtacgccctgccgagacaggagtcccagcggccattcttttggattttcatggacaacttgctgctgaccgaggatgaccaggaaactaccactcggttcctgcagaccgaagccgtgaccctgcaggacgtgagaggccgggactaccagaacgccatgcgggtgtggtccaacatccctggactgaaaagcaagcacgcacctctgacccctaaagaagaggagtacctgcaggcccaggtgcggagcagaagcaagctggacgcccctaaggtggatctgctggtgaagaattgcctcctgcccctgagagagtacttcaagtatttcagccagaatagtctgcccctgggaggcagcggcggcggcatccaggagctggtgaccttcaaggacgtggccgtggacttcacccaggaggagtggggcctgctgaacaacccccagaaggagctgtacaaggaggtgatgctggagaacgcccagaacatgctgagcctgggcctgcccgtgcccagggaggacctgttcagctacttcgaggagagggaggccccctggctgctggagcaggagggcctgaggagctgctgcgccgagagggagatcaggggcggcccaagcagcggcgcccctcctcccagcggcggcaggcggcccaagcagcggcgcccctcctcccagcggcggcagcccagccggctccccaacctctaccgaggagggcacctctgagtccgccacccccgagagcggccctggcacctccaccgagcccagcgagggcagcgcacccggcagccctgccggcagccccacctccacagaggagggaaccagcaccgagcccagcgaaggcagcgccccaggcaccagcaccgagcctagtgagcaggagattaaacggatcaacaagatcagaagaagacttgtgaaagacagcaacaccaagaaggccggcaagacaggccccatgaaaaccctgctggttagagtgatgacacccgatctgagagagcggctggaaaacctgagaaagaagcctgaaaatatcccccagcccatcagcaatacatctagagccaacctgaataagctgctgaccgattacaccgaaatgaagaaggcgatcctgcatgtgtactgggaagagttccagaaggaccctgtgggcctgatgagccgggtggcccagcctgccagcaagaagatcgatcagaacaagctgaaacctgagatggacgagaagggcaacctgaccaccgccggctttgcctgctctcagtgtggccagcccctgttcgtgtacaagctggagcaggtgtctgagaagggcaaggcttacaccaactacttcggacggtgcaatgtggccgagcacgaaaagctgatcctgctggcccagctgaagcccgagaaggatagcgacgaagccgtgacatatagcctgggaaagtttgggcagagggccctggatttctacagcattcatgtgaccaaggagtccacccaccccgtgaagcccctggcccagatcgccggaaacagatacgcctccggacctgtgggaaaggccctgagcgacgcatgtatgggcacaatcgcctccttcctgtctaagtaccaggacatcatcatcgaacaccagaaggtggtgaagggcaaccagaagagactggagagcctgcgggagctggccggcaaggaaaacctggaataccctagcgtgaccctgccacctcagcctcacaccaaggagggcgttgatgcctacaacgaagtgatcgcccgggtgcgaatgtgggtgaacctgaacctgtggcagaagctgaagctaagcagagatgatgccaagcctctgctgagactgaagggattcccttcctttcctctggtcgagagacaggccaacgaagtggactggtgggacatggtgtgtaacgtgaagaagctgatcaacgagaaaaaggaggatggcaaggtgttttggcagaatctggctggctacaagagacaggaagccctgagaccatacctgagcagcgaggaagatcggaagaagggaaagaaattcgctcggtaccagctgggcgacctgctgctgcacctggaaaagaagcacggcgaggactggggaaaggtgtacgacgaggcctgggagcggattgacaagaaagtggaaggcctgagcaagcacatcaagctggaagaggaacggagaagcgaggacgcccagagcaaggccgccctgaccgactggctgcgggctaaggccagcttcgtgatcgagggcctgaaggaggccgacaaggacgagttctgcagatgcgagctgaagctgcagaagtggtacggggacctgcggggaaagcccttcgccatcgaagccgagaacagcatcctggacatcagcggcttcagcaagcagtacaactgtgccttcatctggcagaaggacggcgtgaagaagctgaacctgtacctgatcatcaactacttcaagggcggcaagctgcggttcaagaagatcaaacctgaagccttcgaagccaacagattctacaccgtgatcaacaaaaagagcggcgagatcgtgcccatggaggtgaacttcaacttcgacgaccccaacctgatcatcctgcctctggcctttggcaagagacagggcagagaattcatctggaacgacctgctgtccctggaaaccggcagcctgaagctggccaacggaagagtgatcgagaagacactgtacaacagaagaacccggcaggatgagcctgccctgttcgtggccctgaccttcgagcggcgggaggtcctggactcctccaatatcaaaccaatgaacctgatcggcgtggcaagaggcgaaaacatccccgccgtgatcgccctgaccgaccccgagggctgcccactgagccggtttaaggatagcctgggaaacccaacccacatcctgagaatcggcgagagctataaggagaagcagcggaccatccaggccaagaaggaggtggagcagcggagagccggcggctacagccggaagtacgccagcaaagccaagaatctggcagacgatatggtgagaaacaccgctagagatctgctgtactacgccgtgacccaggatgccatgctgatcttcgccaacctgagccggggcttcggccggcagggcaagcggaccttcatggccgagagacagtacacacggatggaggactggctgaccgccaagctggcctacgagggcctgagcaagacctacctgtccaagacactggcccagtacacctccaagacatgcagcaactgtgggtttaccatcaccagcgccgactacgacagggtgctggagaagctgaagaagacagcaacaggctggatgaccacaattaacggcaaggagctgaaggtggagggccagattacctactacaacagatacaagagacagaacgtagtcaaggacctgtccgtcgagctggatagactgagcgaagaatctgtgaacaacgacatctcctcctggacaaagggcagaagcggagaagctctgagcctcctgaagaaaagattctcccatagacccgtgcaggagaagttcgtgtgcctgaactgcggcttcgagacacacgcagccgagcaagccgccctgaacatcgccagatcctggctgttcctgcggagccaggagtacaagaaataccagacaaacaagacaaccggcaacaccgataagagagccttcgtcgagacctggcagtccttttaccggaagaagcttaaggaggtgtggaaacctgccgtgcggtctggcggatctggcggaggctccaccagccccaagaaaaagagaaaagtctaagctgccttctgcggggcttgccttctggccatgcccttcttctctcccttgcacctgtacctcttggtctttgaataaagcctgagtaggaaggctagcaaaaaaaaaaaaaaaaaaaaaaaaaaaaaaaaaaaaaaaaaaaaaaaaaaaaaaaaaaaaaaaaaaaaaaaaaaaaaaaagcccagccggctccccaacctctaccgaggagggcacctctgagtccgccacccccgagagcggccctggcacctccaccgagcccagcgagggcagcgcacccggcagccctgccggcagccccacctccacagaggagggaaccagcaccgagcccagcgaaggcagcgccccaggcaccagcaccgagcctagtgagcaggagattaaacggatcaacaagatcagaagaagacttgtgaaagacagcaacaccaagaaggccggcaagacaggccccatgaaaaccctgctggttagagtgatgacacccgatctgagagagcggctggaaaacctgagaaagaagcctgaaaatatcccccagcccatcagcaatacatctagagccaacctgaataagctgctgaccgattacaccgaaatgaagaaggcgatcctgcatgtgtactgggaagagttccagaaggaccctgtgggcctgatgagccgggtggcccagcctgccagcaagaagatcgatcagaacaagctgaaacctgagatggacgagaagggcaacctgaccaccgccggctttgcctgctctcagtgtggccagcccctgttcgtgtacaagctggagcaggtgtctgagaagggcaaggcttacaccaactacttcggacggtgcaatgtggccgagcacgaaaagctgatcctgctggcccagctgaagcccgagaaggatagcgacgaagccgtgacatatagcctgggaaagtttgggcagagggccctggatttctacagcattcatgtgaccaaggagtccacccaccccgtgaagcccctggcccagatcgccggaaacagatacgcctccggacctgtgggaaaggccctgagcgacgcatgtatgggcacaatcgcctccttcctgtctaagtaccaggacatcatcatcgaacaccagaaggtggtgaagggcaaccagaagagactggagagcctgcgggagctggccggcaaggaaaacctggaataccctagcgtgaccctgccacctcagcctcacaccaaggagggcgttgatgcctacaacgaagtgatcgcccgggtgcgaatgtgggtgaacctgaacctgtggcagaagctgaagctaagcagagatgatgccaagcctctgctgagactgaagggattcccttcctttcctctggtcgagagacaggccaacgaagtggactggtgggacatggtgtgtaacgtgaagaagctgatcaacgagaaaaaggaggatggcaaggtgttttggcagaatctggctggctacaagagacaggaagccctgagaccatacctgagcagcgaggaagatcggaagaagggaaagaaattcgctcggtaccagctgggcgacctgctgctgcacctggaaaagaagcacggcgaggactggggaaaggtgtacgacgaggcctgggagcggattgacaagaaagtggaaggcctgagcaagcacatcaagctggaagaggaacggagaagcgaggacgcccagagcaaggccgccctgaccgactggctgcgggctaaggccagcttcgtgatcgagggcctgaaggaggccgacaaggacgagttctgcagatgcgagctgaagctgcagaagtggtacggggacctgcggggaaagcccttcgccatcgaagccgagaacagcatcctggacatcagcggcttcagcaagcagtacaactgtgccttcatctggcagaaggacggcgtgaagaagctgaacctgtacctgatcatcaactacttcaagggcggcaagctgcggttcaagaagatcaaacctgaagccttcgaagccaacagattctacaccgtgatcaacaaaaagagcggcgagatcgtgcccatggaggtgaacttcaacttcgacgaccccaacctgatcatcctgcctctggcctttggcaagagacagggcagagaattcatctggaacgacctgctgtccctggaaaccggcagcctgaagctggccaacggaagagtgatcgagaagacactgtacaacagaagaacccggcaggatgagcctgccctgttcgtggccctgaccttcgagcggcgggaggtcctggactcctccaatatcaaaccaatgaacctgatcggcgtggcaagaggcgaaaacatccccgccgtgatcgccctgaccgaccccgagggctgcccactgagccggtttaaggatagcctgggaaacccaacccacatcctgagaatcggcgagagctataaggagaagcagcggaccatccaggccaagaaggaggtggagcagcggagagccggcggctacagccggaagtacgccagcaaagccaagaatctggcagacgatatggtgagaaacaccgctagagatctgctgtactacgccgtgacccaggatgccatgctgatcttcgccaacctgagccggggcttcggccggcagggcaagcggaccttcatggccgagagacagtacacacggatggaggactggctgaccgccaagctggcctacgagggcctgagcaagacctacctgtccaagacactggcccagtacacctccaagacatgcagcaactgtgggtttaccatcaccagcgccgactacgacagggtgctggagaagctgaagaagacagcaacaggctggatgaccacaattaacggcaaggagctgaaggtggagggccagattacctactacaacagatacaagagacagaacgtagtcaaggacctgtccgtcgagctggatagactgagcgaagaatctgtgaacaacgacatctcctcctggacaaagggcagaagcggagaagctctgagcctcctgaagaaaagattctcccatagacccgtgcaggagaagttcgtgtgcctgaactgcggcttcgagacacacgcagccgagcaagccgccctgaacatcgccagatcctggctgttcctgcggagccaggagtacaagaaataccagacaaacaagacaaccggcaacaccgataagagagccttcgtcgagacctggcagtccttttaccggaagaagcttaaggaggtgtggaaacctgccgtgcggtctggcggatctggcggaggctccaccagccccaagaaaaagagaaaagtctaagctgccttctgcggggcttgccttctggccatgcccttcttctctcccttgcacctgtacctcttggtctttgaataaagcctgagtaggaaggctagcaaaaaaaaaaaaaaaaaaaaaaaaaaaaaaaaaaaaaaaaaaaaaaaaaaaaaaaaaaaaaaaaaaaaaaaaaaaaaaaa

SEQ ID NO: 10497 - RNA, 8787 nt, synthetic construct
  source 1..8787: mol_type = other RNA
aggaaataagagagaaaagaagagtaagaagaaatataagagccaccatggcccctaagaagaagcgtaaagtgagccggatgaaccacgaccaggagttcgacccccctaaggtgtaccctcccgtccccgccgagaagagaaagcccatccgggtcctgagcctgttcgatggcatcgccaccggtctgctggtgctgaaggacctgggcatccaggtggataggtacattgcctccgaggtgtgcgaggactccatcaccgtgggaatggtgcgtcatcagggcaagatcatgtacgtgggcgacgtgcggagcgtgacacagaagcatatccaggagtggggccctttcgacctggtgatcggcggcagcccttgcaatgacctgagcatcgtgaacccagcccggaagggcctgtacgagggaaccggcagactgttcttcgagttttacagactgctgcacgacgcccggcctaaggaaggcgacgaccggcccttcttttggctgttcgagaatgtggtggccatgggagtcagcgacaagcgggatattagccggttcctggagagcaaccccgtgatgatcgatgccaaggaagtgagcgccgcccaccgggccagatacttctggggcaatctgcctggcatgaacagacccctggccagcaccgtgaacgacaagctggagctgcaggagtgcctggagcacggccggatcgccaagttcagcaaggtgagaaccatcaccacccgaagcaacagcatcaaacaaggcaaggaccagcactttcctgtgttcatgaacgagaaggaggacatcctgtggtgtaccgagatggagagagtgttcgggttcccagtccactacacagatgtcagcaacatgtctagactggccagacagagactgctgggaagaagctggtccgtccctgtgatcagacacctgttcgcccctctgaaggagtacttcgcctgcgtgagcagcggcaacagcaacgccaacagccggggccccagcttctctagcggcctggtgccactgtccctgagagggagccacatgggccccatggagatctacaaaaccgtgagcgcctggaagcggcagcctgtgcgcgtgctgagcctgtttcggaatatcgataaagtcctgaaaagcctgggattcctggagagcggctctggctccggcggtggcaccctgaagtacgtggaggatgtgacaaacgtggtcagacgggatgtggagaagtggggccccttcgatctggtgtacggcagcacccaacccctgggcagctcttgtgaccggtgccctggctggtacatgtttcagttccaccggatcctgcagtacgccctgccgagacaggagtcccagcggccattcttttggattttcatggacaacttgctgctgaccgaggatgaccaggaaactaccactcggttcctgcagaccgaagccgtgaccctgcaggacgtgagaggccgggactaccagaacgccatgcgggtgtggtccaacatccctggactgaaaagcaagcacgcacctctgacccctaaagaagaggagtacctgcaggcccaggtgcggagcagaagcaagctggacgcccctaaggtggatctgctggtgaagaattgcctcctgcccctgagagagtacttcaagtatttcagccagaatagtctgcccctgggaggcagcggcggcggcaggcccagggccgtgaagttcgccgacgtggccgtgtacttcagccccgaggagtgggagtgcctgaggcccgcccagagggccctgtacagggacgtgatgcaggagacctacggccacctgggcgccctgggctgcgccggccccaagcccgccctgatcagctggctggagaggaacaccaacgactgggagctggccgccctggacccccaggagtgccccaggcagatgaccgtgcagggcggcccaagcagcggcgcccctcctcccagcggcggcaggcggcccaagcagcggcgcccctcctcccagcggcggcagcccagccggctccccaacctctaccgaggagggcacctctgagtccgccacccccgagagcggccctggcacctccaccgagcccagcgagggcagcgcacccggcagccctgccggcagccccacctccacagaggagggaaccagcaccgagcccagcgaaggcagcgccccaggcaccagcaccgagcctagtgagcaggagattaaacggatcaacaagatcagaagaagacttgtgaaagacagcaacaccaagaaggccggcaagacaggccccatgaaaaccctgctggttagagtgatgacacccgatctgagagagcggctggaaaacctgagaaagaagcctgaaaatatcccccagcccatcagcaatacatctagagccaacctgaataagctgctgaccgattacaccgaaatgaagaaggcgatcctgcatgtgtactgggaagagttccagaaggaccctgtgggcctgatgagccgggtggcccagcctgccagcaagaagatcgatcagaacaagctgaaacctgagatggacgagaagggcaacctgaccaccgccggctttgcctgctctcagtgtggccagcccctgttcgtgtacaagctggagcaggtgtctgagaagggcaaggcttacaccaactacttcggacggtgcaatgtggccgagcacgaaaagctgatcctgctggcccagctgaagcccgagaaggatagcgacgaagccgtgacatatagcctgggaaagtttgggcagagggccctggatttctacagcattcatgtgaccaaggagtccacccaccccgtgaagcccctggcccagatcgccggaaacagatacgcctccggacctgtgggaaaggccctgagcgacgcatgtatgggcacaatcgcctccttcctgtctaagtaccaggacatcatcatcgaacaccagaaggtggtgaagggcaaccagaagagactggagagcctgcgggagctggccggcaaggaaaacctggaataccctagcgtgaccctgccacctcagcctcacaccaaggagggcgttgatgcctacaacgaagtgatcgcccgggtgcgaatgtgggtgaacctgaacctgtggcagaagctgaagctaagcagagatgatgccaagcctctgctgagactgaagggattcccttcctttcctctggtcgagagacaggccaacgaagtggactggtgggacatggtgtgtaacgtgaagaagctgatcaacgagaaaaaggaggatggcaaggtgttttggcagaatctggctggctacaagagacaggaagccctgagaccatacctgagcagcgaggaagatcggaagaagggaaagaaattcgctcggtaccagctgggcgacctgctgctgcacctggaaaagaagcacggcgaggactggggaaaggtgtacgacgaggcctgggagcggattgacaagaaagtggaaggcctgagcaagcacatcaagctggaagaggaacggagaagcgaggacgcccagagcaaggccgccctgaccgactggctgcgggctaaggccagcttcgtgatcgagggcctgaaggaggccgacaaggacgagttctgcagatgcgagctgaagctgcagaagtggtacggggacctgcggggaaagcccttcgccatcgaagccgagaacagcatcctggacatcagcggcttcagcaagcagtacaactgtgccttcatctggcagaaggacggcgtgaagaagctgaacctgtacctgatcatcaactacttcaagggcggcaagctgcggttcaagaagatcaaacctgaagccttcgaagccaacagattctacaccgtgatcaacaaaaagagcggcgagatcgtgcccatggaggtgaacttcaacttcgacgaccccaacctgatcatcctgcctctggcctttggcaagagacagggcagagaattcatctggaacgacctgctgtccctggaaaccggcagcctgaagctggccaacggaagagtgatcgagaagacactgtacaacagaagaacccggcaggatgagcctgccctgttcgtggccctgaccttcgagcggcgggaggtcctggactcctccaatatcaaaccaatgaacctgatcggcgtggcaagaggcgaaaacatccccgccgtgatcgccctgaccgaccccgagggctgcccactgagccggtttaaggatagcctgggaaacccaacccacatcctgagaatcggcgagagctataaggagaagcagcggaccatccaggccaagaaggaggtggagcagcggagagccggcggctacagccggaagtacgccagcaaagccaagaatctggcagacgatatggtgagaaacaccgctagagatctgctgtactacgccgtgacccaggatgccatgctgatcttcgccaacctgagccggggcttcggccggcagggcaagcggaccttcatggccgagagacagtacacacggatggaggactggctgaccgccaagctggcctacgagggcctgagcaagacctacctgtccaagacactggcccagtacacctccaagacatgcagcaactgtgggtttaccatcaccagcgccgactacgacagggtgctggagaagctgaagaagacagcaacaggctggatgaccacaattaacggcaaggagctgaaggtggagggccagattacctactacaacagatacaagagacagaacgtagtcaaggacctgtccgtcgagctggatagactgagcgaagaatctgtgaacaacgacatctcctcctggacaaagggcagaagcggagaagctctgagcctcctgaagaaaagattctcccatagacccgtgcaggagaagttcgtgtgcctgaactgcggcttcgagacacacgcagccgagcaagccgccctgaacatcgccagatcctggctgttcctgcggagccaggagtacaagaaataccagacaaacaagacaaccggcaacaccgataagagagccttcgtcgagacctggcagtccttttaccggaagaagcttaaggaggtgtggaaacctgccgtgcggtctggcggatctggcggaggctccaccagccccaagaaaaagagaaaagtctaagctgccttctgcggggcttgccttctggccatgcccttcttctctcccttgcacctgtacctcttggtctttgaataaagcctgagtaggaaggctagcaaaaaaaaaaaaaaaaaaaaaaaaaaaaaaaaaaaaaaaaaaaaaaaaaaaaaaaaaaaaaaaaaaaaaaaaaaaaaaaagcccagccggctccccaacctctaccgaggagggcacctctgagtccgccacccccgagagcggccctggcacctccaccgagcccagcgagggcagcgcacccggcagccctgccggcagccccacctccacagaggagggaaccagcaccgagcccagcgaaggcagcgccccaggcaccagcaccgagcctagtgagcaggagattaaacggatcaacaagatcagaagaagacttgtgaaagacagcaacaccaagaaggccggcaagacaggccccatgaaaaccctgctggttagagtgatgacacccgatctgagagagcggctggaaaacctgagaaagaagcctgaaaatatcccccagcccatcagcaatacatctagagccaacctgaataagctgctgaccgattacaccgaaatgaagaaggcgatcctgcatgtgtactgggaagagttccagaaggaccctgtgggcctgatgagccgggtggcccagcctgccagcaagaagatcgatcagaacaagctgaaacctgagatggacgagaagggcaacctgaccaccgccggctttgcctgctctcagtgtggccagcccctgttcgtgtacaagctggagcaggtgtctgagaagggcaaggcttacaccaactacttcggacggtgcaatgtggccgagcacgaaaagctgatcctgctggcccagctgaagcccgagaaggatagcgacgaagccgtgacatatagcctgggaaagtttgggcagagggccctggatttctacagcattcatgtgaccaaggagtccacccaccccgtgaagcccctggcccagatcgccggaaacagatacgcctccggacctgtgggaaaggccctgagcgacgcatgtatgggcacaatcgcctccttcctgtctaagtaccaggacatcatcatcgaacaccagaaggtggtgaagggcaaccagaagagactggagagcctgcgggagctggccggcaaggaaaacctggaataccctagcgtgaccctgccacctcagcctcacaccaaggagggcgttgatgcctacaacgaagtgatcgcccgggtgcgaatgtgggtgaacctgaacctgtggcagaagctgaagctaagcagagatgatgccaagcctctgctgagactgaagggattcccttcctttcctctggtcgagagacaggccaacgaagtggactggtgggacatggtgtgtaacgtgaagaagctgatcaacgagaaaaaggaggatggcaaggtgttttggcagaatctggctggctacaagagacaggaagccctgagaccatacctgagcagcgaggaagatcggaagaagggaaagaaattcgctcggtaccagctgggcgacctgctgctgcacctggaaaagaagcacggcgaggactggggaaaggtgtacgacgaggcctgggagcggattgacaagaaagtggaaggcctgagcaagcacatcaagctggaagaggaacggagaagcgaggacgcccagagcaaggccgccctgaccgactggctgcgggctaaggccagcttcgtgatcgagggcctgaaggaggccgacaaggacgagttctgcagatgcgagctgaagctgcagaagtggtacggggacctgcggggaaagcccttcgccatcgaagccgagaacagcatcctggacatcagcggcttcagcaagcagtacaactgtgccttcatctggcagaaggacggcgtgaagaagctgaacctgtacctgatcatcaactacttcaagggcggcaagctgcggttcaagaagatcaaacctgaagccttcgaagccaacagattctacaccgtgatcaacaaaaagagcggcgagatcgtgcccatggaggtgaacttcaacttcgacgaccccaacctgatcatcctgcctctggcctttggcaagagacagggcagagaattcatctggaacgacctgctgtccctggaaaccggcagcctgaagctggccaacggaagagtgatcgagaagacactgtacaacagaagaacccggcaggatgagcctgccctgttcgtggccctgaccttcgagcggcgggaggtcctggactcctccaatatcaaaccaatgaacctgatcggcgtggcaagaggcgaaaacatccccgccgtgatcgccctgaccgaccccgagggctgcccactgagccggtttaaggatagcctgggaaacccaacccacatcctgagaatcggcgagagctataaggagaagcagcggaccatccaggccaagaaggaggtggagcagcggagagccggcggctacagccggaagtacgccagcaaagccaagaatctggcagacgatatggtgagaaacaccgctagagatctgctgtactacgccgtgacccaggatgccatgctgatcttcgccaacctgagccggggcttcggccggcagggcaagcggaccttcatggccgagagacagtacacacggatggaggactggctgaccgccaagctggcctacgagggcctgagcaagacctacctgtccaagacactggcccagtacacctccaagacatgcagcaactgtgggtttaccatcaccagcgccgactacgacagggtgctggagaagctgaagaagacagcaacaggctggatgaccacaattaacggcaaggagctgaaggtggagggccagattacctactacaacagatacaagagacagaacgtagtcaaggacctgtccgtcgagctggatagactgagcgaagaatctgtgaacaacgacatctcctcctggacaaagggcagaagcggagaagctctgagcctcctgaagaaaagattctcccatagacccgtgcaggagaagttcgtgtgcctgaactgcggcttcgagacacacgcagccgagcaagccgccctgaacatcgccagatcctggctgttcctgcggagccaggagtacaagaaataccagacaaacaagacaaccggcaacaccgataagagagccttcgtcgagacctggcagtccttttaccggaagaagcttaaggaggtgtggaaacctgccgtgcggtctggcggatctggcggaggctccaccagccccaagaaaaagagaaaagtctaagctgccttctgcggggcttgccttctggccatgcccttcttctctcccttgcacctgtacctcttggtctttgaataaagcctgagtaggaaggctagcaaaaaaaaaaaaaaaaaaaaaaaaaaaaaaaaaaaaaaaaaaaaaaaaaaaaaaaaaaaaaaaaaaaaaaaaaaaaaaaa

SEQ ID NO: 10498 - RNA, 8787 nt, synthetic construct
  source 1..8787: mol_type = other RNA
aggaaataagagagaaaagaagagtaagaagaaatataagagccaccatggcccctaagaagaagcgtaaagtgagccggatgaaccacgaccaggagttcgacccccctaaggtgtaccctcccgtccccgccgagaagagaaagcccatccgggtcctgagcctgttcgatggcatcgccaccggtctgctggtgctgaaggacctgggcatccaggtggataggtacattgcctccgaggtgtgcgaggactccatcaccgtgggaatggtgcgtcatcagggcaagatcatgtacgtgggcgacgtgcggagcgtgacacagaagcatatccaggagtggggccctttcgacctggtgatcggcggcagcccttgcaatgacctgagcatcgtgaacccagcccggaagggcctgtacgagggaaccggcagactgttcttcgagttttacagactgctgcacgacgcccggcctaaggaaggcgacgaccggcccttcttttggctgttcgagaatgtggtggccatgggagtcagcgacaagcgggatattagccggttcctggagagcaaccccgtgatgatcgatgccaaggaagtgagcgccgcccaccgggccagatacttctggggcaatctgcctggcatgaacagacccctggccagcaccgtgaacgacaagctggagctgcaggagtgcctggagcacggccggatcgccaagttcagcaaggtgagaaccatcaccacccgaagcaacagcatcaaacaaggcaaggaccagcactttcctgtgttcatgaacgagaaggaggacatcctgtggtgtaccgagatggagagagtgttcgggttcccagtccactacacagatgtcagcaacatgtctagactggccagacagagactgctgggaagaagctggtccgtccctgtgatcagacacctgttcgcccctctgaaggagtacttcgcctgcgtgagcagcggcaacagcaacgccaacagccggggccccagcttctctagcggcctggtgccactgtccctgagagggagccacatgggccccatggagatctacaaaaccgtgagcgcctggaagcggcagcctgtgcgcgtgctgagcctgtttcggaatatcgataaagtcctgaaaagcctgggattcctggagagcggctctggctccggcggtggcaccctgaagtacgtggaggatgtgacaaacgtggtcagacgggatgtggagaagtggggccccttcgatctggtgtacggcagcacccaacccctgggcagctcttgtgaccggtgccctggctggtacatgtttcagttccaccggatcctgcagtacgccctgccgagacaggagtcccagcggccattcttttggattttcatggacaacttgctgctgaccgaggatgaccaggaaactaccactcggttcctgcagaccgaagccgtgaccctgcaggacgtgagaggccgggactaccagaacgccatgcgggtgtggtccaacatccctggactgaaaagcaagcacgcacctctgacccctaaagaagaggagtacctgcaggcccaggtgcggagcagaagcaagctggacgcccctaaggtggatctgctggtgaagaattgcctcctgcccctgagagagtacttcaagtatttcagccagaatagtctgcccctgggaggcagcggcggcggcatgcccgtgaccttcgaggacgtggccgtgaccttcacccaggaggagtggggccagctggaccccgcccagaggaccctgtaccaggaggtgatgctggagacctgcggcctgctggtgagcctgggctgccccctgcccaagcccgagctgttctaccccctggaccacagccccgagctgcacaccctgaagaggggcctgagccccaacagctgccccggcgacagcaccaagcccggcggcggcccaagcagcggcgcccctcctcccagcggcggcaggcggcccaagcagcggcgcccctcctcccagcggcggcagcccagccggctccccaacctctaccgaggagggcacctctgagtccgccacccccgagagcggccctggcacctccaccgagcccagcgagggcagcgcacccggcagccctgccggcagccccacctccacagaggagggaaccagcaccgagcccagcgaaggcagcgccccaggcaccagcaccgagcctagtgagcaggagattaaacggatcaacaagatcagaagaagacttgtgaaagacagcaacaccaagaaggccggcaagacaggccccatgaaaaccctgctggttagagtgatgacacccgatctgagagagcggctggaaaacctgagaaagaagcctgaaaatatcccccagcccatcagcaatacatctagagccaacctgaataagctgctgaccgattacaccgaaatgaagaaggcgatcctgcatgtgtactgggaagagttccagaaggaccctgtgggcctgatgagccgggtggcccagcctgccagcaagaagatcgatcagaacaagctgaaacctgagatggacgagaagggcaacctgaccaccgccggctttgcctgctctcagtgtggccagcccctgttcgtgtacaagctggagcaggtgtctgagaagggcaaggcttacaccaactacttcggacggtgcaatgtggccgagcacgaaaagctgatcctgctggcccagctgaagcccgagaaggatagcgacgaagccgtgacatatagcctgggaaagtttgggcagagggccctggatttctacagcattcatgtgaccaaggagtccacccaccccgtgaagcccctggcccagatcgccggaaacagatacgcctccggacctgtgggaaaggccctgagcgacgcatgtatgggcacaatcgcctccttcctgtctaagtaccaggacatcatcatcgaacaccagaaggtggtgaagggcaaccagaagagactggagagcctgcgggagctggccggcaaggaaaacctggaataccctagcgtgaccctgccacctcagcctcacaccaaggagggcgttgatgcctacaacgaagtgatcgcccgggtgcgaatgtgggtgaacctgaacctgtggcagaagctgaagctaagcagagatgatgccaagcctctgctgagactgaagggattcccttcctttcctctggtcgagagacaggccaacgaagtggactggtgggacatggtgtgtaacgtgaagaagctgatcaacgagaaaaaggaggatggcaaggtgttttggcagaatctggctggctacaagagacaggaagccctgagaccatacctgagcagcgaggaagatcggaagaagggaaagaaattcgctcggtaccagctgggcgacctgctgctgcacctggaaaagaagcacggcgaggactggggaaaggtgtacgacgaggcctgggagcggattgacaagaaagtggaaggcctgagcaagcacatcaagctggaagaggaacggagaagcgaggacgcccagagcaaggccgccctgaccgactggctgcgggctaaggccagcttcgtgatcgagggcctgaaggaggccgacaaggacgagttctgcagatgcgagctgaagctgcagaagtggtacggggacctgcggggaaagcccttcgccatcgaagccgagaacagcatcctggacatcagcggcttcagcaagcagtacaactgtgccttcatctggcagaaggacggcgtgaagaagctgaacctgtacctgatcatcaactacttcaagggcggcaagctgcggttcaagaagatcaaacctgaagccttcgaagccaacagattctacaccgtgatcaacaaaaagagcggcgagatcgtgcccatggaggtgaacttcaacttcgacgaccccaacctgatcatcctgcctctggcctttggcaagagacagggcagagaattcatctggaacgacctgctgtccctggaaaccggcagcctgaagctggccaacggaagagtgatcgagaagacactgtacaacagaagaacccggcaggatgagcctgccctgttcgtggccctgaccttcgagcggcgggaggtcctggactcctccaatatcaaaccaatgaacctgatcggcgtggcaagaggcgaaaacatccccgccgtgatcgccctgaccgaccccgagggctgcccactgagccggtttaaggatagcctgggaaacccaacccacatcctgagaatcggcgagagctataaggagaagcagcggaccatccaggccaagaaggaggtggagcagcggagagccggcggctacagccggaagtacgccagcaaagccaagaatctggcagacgatatggtgagaaacaccgctagagatctgctgtactacgccgtgacccaggatgccatgctgatcttcgccaacctgagccggggcttcggccggcagggcaagcggaccttcatggccgagagacagtacacacggatggaggactggctgaccgccaagctggcctacgagggcctgagcaagacctacctgtccaagacactggcccagtacacctccaagacatgcagcaactgtgggtttaccatcaccagcgccgactacgacagggtgctggagaagctgaagaagacagcaacaggctggatgaccacaattaacggcaaggagctgaaggtggagggccagattacctactacaacagatacaagagacagaacgtagtcaaggacctgtccgtcgagctggatagactgagcgaagaatctgtgaacaacgacatctcctcctggacaaagggcagaagcggagaagctctgagcctcctgaagaaaagattctcccatagacccgtgcaggagaagttcgtgtgcctgaactgcggcttcgagacacacgcagccgagcaagccgccctgaacatcgccagatcctggctgttcctgcggagccaggagtacaagaaataccagacaaacaagacaaccggcaacaccgataagagagccttcgtcgagacctggcagtccttttaccggaagaagcttaaggaggtgtggaaacctgccgtgcggtctggcggatctggcggaggctccaccagccccaagaaaaagagaaaagtctaagctgccttctgcggggcttgccttctggccatgcccttcttctctcccttgcacctgtacctcttggtctttgaataaagcctgagtaggaaggctagcaaaaaaaaaaaaaaaaaaaaaaaaaaaaaaaaaaaaaaaaaaaaaaaaaaaaaaaaaaaaaaaaaaaaaaaaaaaaaaaagcccagccggctccccaacctctaccgaggagggcacctctgagtccgccacccccgagagcggccctggcacctccaccgagcccagcgagggcagcgcacccggcagccctgccggcagccccacctccacagaggagggaaccagcaccgagcccagcgaaggcagcgccccaggcaccagcaccgagcctagtgagcaggagattaaacggatcaacaagatcagaagaagacttgtgaaagacagcaacaccaagaaggccggcaagacaggccccatgaaaaccctgctggttagagtgatgacacccgatctgagagagcggctggaaaacctgagaaagaagcctgaaaatatcccccagcccatcagcaatacatctagagccaacctgaataagctgctgaccgattacaccgaaatgaagaaggcgatcctgcatgtgtactgggaagagttccagaaggaccctgtgggcctgatgagccgggtggcccagcctgccagcaagaagatcgatcagaacaagctgaaacctgagatggacgagaagggcaacctgaccaccgccggctttgcctgctctcagtgtggccagcccctgttcgtgtacaagctggagcaggtgtctgagaagggcaaggcttacaccaactacttcggacggtgcaatgtggccgagcacgaaaagctgatcctgctggcccagctgaagcccgagaaggatagcgacgaagccgtgacatatagcctgggaaagtttgggcagagggccctggatttctacagcattcatgtgaccaaggagtccacccaccccgtgaagcccctggcccagatcgccggaaacagatacgcctccggacctgtgggaaaggccctgagcgacgcatgtatgggcacaatcgcctccttcctgtctaagtaccaggacatcatcatcgaacaccagaaggtggtgaagggcaaccagaagagactggagagcctgcgggagctggccggcaaggaaaacctggaataccctagcgtgaccctgccacctcagcctcacaccaaggagggcgttgatgcctacaacgaagtgatcgcccgggtgcgaatgtgggtgaacctgaacctgtggcagaagctgaagctaagcagagatgatgccaagcctctgctgagactgaagggattcccttcctttcctctggtcgagagacaggccaacgaagtggactggtgggacatggtgtgtaacgtgaagaagctgatcaacgagaaaaaggaggatggcaaggtgttttggcagaatctggctggctacaagagacaggaagccctgagaccatacctgagcagcgaggaagatcggaagaagggaaagaaattcgctcggtaccagctgggcgacctgctgctgcacctggaaaagaagcacggcgaggactggggaaaggtgtacgacgaggcctgggagcggattgacaagaaagtggaaggcctgagcaagcacatcaagctggaagaggaacggagaagcgaggacgcccagagcaaggccgccctgaccgactggctgcgggctaaggccagcttcgtgatcgagggcctgaaggaggccgacaaggacgagttctgcagatgcgagctgaagctgcagaagtggtacggggacctgcggggaaagcccttcgccatcgaagccgagaacagcatcctggacatcagcggcttcagcaagcagtacaactgtgccttcatctggcagaaggacggcgtgaagaagctgaacctgtacctgatcatcaactacttcaagggcggcaagctgcggttcaagaagatcaaacctgaagccttcgaagccaacagattctacaccgtgatcaacaaaaagagcggcgagatcgtgcccatggaggtgaacttcaacttcgacgaccccaacctgatcatcctgcctctggcctttggcaagagacagggcagagaattcatctggaacgacctgctgtccctggaaaccggcagcctgaagctggccaacggaagagtgatcgagaagacactgtacaacagaagaacccggcaggatgagcctgccctgttcgtggccctgaccttcgagcggcgggaggtcctggactcctccaatatcaaaccaatgaacctgatcggcgtggcaagaggcgaaaacatccccgccgtgatcgccctgaccgaccccgagggctgcccactgagccggtttaaggatagcctgggaaacccaacccacatcctgagaatcggcgagagctataaggagaagcagcggaccatccaggccaagaaggaggtggagcagcggagagccggcggctacagccggaagtacgccagcaaagccaagaatctggcagacgatatggtgagaaacaccgctagagatctgctgtactacgccgtgacccaggatgccatgctgatcttcgccaacctgagccggggcttcggccggcagggcaagcggaccttcatggccgagagacagtacacacggatggaggactggctgaccgccaagctggcctacgagggcctgagcaagacctacctgtccaagacactggcccagtacacctccaagacatgcagcaactgtgggtttaccatcaccagcgccgactacgacagggtgctggagaagctgaagaagacagcaacaggctggatgaccacaattaacggcaaggagctgaaggtggagggccagattacctactacaacagatacaagagacagaacgtagtcaaggacctgtccgtcgagctggatagactgagcgaagaatctgtgaacaacgacatctcctcctggacaaagggcagaagcggagaagctctgagcctcctgaagaaaagattctcccatagacccgtgcaggagaagttcgtgtgcctgaactgcggcttcgagacacacgcagccgagcaagccgccctgaacatcgccagatcctggctgttcctgcggagccaggagtacaagaaataccagacaaacaagacaaccggcaacaccgataagagagccttcgtcgagacctggcagtccttttaccggaagaagcttaaggaggtgtggaaacctgccgtgcggtctggcggatctggcggaggctccaccagccccaagaaaaagagaaaagtctaagctgccttctgcggggcttgccttctggccatgcccttcttctctcccttgcacctgtacctcttggtctttgaataaagcctgagtaggaaggctagcaaaaaaaaaaaaaaaaaaaaaaaaaaaaaaaaaaaaaaaaaaaaaaaaaaaaaaaaaaaaaaaaaaaaaaaaaaaaaaaa

SEQ ID NO: 10499 - RNA, 8805 nt, synthetic construct
  source 1..8805: mol_type = other RNA
aggaaataagagagaaaagaagagtaagaagaaatataagagccaccatggcccctaagaagaagcgtaaagtgagccggatgaaccacgaccaggagttcgacccccctaaggtgtaccctcccgtccccgccgagaagagaaagcccatccgggtcctgagcctgttcgatggcatcgccaccggtctgctggtgctgaaggacctgggcatccaggtggataggtacattgcctccgaggtgtgcgaggactccatcaccgtgggaatggtgcgtcatcagggcaagatcatgtacgtgggcgacgtgcggagcgtgacacagaagcatatccaggagtggggccctttcgacctggtgatcggcggcagcccttgcaatgacctgagcatcgtgaacccagcccggaagggcctgtacgagggaaccggcagactgttcttcgagttttacagactgctgcacgacgcccggcctaaggaaggcgacgaccggcccttcttttggctgttcgagaatgtggtggccatgggagtcagcgacaagcgggatattagccggttcctggagagcaaccccgtgatgatcgatgccaaggaagtgagcgccgcccaccgggccagatacttctggggcaatctgcctggcatgaacagacccctggccagcaccgtgaacgacaagctggagctgcaggagtgcctggagcacggccggatcgccaagttcagcaaggtgagaaccatcaccacccgaagcaacagcatcaaacaaggcaaggaccagcactttcctgtgttcatgaacgagaaggaggacatcctgtggtgtaccgagatggagagagtgttcgggttcccagtccactacacagatgtcagcaacatgtctagactggccagacagagactgctgggaagaagctggtccgtccctgtgatcagacacctgttcgcccctctgaaggagtacttcgcctgcgtgagcagcggcaacagcaacgccaacagccggggccccagcttctctagcggcctggtgccactgtccctgagagggagccacatgggccccatggagatctacaaaaccgtgagcgcctggaagcggcagcctgtgcgcgtgctgagcctgtttcggaatatcgataaagtcctgaaaagcctgggattcctggagagcggctctggctccggcggtggcaccctgaagtacgtggaggatgtgacaaacgtggtcagacgggatgtggagaagtggggccccttcgatctggtgtacggcagcacccaacccctgggcagctcttgtgaccggtgccctggctggtacatgtttcagttccaccggatcctgcagtacgccctgccgagacaggagtcccagcggccattcttttggattttcatggacaacttgctgctgaccgaggatgaccaggaaactaccactcggttcctgcagaccgaagccgtgaccctgcaggacgtgagaggccgggactaccagaacgccatgcgggtgtggtccaacatccctggactgaaaagcaagcacgcacctctgacccctaaagaagaggagtacctgcaggcccaggtgcggagcagaagcaagctggacgcccctaaggtggatctgctggtgaagaattgcctcctgcccctgagagagtacttcaagtatttcagccagaatagtctgcccctgggaggcagcggcggcggcgtggccttcgaggacgtggccgtgaacttcacccaggaggagtgggccctgctgaacagcagccagaagaacctgtacagggaggtgatgcaggagacctgcaggaacctggccagcgtgggcagcaagtggaaggaccagaacatcgaggaccacttcgagaagcccggcaagaacatcaggaagcacatggtgcagaagctgtgcgagagcaaggagggcagccagtacggcgaggtggtgagccagatccccaacctgggcggcccaagcagcggcgcccctcctcccagcggcggcaggcggcccaagcagcggcgcccctcctcccagcggcggcagcccagccggctccccaacctctaccgaggagggcacctctgagtccgccacccccgagagcggccctggcacctccaccgagcccagcgagggcagcgcacccggcagccctgccggcagccccacctccacagaggagggaaccagcaccgagcccagcgaaggcagcgccccaggcaccagcaccgagcctagtgagcaggagattaaacggatcaacaagatcagaagaagacttgtgaaagacagcaacaccaagaaggccggcaagacaggccccatgaaaaccctgctggttagagtgatgacacccgatctgagagagcggctggaaaacctgagaaagaagcctgaaaatatcccccagcccatcagcaatacatctagagccaacctgaataagctgctgaccgattacaccgaaatgaagaaggcgatcctgcatgtgtactgggaagagttccagaaggaccctgtgggcctgatgagccgggtggcccagcctgccagcaagaagatcgatcagaacaagctgaaacctgagatggacgagaagggcaacctgaccaccgccggctttgcctgctctcagtgtggccagcccctgttcgtgtacaagctggagcaggtgtctgagaagggcaaggcttacaccaactacttcggacggtgcaatgtggccgagcacgaaaagctgatcctgctggcccagctgaagcccgagaaggatagcgacgaagccgtgacatatagcctgggaaagtttgggcagagggccctggatttctacagcattcatgtgaccaaggagtccacccaccccgtgaagcccctggcccagatcgccggaaacagatacgcctccggacctgtgggaaaggccctgagcgacgcatgtatgggcacaatcgcctccttcctgtctaagtaccaggacatcatcatcgaacaccagaaggtggtgaagggcaaccagaagagactggagagcctgcgggagctggccggcaaggaaaacctggaataccctagcgtgaccctgccacctcagcctcacaccaaggagggcgttgatgcctacaacgaagtgatcgcccgggtgcgaatgtgggtgaacctgaacctgtggcagaagctgaagctaagcagagatgatgccaagcctctgctgagactgaagggattcccttcctttcctctggtcgagagacaggccaacgaagtggactggtgggacatggtgtgtaacgtgaagaagctgatcaacgagaaaaaggaggatggcaaggtgttttggcagaatctggctggctacaagagacaggaagccctgagaccatacctgagcagcgaggaagatcggaagaagggaaagaaattcgctcggtaccagctgggcgacctgctgctgcacctggaaaagaagcacggcgaggactggggaaaggtgtacgacgaggcctgggagcggattgacaagaaagtggaaggcctgagcaagcacatcaagctggaagaggaacggagaagcgaggacgcccagagcaaggccgccctgaccgactggctgcgggctaaggccagcttcgtgatcgagggcctgaaggaggccgacaaggacgagttctgcagatgcgagctgaagctgcagaagtggtacggggacctgcggggaaagcccttcgccatcgaagccgagaacagcatcctggacatcagcggcttcagcaagcagtacaactgtgccttcatctggcagaaggacggcgtgaagaagctgaacctgtacctgatcatcaactacttcaagggcggcaagctgcggttcaagaagatcaaacctgaagccttcgaagccaacagattctacaccgtgatcaacaaaaagagcggcgagatcgtgcccatggaggtgaacttcaacttcgacgaccccaacctgatcatcctgcctctggcctttggcaagagacagggcagagaattcatctggaacgacctgctgtccctggaaaccggcagcctgaagctggccaacggaagagtgatcgagaagacactgtacaacagaagaacccggcaggatgagcctgccctgttcgtggccctgaccttcgagcggcgggaggtcctggactcctccaatatcaaaccaatgaacctgatcggcgtggcaagaggcgaaaacatccccgccgtgatcgccctgaccgaccccgagggctgcccactgagccggtttaaggatagcctgggaaacccaacccacatcctgagaatcggcgagagctataaggagaagcagcggaccatccaggccaagaaggaggtggagcagcggagagccggcggctacagccggaagtacgccagcaaagccaagaatctggcagacgatatggtgagaaacaccgctagagatctgctgtactacgccgtgacccaggatgccatgctgatcttcgccaacctgagccggggcttcggccggcagggcaagcggaccttcatggccgagagacagtacacacggatggaggactggctgaccgccaagctggcctacgagggcctgagcaagacctacctgtccaagacactggcccagtacacctccaagacatgcagcaactgtgggtttaccatcaccagcgccgactacgacagggtgctggagaagctgaagaagacagcaacaggctggatgaccacaattaacggcaaggagctgaaggtggagggccagattacctactacaacagatacaagagacagaacgtagtcaaggacctgtccgtcgagctggatagactgagcgaagaatctgtgaacaacgacatctcctcctggacaaagggcagaagcggagaagctctgagcctcctgaagaaaagattctcccatagacccgtgcaggagaagttcgtgtgcctgaactgcggcttcgagacacacgcagccgagcaagccgccctgaacatcgccagatcctggctgttcctgcggagccaggagtacaagaaataccagacaaacaagacaaccggcaacaccgataagagagccttcgtcgagacctggcagtccttttaccggaagaagcttaaggaggtgtggaaacctgccgtgcggtctggcggatctggcggaggctccaccagccccaagaaaaagagaaaagtctaagctgccttctgcggggcttgccttctggccatgcccttcttctctcccttgcacctgtacctcttggtctttgaataaagcctgagtaggaaggctagcaaaaaaaaaaaaaaaaaaaaaaaaaaaaaaaaaaaaaaaaaaaaaaaaaaaaaaaaaaaaaaaaaaaaaaaaaaaaaaaagcccagccggctccccaacctctaccgaggagggcacctctgagtccgccacccccgagagcggccctggcacctccaccgagcccagcgagggcagcgcacccggcagccctgccggcagccccacctccacagaggagggaaccagcaccgagcccagcgaaggcagcgccccaggcaccagcaccgagcctagtgagcaggagattaaacggatcaacaagatcagaagaagacttgtgaaagacagcaacaccaagaaggccggcaagacaggccccatgaaaaccctgctggttagagtgatgacacccgatctgagagagcggctggaaaacctgagaaagaagcctgaaaatatcccccagcccatcagcaatacatctagagccaacctgaataagctgctgaccgattacaccgaaatgaagaaggcgatcctgcatgtgtactgggaagagttccagaaggaccctgtgggcctgatgagccgggtggcccagcctgccagcaagaagatcgatcagaacaagctgaaacctgagatggacgagaagggcaacctgaccaccgccggctttgcctgctctcagtgtggccagcccctgttcgtgtacaagctggagcaggtgtctgagaagggcaaggcttacaccaactacttcggacggtgcaatgtggccgagcacgaaaagctgatcctgctggcccagctgaagcccgagaaggatagcgacgaagccgtgacatatagcctgggaaagtttgggcagagggccctggatttctacagcattcatgtgaccaaggagtccacccaccccgtgaagcccctggcccagatcgccggaaacagatacgcctccggacctgtgggaaaggccctgagcgacgcatgtatgggcacaatcgcctccttcctgtctaagtaccaggacatcatcatcgaacaccagaaggtggtgaagggcaaccagaagagactggagagcctgcgggagctggccggcaaggaaaacctggaataccctagcgtgaccctgccacctcagcctcacaccaaggagggcgttgatgcctacaacgaagtgatcgcccgggtgcgaatgtgggtgaacctgaacctgtggcagaagctgaagctaagcagagatgatgccaagcctctgctgagactgaagggattcccttcctttcctctggtcgagagacaggccaacgaagtggactggtgggacatggtgtgtaacgtgaagaagctgatcaacgagaaaaaggaggatggcaaggtgttttggcagaatctggctggctacaagagacaggaagccctgagaccatacctgagcagcgaggaagatcggaagaagggaaagaaattcgctcggtaccagctgggcgacctgctgctgcacctggaaaagaagcacggcgaggactggggaaaggtgtacgacgaggcctgggagcggattgacaagaaagtggaaggcctgagcaagcacatcaagctggaagaggaacggagaagcgaggacgcccagagcaaggccgccctgaccgactggctgcgggctaaggccagcttcgtgatcgagggcctgaaggaggccgacaaggacgagttctgcagatgcgagctgaagctgcagaagtggtacggggacctgcggggaaagcccttcgccatcgaagccgagaacagcatcctggacatcagcggcttcagcaagcagtacaactgtgccttcatctggcagaaggacggcgtgaagaagctgaacctgtacctgatcatcaactacttcaagggcggcaagctgcggttcaagaagatcaaacctgaagccttcgaagccaacagattctacaccgtgatcaacaaaaagagcggcgagatcgtgcccatggaggtgaacttcaacttcgacgaccccaacctgatcatcctgcctctggcctttggcaagagacagggcagagaattcatctggaacgacctgctgtccctggaaaccggcagcctgaagctggccaacggaagagtgatcgagaagacactgtacaacagaagaacccggcaggatgagcctgccctgttcgtggccctgaccttcgagcggcgggaggtcctggactcctccaatatcaaaccaatgaacctgatcggcgtggcaagaggcgaaaacatccccgccgtgatcgccctgaccgaccccgagggctgcccactgagccggtttaaggatagcctgggaaacccaacccacatcctgagaatcggcgagagctataaggagaagcagcggaccatccaggccaagaaggaggtggagcagcggagagccggcggctacagccggaagtacgccagcaaagccaagaatctggcagacgatatggtgagaaacaccgctagagatctgctgtactacgccgtgacccaggatgccatgctgatcttcgccaacctgagccggggcttcggccggcagggcaagcggaccttcatggccgagagacagtacacacggatggaggactggctgaccgccaagctggcctacgagggcctgagcaagacctacctgtccaagacactggcccagtacacctccaagacatgcagcaactgtgggtttaccatcaccagcgccgactacgacagggtgctggagaagctgaagaagacagcaacaggctggatgaccacaattaacggcaaggagctgaaggtggagggccagattacctactacaacagatacaagagacagaacgtagtcaaggacctgtccgtcgagctggatagactgagcgaagaatctgtgaacaacgacatctcctcctggacaaagggcagaagcggagaagctctgagcctcctgaagaaaagattctcccatagacccgtgcaggagaagttcgtgtgcctgaactgcggcttcgagacacacgcagccgagcaagccgccctgaacatcgccagatcctggctgttcctgcggagccaggagtacaagaaataccagacaaacaagacaaccggcaacaccgataagagagccttcgtcgagacctggcagtccttttaccggaagaagcttaaggaggtgtggaaacctgccgtgcggtctggcggatctggcggaggctccaccagccccaagaaaaagagaaaagtctaagctgccttctgcggggcttgccttctggccatgcccttcttctctcccttgcacctgtacctcttggtctttgaataaagcctgagtaggaaggctagcaaaaaaaaaaaaaaaaaaaaaaaaaaaaaaaaaaaaaaaaaaaaaaaaaaaaaaaaaaaaaaaaaaaaaaaaaaaaaaaa

SEQ ID NO: 10500 - RNA, 8796 nt, synthetic construct
  source 1..8796: mol_type = other RNA
aggaaataagagagaaaagaagagtaagaagaaatataagagccaccatggcccctaagaagaagcgtaaagtgagccggatgaaccacgaccaggagttcgacccccctaaggtgtaccctcccgtccccgccgagaagagaaagcccatccgggtcctgagcctgttcgatggcatcgccaccggtctgctggtgctgaaggacctgggcatccaggtggataggtacattgcctccgaggtgtgcgaggactccatcaccgtgggaatggtgcgtcatcagggcaagatcatgtacgtgggcgacgtgcggagcgtgacacagaagcatatccaggagtggggccctttcgacctggtgatcggcggcagcccttgcaatgacctgagcatcgtgaacccagcccggaagggcctgtacgagggaaccggcagactgttcttcgagttttacagactgctgcacgacgcccggcctaaggaaggcgacgaccggcccttcttttggctgttcgagaatgtggtggccatgggagtcagcgacaagcgggatattagccggttcctggagagcaaccccgtgatgatcgatgccaaggaagtgagcgccgcccaccgggccagatacttctggggcaatctgcctggcatgaacagacccctggccagcaccgtgaacgacaagctggagctgcaggagtgcctggagcacggccggatcgccaagttcagcaaggtgagaaccatcaccacccgaagcaacagcatcaaacaaggcaaggaccagcactttcctgtgttcatgaacgagaaggaggacatcctgtggtgtaccgagatggagagagtgttcgggttcccagtccactacacagatgtcagcaacatgtctagactggccagacagagactgctgggaagaagctggtccgtccctgtgatcagacacctgttcgcccctctgaaggagtacttcgcctgcgtgagcagcggcaacagcaacgccaacagccggggccccagcttctctagcggcctggtgccactgtccctgagagggagccacatgggccccatggagatctacaaaaccgtgagcgcctggaagcggcagcctgtgcgcgtgctgagcctgtttcggaatatcgataaagtcctgaaaagcctgggattcctggagagcggctctggctccggcggtggcaccctgaagtacgtggaggatgtgacaaacgtggtcagacgggatgtggagaagtggggccccttcgatctggtgtacggcagcacccaacccctgggcagctcttgtgaccggtgccctggctggtacatgtttcagttccaccggatcctgcagtacgccctgccgagacaggagtcccagcggccattcttttggattttcatggacaacttgctgctgaccgaggatgaccaggaaactaccactcggttcctgcagaccgaagccgtgaccctgcaggacgtgagaggccgggactaccagaacgccatgcgggtgtggtccaacatccctggactgaaaagcaagcacgcacctctgacccctaaagaagaggagtacctgcaggcccaggtgcggagcagaagcaagctggacgcccctaaggtggatctgctggtgaagaattgcctcctgcccctgagagagtacttcaagtatttcagccagaatagtctgcccctgggaggcagcggcggcggcctgaccttcgaggacgtggccgtgtacttcagcgaggaggagtggcagctgctggacccccccgagaagaccctgtacaacgacgtgatgcaggacatctacgagaccgtgatcagcctgggcctgaagctgaagaacgacaccggcaacgaccaccccatcagcgtgagcaccagcgagatccagaccagcggctgcaaggtgagcaagaagaccaggatgaagatcgcccagaagaccatgggcagggagggcggcccaagcagcggcgcccctcctcccagcggcggcaggcggcccaagcagcggcgcccctcctcccagcggcggcagcccagccggctccccaacctctaccgaggagggcacctctgagtccgccacccccgagagcggccctggcacctccaccgagcccagcgagggcagcgcacccggcagccctgccggcagccccacctccacagaggagggaaccagcaccgagcccagcgaaggcagcgccccaggcaccagcaccgagcctagtgagcaggagattaaacggatcaacaagatcagaagaagacttgtgaaagacagcaacaccaagaaggccggcaagacaggccccatgaaaaccctgctggttagagtgatgacacccgatctgagagagcggctggaaaacctgagaaagaagcctgaaaatatcccccagcccatcagcaatacatctagagccaacctgaataagctgctgaccgattacaccgaaatgaagaaggcgatcctgcatgtgtactgggaagagttccagaaggaccctgtgggcctgatgagccgggtggcccagcctgccagcaagaagatcgatcagaacaagctgaaacctgagatggacgagaagggcaacctgaccaccgccggctttgcctgctctcagtgtggccagcccctgttcgtgtacaagctggagcaggtgtctgagaagggcaaggcttacaccaactacttcggacggtgcaatgtggccgagcacgaaaagctgatcctgctggcccagctgaagcccgagaaggatagcgacgaagccgtgacatatagcctgggaaagtttgggcagagggccctggatttctacagcattcatgtgaccaaggagtccacccaccccgtgaagcccctggcccagatcgccggaaacagatacgcctccggacctgtgggaaaggccctgagcgacgcatgtatgggcacaatcgcctccttcctgtctaagtaccaggacatcatcatcgaacaccagaaggtggtgaagggcaaccagaagagactggagagcctgcgggagctggccggcaaggaaaacctggaataccctagcgtgaccctgccacctcagcctcacaccaaggagggcgttgatgcctacaacgaagtgatcgcccgggtgcgaatgtgggtgaacctgaacctgtggcagaagctgaagctaagcagagatgatgccaagcctctgctgagactgaagggattcccttcctttcctctggtcgagagacaggccaacgaagtggactggtgggacatggtgtgtaacgtgaagaagctgatcaacgagaaaaaggaggatggcaaggtgttttggcagaatctggctggctacaagagacaggaagccctgagaccatacctgagcagcgaggaagatcggaagaagggaaagaaattcgctcggtaccagctgggcgacctgctgctgcacctggaaaagaagcacggcgaggactggggaaaggtgtacgacgaggcctgggagcggattgacaagaaagtggaaggcctgagcaagcacatcaagctggaagaggaacggagaagcgaggacgcccagagcaaggccgccctgaccgactggctgcgggctaaggccagcttcgtgatcgagggcctgaaggaggccgacaaggacgagttctgcagatgcgagctgaagctgcagaagtggtacggggacctgcggggaaagcccttcgccatcgaagccgagaacagcatcctggacatcagcggcttcagcaagcagtacaactgtgccttcatctggcagaaggacggcgtgaagaagctgaacctgtacctgatcatcaactacttcaagggcggcaagctgcggttcaagaagatcaaacctgaagccttcgaagccaacagattctacaccgtgatcaacaaaaagagcggcgagatcgtgcccatggaggtgaacttcaacttcgacgaccccaacctgatcatcctgcctctggcctttggcaagagacagggcagagaattcatctggaacgacctgctgtccctggaaaccggcagcctgaagctggccaacggaagagtgatcgagaagacactgtacaacagaagaacccggcaggatgagcctgccctgttcgtggccctgaccttcgagcggcgggaggtcctggactcctccaatatcaaaccaatgaacctgatcggcgtggcaagaggcgaaaacatccccgccgtgatcgccctgaccgaccccgagggctgcccactgagccggtttaaggatagcctgggaaacccaacccacatcctgagaatcggcgagagctataaggagaagcagcggaccatccaggccaagaaggaggtggagcagcggagagccggcggctacagccggaagtacgccagcaaagccaagaatctggcagacgatatggtgagaaacaccgctagagatctgctgtactacgccgtgacccaggatgccatgctgatcttcgccaacctgagccggggcttcggccggcagggcaagcggaccttcatggccgagagacagtacacacggatggaggactggctgaccgccaagctggcctacgagggcctgagcaagacctacctgtccaagacactggcccagtacacctccaagacatgcagcaactgtgggtttaccatcaccagcgccgactacgacagggtgctggagaagctgaagaagacagcaacaggctggatgaccacaattaacggcaaggagctgaaggtggagggccagattacctactacaacagatacaagagacagaacgtagtcaaggacctgtccgtcgagctggatagactgagcgaagaatctgtgaacaacgacatctcctcctggacaaagggcagaagcggagaagctctgagcctcctgaagaaaagattctcccatagacccgtgcaggagaagttcgtgtgcctgaactgcggcttcgagacacacgcagccgagcaagccgccctgaacatcgccagatcctggctgttcctgcggagccaggagtacaagaaataccagacaaacaagacaaccggcaacaccgataagagagccttcgtcgagacctggcagtccttttaccggaagaagcttaaggaggtgtggaaacctgccgtgcggtctggcggatctggcggaggctccaccagccccaagaaaaagagaaaagtctaagctgccttctgcggggcttgccttctggccatgcccttcttctctcccttgcacctgtacctcttggtctttgaataaagcctgagtaggaaggctagcaaaaaaaaaaaaaaaaaaaaaaaaaaaaaaaaaaaaaaaaaaaaaaaaaaaaaaaaaaaaaaaaaaaaaaaaaaaaaaaagcccagccggctccccaacctctaccgaggagggcacctctgagtccgccacccccgagagcggccctggcacctccaccgagcccagcgagggcagcgcacccggcagccctgccggcagccccacctccacagaggagggaaccagcaccgagcccagcgaaggcagcgccccaggcaccagcaccgagcctagtgagcaggagattaaacggatcaacaagatcagaagaagacttgtgaaagacagcaacaccaagaaggccggcaagacaggccccatgaaaaccctgctggttagagtgatgacacccgatctgagagagcggctggaaaacctgagaaagaagcctgaaaatatcccccagcccatcagcaatacatctagagccaacctgaataagctgctgaccgattacaccgaaatgaagaaggcgatcctgcatgtgtactgggaagagttccagaaggaccctgtgggcctgatgagccgggtggcccagcctgccagcaagaagatcgatcagaacaagctgaaacctgagatggacgagaagggcaacctgaccaccgccggctttgcctgctctcagtgtggccagcccctgttcgtgtacaagctggagcaggtgtctgagaagggcaaggcttacaccaactacttcggacggtgcaatgtggccgagcacgaaaagctgatcctgctggcccagctgaagcccgagaaggatagcgacgaagccgtgacatatagcctgggaaagtttgggcagagggccctggatttctacagcattcatgtgaccaaggagtccacccaccccgtgaagcccctggcccagatcgccggaaacagatacgcctccggacctgtgggaaaggccctgagcgacgcatgtatgggcacaatcgcctccttcctgtctaagtaccaggacatcatcatcgaacaccagaaggtggtgaagggcaaccagaagagactggagagcctgcgggagctggccggcaaggaaaacctggaataccctagcgtgaccctgccacctcagcctcacaccaaggagggcgttgatgcctacaacgaagtgatcgcccgggtgcgaatgtgggtgaacctgaacctgtggcagaagctgaagctaagcagagatgatgccaagcctctgctgagactgaagggattcccttcctttcctctggtcgagagacaggccaacgaagtggactggtgggacatggtgtgtaacgtgaagaagctgatcaacgagaaaaaggaggatggcaaggtgttttggcagaatctggctggctacaagagacaggaagccctgagaccatacctgagcagcgaggaagatcggaagaagggaaagaaattcgctcggtaccagctgggcgacctgctgctgcacctggaaaagaagcacggcgaggactggggaaaggtgtacgacgaggcctgggagcggattgacaagaaagtggaaggcctgagcaagcacatcaagctggaagaggaacggagaagcgaggacgcccagagcaaggccgccctgaccgactggctgcgggctaaggccagcttcgtgatcgagggcctgaaggaggccgacaaggacgagttctgcagatgcgagctgaagctgcagaagtggtacggggacctgcggggaaagcccttcgccatcgaagccgagaacagcatcctggacatcagcggcttcagcaagcagtacaactgtgccttcatctggcagaaggacggcgtgaagaagctgaacctgtacctgatcatcaactacttcaagggcggcaagctgcggttcaagaagatcaaacctgaagccttcgaagccaacagattctacaccgtgatcaacaaaaagagcggcgagatcgtgcccatggaggtgaacttcaacttcgacgaccccaacctgatcatcctgcctctggcctttggcaagagacagggcagagaattcatctggaacgacctgctgtccctggaaaccggcagcctgaagctggccaacggaagagtgatcgagaagacactgtacaacagaagaacccggcaggatgagcctgccctgttcgtggccctgaccttcgagcggcgggaggtcctggactcctccaatatcaaaccaatgaacctgatcggcgtggcaagaggcgaaaacatccccgccgtgatcgccctgaccgaccccgagggctgcccactgagccggtttaaggatagcctgggaaacccaacccacatcctgagaatcggcgagagctataaggagaagcagcggaccatccaggccaagaaggaggtggagcagcggagagccggcggctacagccggaagtacgccagcaaagccaagaatctggcagacgatatggtgagaaacaccgctagagatctgctgtactacgccgtgacccaggatgccatgctgatcttcgccaacctgagccggggcttcggccggcagggcaagcggaccttcatggccgagagacagtacacacggatggaggactggctgaccgccaagctggcctacgagggcctgagcaagacctacctgtccaagacactggcccagtacacctccaagacatgcagcaactgtgggtttaccatcaccagcgccgactacgacagggtgctggagaagctgaagaagacagcaacaggctggatgaccacaattaacggcaaggagctgaaggtggagggccagattacctactacaacagatacaagagacagaacgtagtcaaggacctgtccgtcgagctggatagactgagcgaagaatctgtgaacaacgacatctcctcctggacaaagggcagaagcggagaagctctgagcctcctgaagaaaagattctcccatagacccgtgcaggagaagttcgtgtgcctgaactgcggcttcgagacacacgcagccgagcaagccgccctgaacatcgccagatcctggctgttcctgcggagccaggagtacaagaaataccagacaaacaagacaaccggcaacaccgataagagagccttcgtcgagacctggcagtccttttaccggaagaagcttaaggaggtgtggaaacctgccgtgcggtctggcggatctggcggaggctccaccagccccaagaaaaagagaaaagtctaagctgccttctgcggggcttgccttctggccatgcccttcttctctcccttgcacctgtacctcttggtctttgaataaagcctgagtaggaaggctagcaaaaaaaaaaaaaaaaaaaaaaaaaaaaaaaaaaaaaaaaaaaaaaaaaaaaaaaaaaaaaaaaaaaaaaaaaaaaaaaa

SEQ ID NO: 10501 - RNA, 8787 nt, synthetic construct
  source 1..8787: mol_type = other RNA
aggaaataagagagaaaagaagagtaagaagaaatataagagccaccatggcccctaagaagaagcgtaaagtgagccggatgaaccacgaccaggagttcgacccccctaaggtgtaccctcccgtccccgccgagaagagaaagcccatccgggtcctgagcctgttcgatggcatcgccaccggtctgctggtgctgaaggacctgggcatccaggtggataggtacattgcctccgaggtgtgcgaggactccatcaccgtgggaatggtgcgtcatcagggcaagatcatgtacgtgggcgacgtgcggagcgtgacacagaagcatatccaggagtggggccctttcgacctggtgatcggcggcagcccttgcaatgacctgagcatcgtgaacccagcccggaagggcctgtacgagggaaccggcagactgttcttcgagttttacagactgctgcacgacgcccggcctaaggaaggcgacgaccggcccttcttttggctgttcgagaatgtggtggccatgggagtcagcgacaagcgggatattagccggttcctggagagcaaccccgtgatgatcgatgccaaggaagtgagcgccgcccaccgggccagatacttctggggcaatctgcctggcatgaacagacccctggccagcaccgtgaacgacaagctggagctgcaggagtgcctggagcacggccggatcgccaagttcagcaaggtgagaaccatcaccacccgaagcaacagcatcaaacaaggcaaggaccagcactttcctgtgttcatgaacgagaaggaggacatcctgtggtgtaccgagatggagagagtgttcgggttcccagtccactacacagatgtcagcaacatgtctagactggccagacagagactgctgggaagaagctggtccgtccctgtgatcagacacctgttcgcccctctgaaggagtacttcgcctgcgtgagcagcggcaacagcaacgccaacagccggggccccagcttctctagcggcctggtgccactgtccctgagagggagccacatgggccccatggagatctacaaaaccgtgagcgcctggaagcggcagcctgtgcgcgtgctgagcctgtttcggaatatcgataaagtcctgaaaagcctgggattcctggagagcggctctggctccggcggtggcaccctgaagtacgtggaggatgtgacaaacgtggtcagacgggatgtggagaagtggggccccttcgatctggtgtacggcagcacccaacccctgggcagctcttgtgaccggtgccctggctggtacatgtttcagttccaccggatcctgcagtacgccctgccgagacaggagtcccagcggccattcttttggattttcatggacaacttgctgctgaccgaggatgaccaggaaactaccactcggttcctgcagaccgaagccgtgaccctgcaggacgtgagaggccgggactaccagaacgccatgcgggtgtggtccaacatccctggactgaaaagcaagcacgcacctctgacccctaaagaagaggagtacctgcaggcccaggtgcggagcagaagcaagctggacgcccctaaggtggatctgctggtgaagaattgcctcctgcccctgagagagtacttcaagtatttcagccagaatagtctgcccctgggaggcagcggcggcggcatgagccaggtgaccttcagcgacgtggccatcgacttcagccacgaggagtgggcctgcctggacagcgcccagagggacctgtacaaggacgtgatggtgcagaactacgagaacctggtgagcgtgggcctgagcatcaccaagccctacgtgatcatgctgctggaggacggcaaggagccctggatgatggagaagaagctgagcaaggtgtaccccttccccctgagccacagcgtgggcggcccaagcagcggcgcccctcctcccagcggcggcaggcggcccaagcagcggcgcccctcctcccagcggcggcagcccagccggctccccaacctctaccgaggagggcacctctgagtccgccacccccgagagcggccctggcacctccaccgagcccagcgagggcagcgcacccggcagccctgccggcagccccacctccacagaggagggaaccagcaccgagcccagcgaaggcagcgccccaggcaccagcaccgagcctagtgagcaggagattaaacggatcaacaagatcagaagaagacttgtgaaagacagcaacaccaagaaggccggcaagacaggccccatgaaaaccctgctggttagagtgatgacacccgatctgagagagcggctggaaaacctgagaaagaagcctgaaaatatcccccagcccatcagcaatacatctagagccaacctgaataagctgctgaccgattacaccgaaatgaagaaggcgatcctgcatgtgtactgggaagagttccagaaggaccctgtgggcctgatgagccgggtggcccagcctgccagcaagaagatcgatcagaacaagctgaaacctgagatggacgagaagggcaacctgaccaccgccggctttgcctgctctcagtgtggccagcccctgttcgtgtacaagctggagcaggtgtctgagaagggcaaggcttacaccaactacttcggacggtgcaatgtggccgagcacgaaaagctgatcctgctggcccagctgaagcccgagaaggatagcgacgaagccgtgacatatagcctgggaaagtttgggcagagggccctggatttctacagcattcatgtgaccaaggagtccacccaccccgtgaagcccctggcccagatcgccggaaacagatacgcctccggacctgtgggaaaggccctgagcgacgcatgtatgggcacaatcgcctccttcctgtctaagtaccaggacatcatcatcgaacaccagaaggtggtgaagggcaaccagaagagactggagagcctgcgggagctggccggcaaggaaaacctggaataccctagcgtgaccctgccacctcagcctcacaccaaggagggcgttgatgcctacaacgaagtgatcgcccgggtgcgaatgtgggtgaacctgaacctgtggcagaagctgaagctaagcagagatgatgccaagcctctgctgagactgaagggattcccttcctttcctctggtcgagagacaggccaacgaagtggactggtgggacatggtgtgtaacgtgaagaagctgatcaacgagaaaaaggaggatggcaaggtgttttggcagaatctggctggctacaagagacaggaagccctgagaccatacctgagcagcgaggaagatcggaagaagggaaagaaattcgctcggtaccagctgggcgacctgctgctgcacctggaaaagaagcacggcgaggactggggaaaggtgtacgacgaggcctgggagcggattgacaagaaagtggaaggcctgagcaagcacatcaagctggaagaggaacggagaagcgaggacgcccagagcaaggccgccctgaccgactggctgcgggctaaggccagcttcgtgatcgagggcctgaaggaggccgacaaggacgagttctgcagatgcgagctgaagctgcagaagtggtacggggacctgcggggaaagcccttcgccatcgaagccgagaacagcatcctggacatcagcggcttcagcaagcagtacaactgtgccttcatctggcagaaggacggcgtgaagaagctgaacctgtacctgatcatcaactacttcaagggcggcaagctgcggttcaagaagatcaaacctgaagccttcgaagccaacagattctacaccgtgatcaacaaaaagagcggcgagatcgtgcccatggaggtgaacttcaacttcgacgaccccaacctgatcatcctgcctctggcctttggcaagagacagggcagagaattcatctggaacgacctgctgtccctggaaaccggcagcctgaagctggccaacggaagagtgatcgagaagacactgtacaacagaagaacccggcaggatgagcctgccctgttcgtggccctgaccttcgagcggcgggaggtcctggactcctccaatatcaaaccaatgaacctgatcggcgtggcaagaggcgaaaacatccccgccgtgatcgccctgaccgaccccgagggctgcccactgagccggtttaaggatagcctgggaaacccaacccacatcctgagaatcggcgagagctataaggagaagcagcggaccatccaggccaagaaggaggtggagcagcggagagccggcggctacagccggaagtacgccagcaaagccaagaatctggcagacgatatggtgagaaacaccgctagagatctgctgtactacgccgtgacccaggatgccatgctgatcttcgccaacctgagccggggcttcggccggcagggcaagcggaccttcatggccgagagacagtacacacggatggaggactggctgaccgccaagctggcctacgagggcctgagcaagacctacctgtccaagacactggcccagtacacctccaagacatgcagcaactgtgggtttaccatcaccagcgccgactacgacagggtgctggagaagctgaagaagacagcaacaggctggatgaccacaattaacggcaaggagctgaaggtggagggccagattacctactacaacagatacaagagacagaacgtagtcaaggacctgtccgtcgagctggatagactgagcgaagaatctgtgaacaacgacatctcctcctggacaaagggcagaagcggagaagctctgagcctcctgaagaaaagattctcccatagacccgtgcaggagaagttcgtgtgcctgaactgcggcttcgagacacacgcagccgagcaagccgccctgaacatcgccagatcctggctgttcctgcggagccaggagtacaagaaataccagacaaacaagacaaccggcaacaccgataagagagccttcgtcgagacctggcagtccttttaccggaagaagcttaaggaggtgtggaaacctgccgtgcggtctggcggatctggcggaggctccaccagccccaagaaaaagagaaaagtctaagctgccttctgcggggcttgccttctggccatgcccttcttctctcccttgcacctgtacctcttggtctttgaataaagcctgagtaggaaggctagcaaaaaaaaaaaaaaaaaaaaaaaaaaaaaaaaaaaaaaaaaaaaaaaaaaaaaaaaaaaaaaaaaaaaaaaaaaaaaaaagcccagccggctccccaacctctaccgaggagggcacctctgagtccgccacccccgagagcggccctggcacctccaccgagcccagcgagggcagcgcacccggcagccctgccggcagccccacctccacagaggagggaaccagcaccgagcccagcgaaggcagcgccccaggcaccagcaccgagcctagtgagcaggagattaaacggatcaacaagatcagaagaagacttgtgaaagacagcaacaccaagaaggccggcaagacaggccccatgaaaaccctgctggttagagtgatgacacccgatctgagagagcggctggaaaacctgagaaagaagcctgaaaatatcccccagcccatcagcaatacatctagagccaacctgaataagctgctgaccgattacaccgaaatgaagaaggcgatcctgcatgtgtactgggaagagttccagaaggaccctgtgggcctgatgagccgggtggcccagcctgccagcaagaagatcgatcagaacaagctgaaacctgagatggacgagaagggcaacctgaccaccgccggctttgcctgctctcagtgtggccagcccctgttcgtgtacaagctggagcaggtgtctgagaagggcaaggcttacaccaactacttcggacggtgcaatgtggccgagcacgaaaagctgatcctgctggcccagctgaagcccgagaaggatagcgacgaagccgtgacatatagcctgggaaagtttgggcagagggccctggatttctacagcattcatgtgaccaaggagtccacccaccccgtgaagcccctggcccagatcgccggaaacagatacgcctccggacctgtgggaaaggccctgagcgacgcatgtatgggcacaatcgcctccttcctgtctaagtaccaggacatcatcatcgaacaccagaaggtggtgaagggcaaccagaagagactggagagcctgcgggagctggccggcaaggaaaacctggaataccctagcgtgaccctgccacctcagcctcacaccaaggagggcgttgatgcctacaacgaagtgatcgcccgggtgcgaatgtgggtgaacctgaacctgtggcagaagctgaagctaagcagagatgatgccaagcctctgctgagactgaagggattcccttcctttcctctggtcgagagacaggccaacgaagtggactggtgggacatggtgtgtaacgtgaagaagctgatcaacgagaaaaaggaggatggcaaggtgttttggcagaatctggctggctacaagagacaggaagccctgagaccatacctgagcagcgaggaagatcggaagaagggaaagaaattcgctcggtaccagctgggcgacctgctgctgcacctggaaaagaagcacggcgaggactggggaaaggtgtacgacgaggcctgggagcggattgacaagaaagtggaaggcctgagcaagcacatcaagctggaagaggaacggagaagcgaggacgcccagagcaaggccgccctgaccgactggctgcgggctaaggccagcttcgtgatcgagggcctgaaggaggccgacaaggacgagttctgcagatgcgagctgaagctgcagaagtggtacggggacctgcggggaaagcccttcgccatcgaagccgagaacagcatcctggacatcagcggcttcagcaagcagtacaactgtgccttcatctggcagaaggacggcgtgaagaagctgaacctgtacctgatcatcaactacttcaagggcggcaagctgcggttcaagaagatcaaacctgaagccttcgaagccaacagattctacaccgtgatcaacaaaaagagcggcgagatcgtgcccatggaggtgaacttcaacttcgacgaccccaacctgatcatcctgcctctggcctttggcaagagacagggcagagaattcatctggaacgacctgctgtccctggaaaccggcagcctgaagctggccaacggaagagtgatcgagaagacactgtacaacagaagaacccggcaggatgagcctgccctgttcgtggccctgaccttcgagcggcgggaggtcctggactcctccaatatcaaaccaatgaacctgatcggcgtggcaagaggcgaaaacatccccgccgtgatcgccctgaccgaccccgagggctgcccactgagccggtttaaggatagcctgggaaacccaacccacatcctgagaatcggcgagagctataaggagaagcagcggaccatccaggccaagaaggaggtggagcagcggagagccggcggctacagccggaagtacgccagcaaagccaagaatctggcagacgatatggtgagaaacaccgctagagatctgctgtactacgccgtgacccaggatgccatgctgatcttcgccaacctgagccggggcttcggccggcagggcaagcggaccttcatggccgagagacagtacacacggatggaggactggctgaccgccaagctggcctacgagggcctgagcaagacctacctgtccaagacactggcccagtacacctccaagacatgcagcaactgtgggtttaccatcaccagcgccgactacgacagggtgctggagaagctgaagaagacagcaacaggctggatgaccacaattaacggcaaggagctgaaggtggagggccagattacctactacaacagatacaagagacagaacgtagtcaaggacctgtccgtcgagctggatagactgagcgaagaatctgtgaacaacgacatctcctcctggacaaagggcagaagcggagaagctctgagcctcctgaagaaaagattctcccatagacccgtgcaggagaagttcgtgtgcctgaactgcggcttcgagacacacgcagccgagcaagccgccctgaacatcgccagatcctggctgttcctgcggagccaggagtacaagaaataccagacaaacaagacaaccggcaacaccgataagagagccttcgtcgagacctggcagtccttttaccggaagaagcttaaggaggtgtggaaacctgccgtgcggtctggcggatctggcggaggctccaccagccccaagaaaaagagaaaagtctaagctgccttctgcggggcttgccttctggccatgcccttcttctctcccttgcacctgtacctcttggtctttgaataaagcctgagtaggaaggctagcaaaaaaaaaaaaaaaaaaaaaaaaaaaaaaaaaaaaaaaaaaaaaaaaaaaaaaaaaaaaaaaaaaaaaaaaaaaaaaaa

SEQ ID NO: 10502 - RNA, 8787 nt, synthetic construct
  source 1..8787: mol_type = other RNA
aggaaataagagagaaaagaagagtaagaagaaatataagagccaccatggcccctaagaagaagcgtaaagtgagccggatgaaccacgaccaggagttcgacccccctaaggtgtaccctcccgtccccgccgagaagagaaagcccatccgggtcctgagcctgttcgatggcatcgccaccggtctgctggtgctgaaggacctgggcatccaggtggataggtacattgcctccgaggtgtgcgaggactccatcaccgtgggaatggtgcgtcatcagggcaagatcatgtacgtgggcgacgtgcggagcgtgacacagaagcatatccaggagtggggccctttcgacctggtgatcggcggcagcccttgcaatgacctgagcatcgtgaacccagcccggaagggcctgtacgagggaaccggcagactgttcttcgagttttacagactgctgcacgacgcccggcctaaggaaggcgacgaccggcccttcttttggctgttcgagaatgtggtggccatgggagtcagcgacaagcgggatattagccggttcctggagagcaaccccgtgatgatcgatgccaaggaagtgagcgccgcccaccgggccagatacttctggggcaatctgcctggcatgaacagacccctggccagcaccgtgaacgacaagctggagctgcaggagtgcctggagcacggccggatcgccaagttcagcaaggtgagaaccatcaccacccgaagcaacagcatcaaacaaggcaaggaccagcactttcctgtgttcatgaacgagaaggaggacatcctgtggtgtaccgagatggagagagtgttcgggttcccagtccactacacagatgtcagcaacatgtctagactggccagacagagactgctgggaagaagctggtccgtccctgtgatcagacacctgttcgcccctctgaaggagtacttcgcctgcgtgagcagcggcaacagcaacgccaacagccggggccccagcttctctagcggcctggtgccactgtccctgagagggagccacatgggccccatggagatctacaaaaccgtgagcgcctggaagcggcagcctgtgcgcgtgctgagcctgtttcggaatatcgataaagtcctgaaaagcctgggattcctggagagcggctctggctccggcggtggcaccctgaagtacgtggaggatgtgacaaacgtggtcagacgggatgtggagaagtggggccccttcgatctggtgtacggcagcacccaacccctgggcagctcttgtgaccggtgccctggctggtacatgtttcagttccaccggatcctgcagtacgccctgccgagacaggagtcccagcggccattcttttggattttcatggacaacttgctgctgaccgaggatgaccaggaaactaccactcggttcctgcagaccgaagccgtgaccctgcaggacgtgagaggccgggactaccagaacgccatgcgggtgtggtccaacatccctggactgaaaagcaagcacgcacctctgacccctaaagaagaggagtacctgcaggcccaggtgcggagcagaagcaagctggacgcccctaaggtggatctgctggtgaagaattgcctcctgcccctgagagagtacttcaagtatttcagccagaatagtctgcccctgggaggcagcggcggcggcacccagatgcaggtgaagttcgacgacatcgccgtgagcttcagccaggaggagtggaagtacctggacgaggagcagaaggagctgtacagggaggtgatgaaggagaactaccagatcctgatcagcctgggcaccggcagcagcaccacccccaagatcatcagccacatcgagaggggcgaggagccctacatcagggacgagcccgtgctggtggagaggaagaccggcaagagcagcggcggcccaagcagcggcgcccctcctcccagcggcggcaggcggcccaagcagcggcgcccctcctcccagcggcggcagcccagccggctccccaacctctaccgaggagggcacctctgagtccgccacccccgagagcggccctggcacctccaccgagcccagcgagggcagcgcacccggcagccctgccggcagccccacctccacagaggagggaaccagcaccgagcccagcgaaggcagcgccccaggcaccagcaccgagcctagtgagcaggagattaaacggatcaacaagatcagaagaagacttgtgaaagacagcaacaccaagaaggccggcaagacaggccccatgaaaaccctgctggttagagtgatgacacccgatctgagagagcggctggaaaacctgagaaagaagcctgaaaatatcccccagcccatcagcaatacatctagagccaacctgaataagctgctgaccgattacaccgaaatgaagaaggcgatcctgcatgtgtactgggaagagttccagaaggaccctgtgggcctgatgagccgggtggcccagcctgccagcaagaagatcgatcagaacaagctgaaacctgagatggacgagaagggcaacctgaccaccgccggctttgcctgctctcagtgtggccagcccctgttcgtgtacaagctggagcaggtgtctgagaagggcaaggcttacaccaactacttcggacggtgcaatgtggccgagcacgaaaagctgatcctgctggcccagctgaagcccgagaaggatagcgacgaagccgtgacatatagcctgggaaagtttgggcagagggccctggatttctacagcattcatgtgaccaaggagtccacccaccccgtgaagcccctggcccagatcgccggaaacagatacgcctccggacctgtgggaaaggccctgagcgacgcatgtatgggcacaatcgcctccttcctgtctaagtaccaggacatcatcatcgaacaccagaaggtggtgaagggcaaccagaagagactggagagcctgcgggagctggccggcaaggaaaacctggaataccctagcgtgaccctgccacctcagcctcacaccaaggagggcgttgatgcctacaacgaagtgatcgcccgggtgcgaatgtgggtgaacctgaacctgtggcagaagctgaagctaagcagagatgatgccaagcctctgctgagactgaagggattcccttcctttcctctggtcgagagacaggccaacgaagtggactggtgggacatggtgtgtaacgtgaagaagctgatcaacgagaaaaaggaggatggcaaggtgttttggcagaatctggctggctacaagagacaggaagccctgagaccatacctgagcagcgaggaagatcggaagaagggaaagaaattcgctcggtaccagctgggcgacctgctgctgcacctggaaaagaagcacggcgaggactggggaaaggtgtacgacgaggcctgggagcggattgacaagaaagtggaaggcctgagcaagcacatcaagctggaagaggaacggagaagcgaggacgcccagagcaaggccgccctgaccgactggctgcgggctaaggccagcttcgtgatcgagggcctgaaggaggccgacaaggacgagttctgcagatgcgagctgaagctgcagaagtggtacggggacctgcggggaaagcccttcgccatcgaagccgagaacagcatcctggacatcagcggcttcagcaagcagtacaactgtgccttcatctggcagaaggacggcgtgaagaagctgaacctgtacctgatcatcaactacttcaagggcggcaagctgcggttcaagaagatcaaacctgaagccttcgaagccaacagattctacaccgtgatcaacaaaaagagcggcgagatcgtgcccatggaggtgaacttcaacttcgacgaccccaacctgatcatcctgcctctggcctttggcaagagacagggcagagaattcatctggaacgacctgctgtccctggaaaccggcagcctgaagctggccaacggaagagtgatcgagaagacactgtacaacagaagaacccggcaggatgagcctgccctgttcgtggccctgaccttcgagcggcgggaggtcctggactcctccaatatcaaaccaatgaacctgatcggcgtggcaagaggcgaaaacatccccgccgtgatcgccctgaccgaccccgagggctgcccactgagccggtttaaggatagcctgggaaacccaacccacatcctgagaatcggcgagagctataaggagaagcagcggaccatccaggccaagaaggaggtggagcagcggagagccggcggctacagccggaagtacgccagcaaagccaagaatctggcagacgatatggtgagaaacaccgctagagatctgctgtactacgccgtgacccaggatgccatgctgatcttcgccaacctgagccggggcttcggccggcagggcaagcggaccttcatggccgagagacagtacacacggatggaggactggctgaccgccaagctggcctacgagggcctgagcaagacctacctgtccaagacactggcccagtacacctccaagacatgcagcaactgtgggtttaccatcaccagcgccgactacgacagggtgctggagaagctgaagaagacagcaacaggctggatgaccacaattaacggcaaggagctgaaggtggagggccagattacctactacaacagatacaagagacagaacgtagtcaaggacctgtccgtcgagctggatagactgagcgaagaatctgtgaacaacgacatctcctcctggacaaagggcagaagcggagaagctctgagcctcctgaagaaaagattctcccatagacccgtgcaggagaagttcgtgtgcctgaactgcggcttcgagacacacgcagccgagcaagccgccctgaacatcgccagatcctggctgttcctgcggagccaggagtacaagaaataccagacaaacaagacaaccggcaacaccgataagagagccttcgtcgagacctggcagtccttttaccggaagaagcttaaggaggtgtggaaacctgccgtgcggtctggcggatctggcggaggctccaccagccccaagaaaaagagaaaagtctaagctgccttctgcggggcttgccttctggccatgcccttcttctctcccttgcacctgtacctcttggtctttgaataaagcctgagtaggaaggctagcaaaaaaaaaaaaaaaaaaaaaaaaaaaaaaaaaaaaaaaaaaaaaaaaaaaaaaaaaaaaaaaaaaaaaaaaaaaaaaaagcccagccggctccccaacctctaccgaggagggcacctctgagtccgccacccccgagagcggccctggcacctccaccgagcccagcgagggcagcgcacccggcagccctgccggcagccccacctccacagaggagggaaccagcaccgagcccagcgaaggcagcgccccaggcaccagcaccgagcctagtgagcaggagattaaacggatcaacaagatcagaagaagacttgtgaaagacagcaacaccaagaaggccggcaagacaggccccatgaaaaccctgctggttagagtgatgacacccgatctgagagagcggctggaaaacctgagaaagaagcctgaaaatatcccccagcccatcagcaatacatctagagccaacctgaataagctgctgaccgattacaccgaaatgaagaaggcgatcctgcatgtgtactgggaagagttccagaaggaccctgtgggcctgatgagccgggtggcccagcctgccagcaagaagatcgatcagaacaagctgaaacctgagatggacgagaagggcaacctgaccaccgccggctttgcctgctctcagtgtggccagcccctgttcgtgtacaagctggagcaggtgtctgagaagggcaaggcttacaccaactacttcggacggtgcaatgtggccgagcacgaaaagctgatcctgctggcccagctgaagcccgagaaggatagcgacgaagccgtgacatatagcctgggaaagtttgggcagagggccctggatttctacagcattcatgtgaccaaggagtccacccaccccgtgaagcccctggcccagatcgccggaaacagatacgcctccggacctgtgggaaaggccctgagcgacgcatgtatgggcacaatcgcctccttcctgtctaagtaccaggacatcatcatcgaacaccagaaggtggtgaagggcaaccagaagagactggagagcctgcgggagctggccggcaaggaaaacctggaataccctagcgtgaccctgccacctcagcctcacaccaaggagggcgttgatgcctacaacgaagtgatcgcccgggtgcgaatgtgggtgaacctgaacctgtggcagaagctgaagctaagcagagatgatgccaagcctctgctgagactgaagggattcccttcctttcctctggtcgagagacaggccaacgaagtggactggtgggacatggtgtgtaacgtgaagaagctgatcaacgagaaaaaggaggatggcaaggtgttttggcagaatctggctggctacaagagacaggaagccctgagaccatacctgagcagcgaggaagatcggaagaagggaaagaaattcgctcggtaccagctgggcgacctgctgctgcacctggaaaagaagcacggcgaggactggggaaaggtgtacgacgaggcctgggagcggattgacaagaaagtggaaggcctgagcaagcacatcaagctggaagaggaacggagaagcgaggacgcccagagcaaggccgccctgaccgactggctgcgggctaaggccagcttcgtgatcgagggcctgaaggaggccgacaaggacgagttctgcagatgcgagctgaagctgcagaagtggtacggggacctgcggggaaagcccttcgccatcgaagccgagaacagcatcctggacatcagcggcttcagcaagcagtacaactgtgccttcatctggcagaaggacggcgtgaagaagctgaacctgtacctgatcatcaactacttcaagggcggcaagctgcggttcaagaagatcaaacctgaagccttcgaagccaacagattctacaccgtgatcaacaaaaagagcggcgagatcgtgcccatggaggtgaacttcaacttcgacgaccccaacctgatcatcctgcctctggcctttggcaagagacagggcagagaattcatctggaacgacctgctgtccctggaaaccggcagcctgaagctggccaacggaagagtgatcgagaagacactgtacaacagaagaacccggcaggatgagcctgccctgttcgtggccctgaccttcgagcggcgggaggtcctggactcctccaatatcaaaccaatgaacctgatcggcgtggcaagaggcgaaaacatccccgccgtgatcgccctgaccgaccccgagggctgcccactgagccggtttaaggatagcctgggaaacccaacccacatcctgagaatcggcgagagctataaggagaagcagcggaccatccaggccaagaaggaggtggagcagcggagagccggcggctacagccggaagtacgccagcaaagccaagaatctggcagacgatatggtgagaaacaccgctagagatctgctgtactacgccgtgacccaggatgccatgctgatcttcgccaacctgagccggggcttcggccggcagggcaagcggaccttcatggccgagagacagtacacacggatggaggactggctgaccgccaagctggcctacgagggcctgagcaagacctacctgtccaagacactggcccagtacacctccaagacatgcagcaactgtgggtttaccatcaccagcgccgactacgacagggtgctggagaagctgaagaagacagcaacaggctggatgaccacaattaacggcaaggagctgaaggtggagggccagattacctactacaacagatacaagagacagaacgtagtcaaggacctgtccgtcgagctggatagactgagcgaagaatctgtgaacaacgacatctcctcctggacaaagggcagaagcggagaagctctgagcctcctgaagaaaagattctcccatagacccgtgcaggagaagttcgtgtgcctgaactgcggcttcgagacacacgcagccgagcaagccgccctgaacatcgccagatcctggctgttcctgcggagccaggagtacaagaaataccagacaaacaagacaaccggcaacaccgataagagagccttcgtcgagacctggcagtccttttaccggaagaagcttaaggaggtgtggaaacctgccgtgcggtctggcggatctggcggaggctccaccagccccaagaaaaagagaaaagtctaagctgccttctgcggggcttgccttctggccatgcccttcttctctcccttgcacctgtacctcttggtctttgaataaagcctgagtaggaaggctagcaaaaaaaaaaaaaaaaaaaaaaaaaaaaaaaaaaaaaaaaaaaaaaaaaaaaaaaaaaaaaaaaaaaaaaaaaaaaaaaa

SEQ ID NO: 10503 - RNA, 8787 nt, synthetic construct
  source 1..8787: mol_type = other RNA
aggaaataagagagaaaagaagagtaagaagaaatataagagccaccatggcccctaagaagaagcgtaaagtgagccggatgaaccacgaccaggagttcgacccccctaaggtgtaccctcccgtccccgccgagaagagaaagcccatccgggtcctgagcctgttcgatggcatcgccaccggtctgctggtgctgaaggacctgggcatccaggtggataggtacattgcctccgaggtgtgcgaggactccatcaccgtgggaatggtgcgtcatcagggcaagatcatgtacgtgggcgacgtgcggagcgtgacacagaagcatatccaggagtggggccctttcgacctggtgatcggcggcagcccttgcaatgacctgagcatcgtgaacccagcccggaagggcctgtacgagggaaccggcagactgttcttcgagttttacagactgctgcacgacgcccggcctaaggaaggcgacgaccggcccttcttttggctgttcgagaatgtggtggccatgggagtcagcgacaagcgggatattagccggttcctggagagcaaccccgtgatgatcgatgccaaggaagtgagcgccgcccaccgggccagatacttctggggcaatctgcctggcatgaacagacccctggccagcaccgtgaacgacaagctggagctgcaggagtgcctggagcacggccggatcgccaagttcagcaaggtgagaaccatcaccacccgaagcaacagcatcaaacaaggcaaggaccagcactttcctgtgttcatgaacgagaaggaggacatcctgtggtgtaccgagatggagagagtgttcgggttcccagtccactacacagatgtcagcaacatgtctagactggccagacagagactgctgggaagaagctggtccgtccctgtgatcagacacctgttcgcccctctgaaggagtacttcgcctgcgtgagcagcggcaacagcaacgccaacagccggggccccagcttctctagcggcctggtgccactgtccctgagagggagccacatgggccccatggagatctacaaaaccgtgagcgcctggaagcggcagcctgtgcgcgtgctgagcctgtttcggaatatcgataaagtcctgaaaagcctgggattcctggagagcggctctggctccggcggtggcaccctgaagtacgtggaggatgtgacaaacgtggtcagacgggatgtggagaagtggggccccttcgatctggtgtacggcagcacccaacccctgggcagctcttgtgaccggtgccctggctggtacatgtttcagttccaccggatcctgcagtacgccctgccgagacaggagtcccagcggccattcttttggattttcatggacaacttgctgctgaccgaggatgaccaggaaactaccactcggttcctgcagaccgaagccgtgaccctgcaggacgtgagaggccgggactaccagaacgccatgcgggtgtggtccaacatccctggactgaaaagcaagcacgcacctctgacccctaaagaagaggagtacctgcaggcccaggtgcggagcagaagcaagctggacgcccctaaggtggatctgctggtgaagaattgcctcctgcccctgagagagtacttcaagtatttcagccagaatagtctgcccctgggaggcagcggcggcggcatgaccctgctgaccttcagggacgtggccatcgagttcagcctggaggagtggaagtgcctggacctggcccagcagaacctgtacagggacgtgatgctggagaactacaggaacctgttcagcatcggcctgaccgtgagcaagcccggcctgatcacctgcctggagcagaggaaggagccctggaacgtgaagaggcaggaggccgtggacggccaccccggctggtgcagcggcgtgggcggcccaagcagcggcgcccctcctcccagcggcggcaggcggcccaagcagcggcgcccctcctcccagcggcggcagcccagccggctccccaacctctaccgaggagggcacctctgagtccgccacccccgagagcggccctggcacctccaccgagcccagcgagggcagcgcacccggcagccctgccggcagccccacctccacagaggagggaaccagcaccgagcccagcgaaggcagcgccccaggcaccagcaccgagcctagtgagcaggagattaaacggatcaacaagatcagaagaagacttgtgaaagacagcaacaccaagaaggccggcaagacaggccccatgaaaaccctgctggttagagtgatgacacccgatctgagagagcggctggaaaacctgagaaagaagcctgaaaatatcccccagcccatcagcaatacatctagagccaacctgaataagctgctgaccgattacaccgaaatgaagaaggcgatcctgcatgtgtactgggaagagttccagaaggaccctgtgggcctgatgagccgggtggcccagcctgccagcaagaagatcgatcagaacaagctgaaacctgagatggacgagaagggcaacctgaccaccgccggctttgcctgctctcagtgtggccagcccctgttcgtgtacaagctggagcaggtgtctgagaagggcaaggcttacaccaactacttcggacggtgcaatgtggccgagcacgaaaagctgatcctgctggcccagctgaagcccgagaaggatagcgacgaagccgtgacatatagcctgggaaagtttgggcagagggccctggatttctacagcattcatgtgaccaaggagtccacccaccccgtgaagcccctggcccagatcgccggaaacagatacgcctccggacctgtgggaaaggccctgagcgacgcatgtatgggcacaatcgcctccttcctgtctaagtaccaggacatcatcatcgaacaccagaaggtggtgaagggcaaccagaagagactggagagcctgcgggagctggccggcaaggaaaacctggaataccctagcgtgaccctgccacctcagcctcacaccaaggagggcgttgatgcctacaacgaagtgatcgcccgggtgcgaatgtgggtgaacctgaacctgtggcagaagctgaagctaagcagagatgatgccaagcctctgctgagactgaagggattcccttcctttcctctggtcgagagacaggccaacgaagtggactggtgggacatggtgtgtaacgtgaagaagctgatcaacgagaaaaaggaggatggcaaggtgttttggcagaatctggctggctacaagagacaggaagccctgagaccatacctgagcagcgaggaagatcggaagaagggaaagaaattcgctcggtaccagctgggcgacctgctgctgcacctggaaaagaagcacggcgaggactggggaaaggtgtacgacgaggcctgggagcggattgacaagaaagtggaaggcctgagcaagcacatcaagctggaagaggaacggagaagcgaggacgcccagagcaaggccgccctgaccgactggctgcgggctaaggccagcttcgtgatcgagggcctgaaggaggccgacaaggacgagttctgcagatgcgagctgaagctgcagaagtggtacggggacctgcggggaaagcccttcgccatcgaagccgagaacagcatcctggacatcagcggcttcagcaagcagtacaactgtgccttcatctggcagaaggacggcgtgaagaagctgaacctgtacctgatcatcaactacttcaagggcggcaagctgcggttcaagaagatcaaacctgaagccttcgaagccaacagattctacaccgtgatcaacaaaaagagcggcgagatcgtgcccatggaggtgaacttcaacttcgacgaccccaacctgatcatcctgcctctggcctttggcaagagacagggcagagaattcatctggaacgacctgctgtccctggaaaccggcagcctgaagctggccaacggaagagtgatcgagaagacactgtacaacagaagaacccggcaggatgagcctgccctgttcgtggccctgaccttcgagcggcgggaggtcctggactcctccaatatcaaaccaatgaacctgatcggcgtggcaagaggcgaaaacatccccgccgtgatcgccctgaccgaccccgagggctgcccactgagccggtttaaggatagcctgggaaacccaacccacatcctgagaatcggcgagagctataaggagaagcagcggaccatccaggccaagaaggaggtggagcagcggagagccggcggctacagccggaagtacgccagcaaagccaagaatctggcagacgatatggtgagaaacaccgctagagatctgctgtactacgccgtgacccaggatgccatgctgatcttcgccaacctgagccggggcttcggccggcagggcaagcggaccttcatggccgagagacagtacacacggatggaggactggctgaccgccaagctggcctacgagggcctgagcaagacctacctgtccaagacactggcccagtacacctccaagacatgcagcaactgtgggtttaccatcaccagcgccgactacgacagggtgctggagaagctgaagaagacagcaacaggctggatgaccacaattaacggcaaggagctgaaggtggagggccagattacctactacaacagatacaagagacagaacgtagtcaaggacctgtccgtcgagctggatagactgagcgaagaatctgtgaacaacgacatctcctcctggacaaagggcagaagcggagaagctctgagcctcctgaagaaaagattctcccatagacccgtgcaggagaagttcgtgtgcctgaactgcggcttcgagacacacgcagccgagcaagccgccctgaacatcgccagatcctggctgttcctgcggagccaggagtacaagaaataccagacaaacaagacaaccggcaacaccgataagagagccttcgtcgagacctggcagtccttttaccggaagaagcttaaggaggtgtggaaacctgccgtgcggtctggcggatctggcggaggctccaccagccccaagaaaaagagaaaagtctaagctgccttctgcggggcttgccttctggccatgcccttcttctctcccttgcacctgtacctcttggtctttgaataaagcctgagtaggaaggctagcaaaaaaaaaaaaaaaaaaaaaaaaaaaaaaaaaaaaaaaaaaaaaaaaaaaaaaaaaaaaaaaaaaaaaaaaaaaaaaaagcccagccggctccccaacctctaccgaggagggcacctctgagtccgccacccccgagagcggccctggcacctccaccgagcccagcgagggcagcgcacccggcagccctgccggcagccccacctccacagaggagggaaccagcaccgagcccagcgaaggcagcgccccaggcaccagcaccgagcctagtgagcaggagattaaacggatcaacaagatcagaagaagacttgtgaaagacagcaacaccaagaaggccggcaagacaggccccatgaaaaccctgctggttagagtgatgacacccgatctgagagagcggctggaaaacctgagaaagaagcctgaaaatatcccccagcccatcagcaatacatctagagccaacctgaataagctgctgaccgattacaccgaaatgaagaaggcgatcctgcatgtgtactgggaagagttccagaaggaccctgtgggcctgatgagccgggtggcccagcctgccagcaagaagatcgatcagaacaagctgaaacctgagatggacgagaagggcaacctgaccaccgccggctttgcctgctctcagtgtggccagcccctgttcgtgtacaagctggagcaggtgtctgagaagggcaaggcttacaccaactacttcggacggtgcaatgtggccgagcacgaaaagctgatcctgctggcccagctgaagcccgagaaggatagcgacgaagccgtgacatatagcctgggaaagtttgggcagagggccctggatttctacagcattcatgtgaccaaggagtccacccaccccgtgaagcccctggcccagatcgccggaaacagatacgcctccggacctgtgggaaaggccctgagcgacgcatgtatgggcacaatcgcctccttcctgtctaagtaccaggacatcatcatcgaacaccagaaggtggtgaagggcaaccagaagagactggagagcctgcgggagctggccggcaaggaaaacctggaataccctagcgtgaccctgccacctcagcctcacaccaaggagggcgttgatgcctacaacgaagtgatcgcccgggtgcgaatgtgggtgaacctgaacctgtggcagaagctgaagctaagcagagatgatgccaagcctctgctgagactgaagggattcccttcctttcctctggtcgagagacaggccaacgaagtggactggtgggacatggtgtgtaacgtgaagaagctgatcaacgagaaaaaggaggatggcaaggtgttttggcagaatctggctggctacaagagacaggaagccctgagaccatacctgagcagcgaggaagatcggaagaagggaaagaaattcgctcggtaccagctgggcgacctgctgctgcacctggaaaagaagcacggcgaggactggggaaaggtgtacgacgaggcctgggagcggattgacaagaaagtggaaggcctgagcaagcacatcaagctggaagaggaacggagaagcgaggacgcccagagcaaggccgccctgaccgactggctgcgggctaaggccagcttcgtgatcgagggcctgaaggaggccgacaaggacgagttctgcagatgcgagctgaagctgcagaagtggtacggggacctgcggggaaagcccttcgccatcgaagccgagaacagcatcctggacatcagcggcttcagcaagcagtacaactgtgccttcatctggcagaaggacggcgtgaagaagctgaacctgtacctgatcatcaactacttcaagggcggcaagctgcggttcaagaagatcaaacctgaagccttcgaagccaacagattctacaccgtgatcaacaaaaagagcggcgagatcgtgcccatggaggtgaacttcaacttcgacgaccccaacctgatcatcctgcctctggcctttggcaagagacagggcagagaattcatctggaacgacctgctgtccctggaaaccggcagcctgaagctggccaacggaagagtgatcgagaagacactgtacaacagaagaacccggcaggatgagcctgccctgttcgtggccctgaccttcgagcggcgggaggtcctggactcctccaatatcaaaccaatgaacctgatcggcgtggcaagaggcgaaaacatccccgccgtgatcgccctgaccgaccccgagggctgcccactgagccggtttaaggatagcctgggaaacccaacccacatcctgagaatcggcgagagctataaggagaagcagcggaccatccaggccaagaaggaggtggagcagcggagagccggcggctacagccggaagtacgccagcaaagccaagaatctggcagacgatatggtgagaaacaccgctagagatctgctgtactacgccgtgacccaggatgccatgctgatcttcgccaacctgagccggggcttcggccggcagggcaagcggaccttcatggccgagagacagtacacacggatggaggactggctgaccgccaagctggcctacgagggcctgagcaagacctacctgtccaagacactggcccagtacacctccaagacatgcagcaactgtgggtttaccatcaccagcgccgactacgacagggtgctggagaagctgaagaagacagcaacaggctggatgaccacaattaacggcaaggagctgaaggtggagggccagattacctactacaacagatacaagagacagaacgtagtcaaggacctgtccgtcgagctggatagactgagcgaagaatctgtgaacaacgacatctcctcctggacaaagggcagaagcggagaagctctgagcctcctgaagaaaagattctcccatagacccgtgcaggagaagttcgtgtgcctgaactgcggcttcgagacacacgcagccgagcaagccgccctgaacatcgccagatcctggctgttcctgcggagccaggagtacaagaaataccagacaaacaagacaaccggcaacaccgataagagagccttcgtcgagacctggcagtccttttaccggaagaagcttaaggaggtgtggaaacctgccgtgcggtctggcggatctggcggaggctccaccagccccaagaaaaagagaaaagtctaagctgccttctgcggggcttgccttctggccatgcccttcttctctcccttgcacctgtacctcttggtctttgaataaagcctgagtaggaaggctagcaaaaaaaaaaaaaaaaaaaaaaaaaaaaaaaaaaaaaaaaaaaaaaaaaaaaaaaaaaaaaaaaaaaaaaaaaaaaaaaa

SEQ ID NO: 10504 - RNA, 8817 nt, synthetic construct
  source 1..8817: mol_type = other RNA
aggaaataagagagaaaagaagagtaagaagaaatataagagccaccatggcccctaagaagaagcgtaaagtgagccggatgaaccacgaccaggagttcgacccccctaaggtgtaccctcccgtccccgccgagaagagaaagcccatccgggtcctgagcctgttcgatggcatcgccaccggtctgctggtgctgaaggacctgggcatccaggtggataggtacattgcctccgaggtgtgcgaggactccatcaccgtgggaatggtgcgtcatcagggcaagatcatgtacgtgggcgacgtgcggagcgtgacacagaagcatatccaggagtggggccctttcgacctggtgatcggcggcagcccttgcaatgacctgagcatcgtgaacccagcccggaagggcctgtacgagggaaccggcagactgttcttcgagttttacagactgctgcacgacgcccggcctaaggaaggcgacgaccggcccttcttttggctgttcgagaatgtggtggccatgggagtcagcgacaagcgggatattagccggttcctggagagcaaccccgtgatgatcgatgccaaggaagtgagcgccgcccaccgggccagatacttctggggcaatctgcctggcatgaacagacccctggccagcaccgtgaacgacaagctggagctgcaggagtgcctggagcacggccggatcgccaagttcagcaaggtgagaaccatcaccacccgaagcaacagcatcaaacaaggcaaggaccagcactttcctgtgttcatgaacgagaaggaggacatcctgtggtgtaccgagatggagagagtgttcgggttcccagtccactacacagatgtcagcaacatgtctagactggccagacagagactgctgggaagaagctggtccgtccctgtgatcagacacctgttcgcccctctgaaggagtacttcgcctgcgtgagcagcggcaacagcaacgccaacagccggggccccagcttctctagcggcctggtgccactgtccctgagagggagccacatgggccccatggagatctacaaaaccgtgagcgcctggaagcggcagcctgtgcgcgtgctgagcctgtttcggaatatcgataaagtcctgaaaagcctgggattcctggagagcggctctggctccggcggtggcaccctgaagtacgtggaggatgtgacaaacgtggtcagacgggatgtggagaagtggggccccttcgatctggtgtacggcagcacccaacccctgggcagctcttgtgaccggtgccctggctggtacatgtttcagttccaccggatcctgcagtacgccctgccgagacaggagtcccagcggccattcttttggattttcatggacaacttgctgctgaccgaggatgaccaggaaactaccactcggttcctgcagaccgaagccgtgaccctgcaggacgtgagaggccgggactaccagaacgccatgcgggtgtggtccaacatccctggactgaaaagcaagcacgcacctctgacccctaaagaagaggagtacctgcaggcccaggtgcggagcagaagcaagctggacgcccctaaggtggatctgctggtgaagaattgcctcctgcccctgagagagtacttcaagtatttcagccagaatagtctgcccctgggaggcagcggcggcggcgtgaccttcgaggacgtggccgtgaacttcaccccccaggagtgggccctgctggaccccagccagaagaacctgtacagggacgtgatgcaggagaccctgaggaacctggccagcgtgggcaagaagtggaaggaccagaacatggaggacgagtgcaagacccccaggaggaacctgaggagcgtggtgggcgagaggctgttcaccagcaaggagggcagccagtgcggcgagaccctgaacctggacagccaccacatgctgaagaagggcggcccaagcagcggcgcccctcctcccagcggcggcaggcggcccaagcagcggcgcccctcctcccagcggcggcagcccagccggctccccaacctctaccgaggagggcacctctgagtccgccacccccgagagcggccctggcacctccaccgagcccagcgagggcagcgcacccggcagccctgccggcagccccacctccacagaggagggaaccagcaccgagcccagcgaaggcagcgccccaggcaccagcaccgagcctagtgagcaggagattaaacggatcaacaagatcagaagaagacttgtgaaagacagcaacaccaagaaggccggcaagacaggccccatgaaaaccctgctggttagagtgatgacacccgatctgagagagcggctggaaaacctgagaaagaagcctgaaaatatcccccagcccatcagcaatacatctagagccaacctgaataagctgctgaccgattacaccgaaatgaagaaggcgatcctgcatgtgtactgggaagagttccagaaggaccctgtgggcctgatgagccgggtggcccagcctgccagcaagaagatcgatcagaacaagctgaaacctgagatggacgagaagggcaacctgaccaccgccggctttgcctgctctcagtgtggccagcccctgttcgtgtacaagctggagcaggtgtctgagaagggcaaggcttacaccaactacttcggacggtgcaatgtggccgagcacgaaaagctgatcctgctggcccagctgaagcccgagaaggatagcgacgaagccgtgacatatagcctgggaaagtttgggcagagggccctggatttctacagcattcatgtgaccaaggagtccacccaccccgtgaagcccctggcccagatcgccggaaacagatacgcctccggacctgtgggaaaggccctgagcgacgcatgtatgggcacaatcgcctccttcctgtctaagtaccaggacatcatcatcgaacaccagaaggtggtgaagggcaaccagaagagactggagagcctgcgggagctggccggcaaggaaaacctggaataccctagcgtgaccctgccacctcagcctcacaccaaggagggcgttgatgcctacaacgaagtgatcgcccgggtgcgaatgtgggtgaacctgaacctgtggcagaagctgaagctaagcagagatgatgccaagcctctgctgagactgaagggattcccttcctttcctctggtcgagagacaggccaacgaagtggactggtgggacatggtgtgtaacgtgaagaagctgatcaacgagaaaaaggaggatggcaaggtgttttggcagaatctggctggctacaagagacaggaagccctgagaccatacctgagcagcgaggaagatcggaagaagggaaagaaattcgctcggtaccagctgggcgacctgctgctgcacctggaaaagaagcacggcgaggactggggaaaggtgtacgacgaggcctgggagcggattgacaagaaagtggaaggcctgagcaagcacatcaagctggaagaggaacggagaagcgaggacgcccagagcaaggccgccctgaccgactggctgcgggctaaggccagcttcgtgatcgagggcctgaaggaggccgacaaggacgagttctgcagatgcgagctgaagctgcagaagtggtacggggacctgcggggaaagcccttcgccatcgaagccgagaacagcatcctggacatcagcggcttcagcaagcagtacaactgtgccttcatctggcagaaggacggcgtgaagaagctgaacctgtacctgatcatcaactacttcaagggcggcaagctgcggttcaagaagatcaaacctgaagccttcgaagccaacagattctacaccgtgatcaacaaaaagagcggcgagatcgtgcccatggaggtgaacttcaacttcgacgaccccaacctgatcatcctgcctctggcctttggcaagagacagggcagagaattcatctggaacgacctgctgtccctggaaaccggcagcctgaagctggccaacggaagagtgatcgagaagacactgtacaacagaagaacccggcaggatgagcctgccctgttcgtggccctgaccttcgagcggcgggaggtcctggactcctccaatatcaaaccaatgaacctgatcggcgtggcaagaggcgaaaacatccccgccgtgatcgccctgaccgaccccgagggctgcccactgagccggtttaaggatagcctgggaaacccaacccacatcctgagaatcggcgagagctataaggagaagcagcggaccatccaggccaagaaggaggtggagcagcggagagccggcggctacagccggaagtacgccagcaaagccaagaatctggcagacgatatggtgagaaacaccgctagagatctgctgtactacgccgtgacccaggatgccatgctgatcttcgccaacctgagccggggcttcggccggcagggcaagcggaccttcatggccgagagacagtacacacggatggaggactggctgaccgccaagctggcctacgagggcctgagcaagacctacctgtccaagacactggcccagtacacctccaagacatgcagcaactgtgggtttaccatcaccagcgccgactacgacagggtgctggagaagctgaagaagacagcaacaggctggatgaccacaattaacggcaaggagctgaaggtggagggccagattacctactacaacagatacaagagacagaacgtagtcaaggacctgtccgtcgagctggatagactgagcgaagaatctgtgaacaacgacatctcctcctggacaaagggcagaagcggagaagctctgagcctcctgaagaaaagattctcccatagacccgtgcaggagaagttcgtgtgcctgaactgcggcttcgagacacacgcagccgagcaagccgccctgaacatcgccagatcctggctgttcctgcggagccaggagtacaagaaataccagacaaacaagacaaccggcaacaccgataagagagccttcgtcgagacctggcagtccttttaccggaagaagcttaaggaggtgtggaaacctgccgtgcggtctggcggatctggcggaggctccaccagccccaagaaaaagagaaaagtctaagctgccttctgcggggcttgccttctggccatgcccttcttctctcccttgcacctgtacctcttggtctttgaataaagcctgagtaggaaggctagcaaaaaaaaaaaaaaaaaaaaaaaaaaaaaaaaaaaaaaaaaaaaaaaaaaaaaaaaaaaaaaaaaaaaaaaaaaaaaaaagcccagccggctccccaacctctaccgaggagggcacctctgagtccgccacccccgagagcggccctggcacctccaccgagcccagcgagggcagcgcacccggcagccctgccggcagccccacctccacagaggagggaaccagcaccgagcccagcgaaggcagcgccccaggcaccagcaccgagcctagtgagcaggagattaaacggatcaacaagatcagaagaagacttgtgaaagacagcaacaccaagaaggccggcaagacaggccccatgaaaaccctgctggttagagtgatgacacccgatctgagagagcggctggaaaacctgagaaagaagcctgaaaatatcccccagcccatcagcaatacatctagagccaacctgaataagctgctgaccgattacaccgaaatgaagaaggcgatcctgcatgtgtactgggaagagttccagaaggaccctgtgggcctgatgagccgggtggcccagcctgccagcaagaagatcgatcagaacaagctgaaacctgagatggacgagaagggcaacctgaccaccgccggctttgcctgctctcagtgtggccagcccctgttcgtgtacaagctggagcaggtgtctgagaagggcaaggcttacaccaactacttcggacggtgcaatgtggccgagcacgaaaagctgatcctgctggcccagctgaagcccgagaaggatagcgacgaagccgtgacatatagcctgggaaagtttgggcagagggccctggatttctacagcattcatgtgaccaaggagtccacccaccccgtgaagcccctggcccagatcgccggaaacagatacgcctccggacctgtgggaaaggccctgagcgacgcatgtatgggcacaatcgcctccttcctgtctaagtaccaggacatcatcatcgaacaccagaaggtggtgaagggcaaccagaagagactggagagcctgcgggagctggccggcaaggaaaacctggaataccctagcgtgaccctgccacctcagcctcacaccaaggagggcgttgatgcctacaacgaagtgatcgcccgggtgcgaatgtgggtgaacctgaacctgtggcagaagctgaagctaagcagagatgatgccaagcctctgctgagactgaagggattcccttcctttcctctggtcgagagacaggccaacgaagtggactggtgggacatggtgtgtaacgtgaagaagctgatcaacgagaaaaaggaggatggcaaggtgttttggcagaatctggctggctacaagagacaggaagccctgagaccatacctgagcagcgaggaagatcggaagaagggaaagaaattcgctcggtaccagctgggcgacctgctgctgcacctggaaaagaagcacggcgaggactggggaaaggtgtacgacgaggcctgggagcggattgacaagaaagtggaaggcctgagcaagcacatcaagctggaagaggaacggagaagcgaggacgcccagagcaaggccgccctgaccgactggctgcgggctaaggccagcttcgtgatcgagggcctgaaggaggccgacaaggacgagttctgcagatgcgagctgaagctgcagaagtggtacggggacctgcggggaaagcccttcgccatcgaagccgagaacagcatcctggacatcagcggcttcagcaagcagtacaactgtgccttcatctggcagaaggacggcgtgaagaagctgaacctgtacctgatcatcaactacttcaagggcggcaagctgcggttcaagaagatcaaacctgaagccttcgaagccaacagattctacaccgtgatcaacaaaaagagcggcgagatcgtgcccatggaggtgaacttcaacttcgacgaccccaacctgatcatcctgcctctggcctttggcaagagacagggcagagaattcatctggaacgacctgctgtccctggaaaccggcagcctgaagctggccaacggaagagtgatcgagaagacactgtacaacagaagaacccggcaggatgagcctgccctgttcgtggccctgaccttcgagcggcgggaggtcctggactcctccaatatcaaaccaatgaacctgatcggcgtggcaagaggcgaaaacatccccgccgtgatcgccctgaccgaccccgagggctgcccactgagccggtttaaggatagcctgggaaacccaacccacatcctgagaatcggcgagagctataaggagaagcagcggaccatccaggccaagaaggaggtggagcagcggagagccggcggctacagccggaagtacgccagcaaagccaagaatctggcagacgatatggtgagaaacaccgctagagatctgctgtactacgccgtgacccaggatgccatgctgatcttcgccaacctgagccggggcttcggccggcagggcaagcggaccttcatggccgagagacagtacacacggatggaggactggctgaccgccaagctggcctacgagggcctgagcaagacctacctgtccaagacactggcccagtacacctccaagacatgcagcaactgtgggtttaccatcaccagcgccgactacgacagggtgctggagaagctgaagaagacagcaacaggctggatgaccacaattaacggcaaggagctgaaggtggagggccagattacctactacaacagatacaagagacagaacgtagtcaaggacctgtccgtcgagctggatagactgagcgaagaatctgtgaacaacgacatctcctcctggacaaagggcagaagcggagaagctctgagcctcctgaagaaaagattctcccatagacccgtgcaggagaagttcgtgtgcctgaactgcggcttcgagacacacgcagccgagcaagccgccctgaacatcgccagatcctggctgttcctgcggagccaggagtacaagaaataccagacaaacaagacaaccggcaacaccgataagagagccttcgtcgagacctggcagtccttttaccggaagaagcttaaggaggtgtggaaacctgccgtgcggtctggcggatctggcggaggctccaccagccccaagaaaaagagaaaagtctaagctgccttctgcggggcttgccttctggccatgcccttcttctctcccttgcacctgtacctcttggtctttgaataaagcctgagtaggaaggctagcaaaaaaaaaaaaaaaaaaaaaaaaaaaaaaaaaaaaaaaaaaaaaaaaaaaaaaaaaaaaaaaaaaaaaaaaaaaaaaaa

SEQ ID NO: 10505 - RNA, 8835 nt, synthetic construct
  source 1..8835: mol_type = other RNA
aggaaataagagagaaaagaagagtaagaagaaatataagagccaccatggcccctaagaagaagcgtaaagtgagccggatgaaccacgaccaggagttcgacccccctaaggtgtaccctcccgtccccgccgagaagagaaagcccatccgggtcctgagcctgttcgatggcatcgccaccggtctgctggtgctgaaggacctgggcatccaggtggataggtacattgcctccgaggtgtgcgaggactccatcaccgtgggaatggtgcgtcatcagggcaagatcatgtacgtgggcgacgtgcggagcgtgacacagaagcatatccaggagtggggccctttcgacctggtgatcggcggcagcccttgcaatgacctgagcatcgtgaacccagcccggaagggcctgtacgagggaaccggcagactgttcttcgagttttacagactgctgcacgacgcccggcctaaggaaggcgacgaccggcccttcttttggctgttcgagaatgtggtggccatgggagtcagcgacaagcgggatattagccggttcctggagagcaaccccgtgatgatcgatgccaaggaagtgagcgccgcccaccgggccagatacttctggggcaatctgcctggcatgaacagacccctggccagcaccgtgaacgacaagctggagctgcaggagtgcctggagcacggccggatcgccaagttcagcaaggtgagaaccatcaccacccgaagcaacagcatcaaacaaggcaaggaccagcactttcctgtgttcatgaacgagaaggaggacatcctgtggtgtaccgagatggagagagtgttcgggttcccagtccactacacagatgtcagcaacatgtctagactggccagacagagactgctgggaagaagctggtccgtccctgtgatcagacacctgttcgcccctctgaaggagtacttcgcctgcgtgagcagcggcaacagcaacgccaacagccggggccccagcttctctagcggcctggtgccactgtccctgagagggagccacatgggccccatggagatctacaaaaccgtgagcgcctggaagcggcagcctgtgcgcgtgctgagcctgtttcggaatatcgataaagtcctgaaaagcctgggattcctggagagcggctctggctccggcggtggcaccctgaagtacgtggaggatgtgacaaacgtggtcagacgggatgtggagaagtggggccccttcgatctggtgtacggcagcacccaacccctgggcagctcttgtgaccggtgccctggctggtacatgtttcagttccaccggatcctgcagtacgccctgccgagacaggagtcccagcggccattcttttggattttcatggacaacttgctgctgaccgaggatgaccaggaaactaccactcggttcctgcagaccgaagccgtgaccctgcaggacgtgagaggccgggactaccagaacgccatgcgggtgtggtccaacatccctggactgaaaagcaagcacgcacctctgacccctaaagaagaggagtacctgcaggcccaggtgcggagcagaagcaagctggacgcccctaaggtggatctgctggtgaagaattgcctcctgcccctgagagagtacttcaagtatttcagccagaatagtctgcccctgggaggcagcggcggcggcgagaagatcgaggacatggccgtgagcctgatcagggaggagtggctgctggaccccagccagaaggacctgaggagggacaacaggaccgagaactacaggaacatgttcagcctgggcggcgagaccaggagcgagaacagggagctggccagcaagcaggtggccagcgccggcgtgcagccccacggcgagaccgccgccaggtgcaacggcgacgtgaccggcgccctggagcacggcgaggccagggacctgctgggcagcagggtggagaggcagagggccaacggcggcccaagcagcggcgcccctcctcccagcggcggcaggcggcccaagcagcggcgcccctcctcccagcggcggcagcccagccggctccccaacctctaccgaggagggcacctctgagtccgccacccccgagagcggccctggcacctccaccgagcccagcgagggcagcgcacccggcagccctgccggcagccccacctccacagaggagggaaccagcaccgagcccagcgaaggcagcgccccaggcaccagcaccgagcctagtgagcaggagattaaacggatcaacaagatcagaagaagacttgtgaaagacagcaacaccaagaaggccggcaagacaggccccatgaaaaccctgctggttagagtgatgacacccgatctgagagagcggctggaaaacctgagaaagaagcctgaaaatatcccccagcccatcagcaatacatctagagccaacctgaataagctgctgaccgattacaccgaaatgaagaaggcgatcctgcatgtgtactgggaagagttccagaaggaccctgtgggcctgatgagccgggtggcccagcctgccagcaagaagatcgatcagaacaagctgaaacctgagatggacgagaagggcaacctgaccaccgccggctttgcctgctctcagtgtggccagcccctgttcgtgtacaagctggagcaggtgtctgagaagggcaaggcttacaccaactacttcggacggtgcaatgtggccgagcacgaaaagctgatcctgctggcccagctgaagcccgagaaggatagcgacgaagccgtgacatatagcctgggaaagtttgggcagagggccctggatttctacagcattcatgtgaccaaggagtccacccaccccgtgaagcccctggcccagatcgccggaaacagatacgcctccggacctgtgggaaaggccctgagcgacgcatgtatgggcacaatcgcctccttcctgtctaagtaccaggacatcatcatcgaacaccagaaggtggtgaagggcaaccagaagagactggagagcctgcgggagctggccggcaaggaaaacctggaataccctagcgtgaccctgccacctcagcctcacaccaaggagggcgttgatgcctacaacgaagtgatcgcccgggtgcgaatgtgggtgaacctgaacctgtggcagaagctgaagctaagcagagatgatgccaagcctctgctgagactgaagggattcccttcctttcctctggtcgagagacaggccaacgaagtggactggtgggacatggtgtgtaacgtgaagaagctgatcaacgagaaaaaggaggatggcaaggtgttttggcagaatctggctggctacaagagacaggaagccctgagaccatacctgagcagcgaggaagatcggaagaagggaaagaaattcgctcggtaccagctgggcgacctgctgctgcacctggaaaagaagcacggcgaggactggggaaaggtgtacgacgaggcctgggagcggattgacaagaaagtggaaggcctgagcaagcacatcaagctggaagaggaacggagaagcgaggacgcccagagcaaggccgccctgaccgactggctgcgggctaaggccagcttcgtgatcgagggcctgaaggaggccgacaaggacgagttctgcagatgcgagctgaagctgcagaagtggtacggggacctgcggggaaagcccttcgccatcgaagccgagaacagcatcctggacatcagcggcttcagcaagcagtacaactgtgccttcatctggcagaaggacggcgtgaagaagctgaacctgtacctgatcatcaactacttcaagggcggcaagctgcggttcaagaagatcaaacctgaagccttcgaagccaacagattctacaccgtgatcaacaaaaagagcggcgagatcgtgcccatggaggtgaacttcaacttcgacgaccccaacctgatcatcctgcctctggcctttggcaagagacagggcagagaattcatctggaacgacctgctgtccctggaaaccggcagcctgaagctggccaacggaagagtgatcgagaagacactgtacaacagaagaacccggcaggatgagcctgccctgttcgtggccctgaccttcgagcggcgggaggtcctggactcctccaatatcaaaccaatgaacctgatcggcgtggcaagaggcgaaaacatccccgccgtgatcgccctgaccgaccccgagggctgcccactgagccggtttaaggatagcctgggaaacccaacccacatcctgagaatcggcgagagctataaggagaagcagcggaccatccaggccaagaaggaggtggagcagcggagagccggcggctacagccggaagtacgccagcaaagccaagaatctggcagacgatatggtgagaaacaccgctagagatctgctgtactacgccgtgacccaggatgccatgctgatcttcgccaacctgagccggggcttcggccggcagggcaagcggaccttcatggccgagagacagtacacacggatggaggactggctgaccgccaagctggcctacgagggcctgagcaagacctacctgtccaagacactggcccagtacacctccaagacatgcagcaactgtgggtttaccatcaccagcgccgactacgacagggtgctggagaagctgaagaagacagcaacaggctggatgaccacaattaacggcaaggagctgaaggtggagggccagattacctactacaacagatacaagagacagaacgtagtcaaggacctgtccgtcgagctggatagactgagcgaagaatctgtgaacaacgacatctcctcctggacaaagggcagaagcggagaagctctgagcctcctgaagaaaagattctcccatagacccgtgcaggagaagttcgtgtgcctgaactgcggcttcgagacacacgcagccgagcaagccgccctgaacatcgccagatcctggctgttcctgcggagccaggagtacaagaaataccagacaaacaagacaaccggcaacaccgataagagagccttcgtcgagacctggcagtccttttaccggaagaagcttaaggaggtgtggaaacctgccgtgcggtctggcggatctggcggaggctccaccagccccaagaaaaagagaaaagtctaagctgccttctgcggggcttgccttctggccatgcccttcttctctcccttgcacctgtacctcttggtctttgaataaagcctgagtaggaaggctagcaaaaaaaaaaaaaaaaaaaaaaaaaaaaaaaaaaaaaaaaaaaaaaaaaaaaaaaaaaaaaaaaaaaaaaaaaaaaaaaagcccagccggctccccaacctctaccgaggagggcacctctgagtccgccacccccgagagcggccctggcacctccaccgagcccagcgagggcagcgcacccggcagccctgccggcagccccacctccacagaggagggaaccagcaccgagcccagcgaaggcagcgccccaggcaccagcaccgagcctagtgagcaggagattaaacggatcaacaagatcagaagaagacttgtgaaagacagcaacaccaagaaggccggcaagacaggccccatgaaaaccctgctggttagagtgatgacacccgatctgagagagcggctggaaaacctgagaaagaagcctgaaaatatcccccagcccatcagcaatacatctagagccaacctgaataagctgctgaccgattacaccgaaatgaagaaggcgatcctgcatgtgtactgggaagagttccagaaggaccctgtgggcctgatgagccgggtggcccagcctgccagcaagaagatcgatcagaacaagctgaaacctgagatggacgagaagggcaacctgaccaccgccggctttgcctgctctcagtgtggccagcccctgttcgtgtacaagctggagcaggtgtctgagaagggcaaggcttacaccaactacttcggacggtgcaatgtggccgagcacgaaaagctgatcctgctggcccagctgaagcccgagaaggatagcgacgaagccgtgacatatagcctgggaaagtttgggcagagggccctggatttctacagcattcatgtgaccaaggagtccacccaccccgtgaagcccctggcccagatcgccggaaacagatacgcctccggacctgtgggaaaggccctgagcgacgcatgtatgggcacaatcgcctccttcctgtctaagtaccaggacatcatcatcgaacaccagaaggtggtgaagggcaaccagaagagactggagagcctgcgggagctggccggcaaggaaaacctggaataccctagcgtgaccctgccacctcagcctcacaccaaggagggcgttgatgcctacaacgaagtgatcgcccgggtgcgaatgtgggtgaacctgaacctgtggcagaagctgaagctaagcagagatgatgccaagcctctgctgagactgaagggattcccttcctttcctctggtcgagagacaggccaacgaagtggactggtgggacatggtgtgtaacgtgaagaagctgatcaacgagaaaaaggaggatggcaaggtgttttggcagaatctggctggctacaagagacaggaagccctgagaccatacctgagcagcgaggaagatcggaagaagggaaagaaattcgctcggtaccagctgggcgacctgctgctgcacctggaaaagaagcacggcgaggactggggaaaggtgtacgacgaggcctgggagcggattgacaagaaagtggaaggcctgagcaagcacatcaagctggaagaggaacggagaagcgaggacgcccagagcaaggccgccctgaccgactggctgcgggctaaggccagcttcgtgatcgagggcctgaaggaggccgacaaggacgagttctgcagatgcgagctgaagctgcagaagtggtacggggacctgcggggaaagcccttcgccatcgaagccgagaacagcatcctggacatcagcggcttcagcaagcagtacaactgtgccttcatctggcagaaggacggcgtgaagaagctgaacctgtacctgatcatcaactacttcaagggcggcaagctgcggttcaagaagatcaaacctgaagccttcgaagccaacagattctacaccgtgatcaacaaaaagagcggcgagatcgtgcccatggaggtgaacttcaacttcgacgaccccaacctgatcatcctgcctctggcctttggcaagagacagggcagagaattcatctggaacgacctgctgtccctggaaaccggcagcctgaagctggccaacggaagagtgatcgagaagacactgtacaacagaagaacccggcaggatgagcctgccctgttcgtggccctgaccttcgagcggcgggaggtcctggactcctccaatatcaaaccaatgaacctgatcggcgtggcaagaggcgaaaacatccccgccgtgatcgccctgaccgaccccgagggctgcccactgagccggtttaaggatagcctgggaaacccaacccacatcctgagaatcggcgagagctataaggagaagcagcggaccatccaggccaagaaggaggtggagcagcggagagccggcggctacagccggaagtacgccagcaaagccaagaatctggcagacgatatggtgagaaacaccgctagagatctgctgtactacgccgtgacccaggatgccatgctgatcttcgccaacctgagccggggcttcggccggcagggcaagcggaccttcatggccgagagacagtacacacggatggaggactggctgaccgccaagctggcctacgagggcctgagcaagacctacctgtccaagacactggcccagtacacctccaagacatgcagcaactgtgggtttaccatcaccagcgccgactacgacagggtgctggagaagctgaagaagacagcaacaggctggatgaccacaattaacggcaaggagctgaaggtggagggccagattacctactacaacagatacaagagacagaacgtagtcaaggacctgtccgtcgagctggatagactgagcgaagaatctgtgaacaacgacatctcctcctggacaaagggcagaagcggagaagctctgagcctcctgaagaaaagattctcccatagacccgtgcaggagaagttcgtgtgcctgaactgcggcttcgagacacacgcagccgagcaagccgccctgaacatcgccagatcctggctgttcctgcggagccaggagtacaagaaataccagacaaacaagacaaccggcaacaccgataagagagccttcgtcgagacctggcagtccttttaccggaagaagcttaaggaggtgtggaaacctgccgtgcggtctggcggatctggcggaggctccaccagccccaagaaaaagagaaaagtctaagctgccttctgcggggcttgccttctggccatgcccttcttctctcccttgcacctgtacctcttggtctttgaataaagcctgagtaggaaggctagcaaaaaaaaaaaaaaaaaaaaaaaaaaaaaaaaaaaaaaaaaaaaaaaaaaaaaaaaaaaaaaaaaaaaaaaaaaaaaaaa

SEQ ID NO: 10506 - RNA, 8787 nt, synthetic construct; identical to SEQ ID NO: 8909
  modified_base 1..8787: mod_base = OTHER; note = Each t is m1f
  source 1..8787: mol_type = other RNA

SEQ ID NO: 10507 - RNA, 8787 nt, synthetic construct; identical to SEQ ID NO: 8910
  modified_base 1..8787: mod_base = OTHER; note = Each t is m1f
  source 1..8787: mol_type = other RNA

SEQ ID NO: 10508 - RNA, 8787 nt, synthetic construct; identical to SEQ ID NO: 8911
  modified_base 1..8787: mod_base = OTHER; note = Each t is m1f
  source 1..8787: mol_type = other RNA

SEQ ID NO: 10509 - RNA, 8787 nt, synthetic construct; identical to SEQ ID NO: 8912
  modified_base 1..8787: mod_base = OTHER; note = Each t is m1f
  source 1..8787: mol_type = other RNA

SEQ ID NO: 10510 - RNA, 8787 nt, synthetic construct; identical to SEQ ID NO: 8913
  modified_base 1..8787: mod_base = OTHER; note = Each t is m1f
  source 1..8787: mol_type = other RNA

SEQ ID NO: 10511 - RNA, 8787 nt, synthetic construct; identical to SEQ ID NO: 8914
  modified_base 1..8787: mod_base = OTHER; note = Each t is m1f
  source 1..8787: mol_type = other RNA

SEQ ID NO: 10512 - RNA, 8787 nt, synthetic construct; identical to SEQ ID NO: 8915
  modified_base 1..8787: mod_base = OTHER; note = Each t is m1f
  source 1..8787: mol_type = other RNA

SEQ ID NO: 10513 - RNA, 8787 nt, synthetic construct; identical to SEQ ID NO: 8916
  modified_base 1..8787: mod_base = OTHER; note = Each t is m1f
  source 1..8787: mol_type = other RNA

SEQ ID NO: 10514 - RNA, 8787 nt, synthetic construct; identical to SEQ ID NO: 8917
  modified_base 1..8787: mod_base = OTHER; note = Each t is m1f
  source 1..8787: mol_type = other RNA

SEQ ID NO: 10515 - RNA, 8787 nt, synthetic construct; identical to SEQ ID NO: 8918
  modified_base 1..8787: mod_base = OTHER; note = Each t is m1f
  source 1..8787: mol_type = other RNA

SEQ ID NO: 10516 - RNA, 8787 nt, synthetic construct; identical to SEQ ID NO: 8919
  modified_base 1..8787: mod_base = OTHER; note = Each t is m1f
  source 1..8787: mol_type = other RNA

SEQ ID NO: 10517 - RNA, 8787 nt, synthetic construct; identical to SEQ ID NO: 8920
  modified_base 1..8787: mod_base = OTHER; note = Each t is m1f
  source 1..8787: mol_type = other RNA

SEQ ID NO: 10518 - RNA, 8787 nt, synthetic construct; identical to SEQ ID NO: 8921
  modified_base 1..8787: mod_base = OTHER; note = Each t is m1f
  source 1..8787: mol_type = other RNA

SEQ ID NO: 10519 - RNA, 8787 nt, synthetic construct; identical to SEQ ID NO: 8922
  modified_base 1..8787: mod_base = OTHER; note = Each t is m1f
  source 1..8787: mol_type = other RNA

SEQ ID NO: 10520 - RNA, 8787 nt, synthetic construct; identical to SEQ ID NO: 8923
  modified_base 1..8787: mod_base = OTHER; note = Each t is m1f
  source 1..8787: mol_type = other RNA

SEQ ID NO: 10521 - RNA, 8787 nt, synthetic construct; identical to SEQ ID NO: 8924
  modified_base 1..8787: mod_base = OTHER; note = Each t is m1f
  source 1..8787: mol_type = other RNA

SEQ ID NO: 10522 - RNA, 8787 nt, synthetic construct; identical to SEQ ID NO: 8925
  modified_base 1..8787: mod_base = OTHER; note = Each t is m1f
  source 1..8787: mol_type = other RNA

SEQ ID NO: 10523 - RNA, 8787 nt, synthetic construct; identical to SEQ ID NO: 8926
  modified_base 1..8787: mod_base = OTHER; note = Each t is m1f
  source 1..8787: mol_type = other RNA

SEQ ID NO: 10524 - RNA, 8787 nt, synthetic construct; identical to SEQ ID NO: 8927
  modified_base 1..8787: mod_base = OTHER; note = Each t is m1f
  source 1..8787: mol_type = other RNA

SEQ ID NO: 10525 - RNA, 8787 nt, synthetic construct; identical to SEQ ID NO: 8928
  modified_base 1..8787: mod_base = OTHER; note = Each t is m1f
  source 1..8787: mol_type = other RNA

SEQ ID NO: 10526 - RNA, 8787 nt, synthetic construct; identical to SEQ ID NO: 8929
  modified_base 1..8787: mod_base = OTHER; note = Each t is m1f
  source 1..8787: mol_type = other RNA

SEQ ID NO: 10527 - RNA, 8787 nt, synthetic construct; identical to SEQ ID NO: 8930
  modified_base 1..8787: mod_base = OTHER; note = Each t is m1f
  source 1..8787: mol_type = other RNA

SEQ ID NO: 10528 - RNA, 8787 nt, synthetic construct; identical to SEQ ID NO: 8931
  modified_base 1..8787: mod_base = OTHER; note = Each t is m1f
  source 1..8787: mol_type = other RNA

SEQ ID NO: 10529 - RNA, 8787 nt, synthetic construct; identical to SEQ ID NO: 8932
  modified_base 1..8787: mod_base = OTHER; note = Each t is m1f
  source 1..8787: mol_type = other RNA

SEQ ID NO: 10530 - RNA, 8787 nt, synthetic construct; identical to SEQ ID NO: 8933
  modified_base 1..8787: mod_base = OTHER; note = Each t is m1f
  source 1..8787: mol_type = other RNA

SEQ ID NO: 10531 - RNA, 8787 nt, synthetic construct; identical to SEQ ID NO: 8934
  modified_base 1..8787: mod_base = OTHER; note = Each t is m1f
  source 1..8787: mol_type = other RNA

SEQ ID NO: 10532 - RNA, 8787 nt, synthetic construct; identical to SEQ ID NO: 8935
  modified_base 1..8787: mod_base = OTHER; note = Each t is m1f
  source 1..8787: mol_type = other RNA

SEQ ID NO: 10533 - RNA, 8787 nt, synthetic construct; identical to SEQ ID NO: 8936
  modified_base 1..8787: mod_base = OTHER; note = Each t is m1f
  source 1..8787: mol_type = other RNA

SEQ ID NO: 10534 - RNA, 8787 nt, synthetic construct; identical to SEQ ID NO: 8937
  modified_base 1..8787: mod_base = OTHER; note = Each t is m1f
  source 1..8787: mol_type = other RNA

SEQ ID NO: 10535 - RNA, 8787 nt, synthetic construct; identical to SEQ ID NO: 8938
  modified_base 1..8787: mod_base = OTHER; note = Each t is m1f
  source 1..8787: mol_type = other RNA

SEQ ID NO: 10536 - RNA, 8787 nt, synthetic construct; identical to SEQ ID NO: 8939
  modified_base 1..8787: mod_base = OTHER; note = Each t is m1f
  source 1..8787: mol_type = other RNA

SEQ ID NO: 10537 - RNA, 8787 nt, synthetic construct; identical to SEQ ID NO: 8940
  modified_base 1..8787: mod_base = OTHER; note = Each t is m1f
  source 1..8787: mol_type = other RNA

SEQ ID NO: 10538 - RNA, 8787 nt, synthetic construct; identical to SEQ ID NO: 8941
  modified_base 1..8787: mod_base = OTHER; note = Each t is m1f
  source 1..8787: mol_type = other RNA

SEQ ID NO: 10539 - RNA, 8787 nt, synthetic construct; identical to SEQ ID NO: 8942
  modified_base 1..8787: mod_base = OTHER; note = Each t is m1f
  source 1..8787: mol_type = other RNA

SEQ ID NO: 10540 - RNA, 8787 nt, synthetic construct; identical to SEQ ID NO: 8943
  modified_base 1..8787: mod_base = OTHER; note = Each t is m1f
  source 1..8787: mol_type = other RNA

SEQ ID NO: 10541 - RNA, 8787 nt, synthetic construct; identical to SEQ ID NO: 8944
  modified_base 1..8787: mod_base = OTHER; note = Each t is m1f
  source 1..8787: mol_type = other RNA

SEQ ID NO: 10542 - RNA, 8787 nt, synthetic construct; identical to SEQ ID NO: 8945
  modified_base 1..8787: mod_base = OTHER; note = Each t is m1f
  source 1..8787: mol_type = other RNA

SEQ ID NO: 10543 - RNA, 8787 nt, synthetic construct; identical to SEQ ID NO: 8946
  modified_base 1..8787: mod_base = OTHER; note = Each t is m1f
  source 1..8787: mol_type = other RNA

SEQ ID NO: 10544 - RNA, 8787 nt, synthetic construct; identical to SEQ ID NO: 8947
  modified_base 1..8787: mod_base = OTHER; note = Each t is m1f
  source 1..8787: mol_type = other RNA

SEQ ID NO: 10545 - RNA, 8787 nt, synthetic construct; identical to SEQ ID NO: 8948
  modified_base 1..8787: mod_base = OTHER; note = Each t is m1f
  source 1..8787: mol_type = other RNA

SEQ ID NO: 10546 - RNA, 8787 nt, synthetic construct; identical to SEQ ID NO: 8949
  modified_base 1..8787: mod_base = OTHER; note = Each t is m1f
  source 1..8787: mol_type = other RNA

SEQ ID NO: 10547 - RNA, 8787 nt, synthetic construct; identical to SEQ ID NO: 8950
  modified_base 1..8787: mod_base = OTHER; note = Each t is m1f
  source 1..8787: mol_type = other RNA

SEQ ID NO: 10548 - RNA, 8787 nt, synthetic construct; identical to SEQ ID NO: 8951
  modified_base 1..8787: mod_base = OTHER; note = Each t is m1f
  source 1..8787: mol_type = other RNA

SEQ ID NO: 10549 - RNA, 8787 nt, synthetic construct; identical to SEQ ID NO: 8952
  modified_base 1..8787: mod_base = OTHER; note = Each t is m1f
  source 1..8787: mol_type = other RNA

SEQ ID NO: 10550 - RNA, 8787 nt, synthetic construct; identical to SEQ ID NO: 8953
  modified_base 1..8787: mod_base = OTHER; note = Each t is m1f
  source 1..8787: mol_type = other RNA

SEQ ID NO: 10551 - RNA, 8787 nt, synthetic construct; identical to SEQ ID NO: 8954
  modified_base 1..8787: mod_base = OTHER; note = Each t is m1f
  source 1..8787: mol_type = other RNA

SEQ ID NO: 10552 - RNA, 8787 nt, synthetic construct; identical to SEQ ID NO: 8955
  modified_base 1..8787: mod_base = OTHER; note = Each t is m1f
  source 1..8787: mol_type = other RNA

SEQ ID NO: 10553 - RNA, 8787 nt, synthetic construct; identical to SEQ ID NO: 8956
  modified_base 1..8787: mod_base = OTHER; note = Each t is m1f
  source 1..8787: mol_type = other RNA

SEQ ID NO: 10554 - RNA, 8787 nt, synthetic construct; identical to SEQ ID NO: 8957
  modified_base 1..8787: mod_base = OTHER; note = Each t is m1f
  source 1..8787: mol_type = other RNA

SEQ ID NO: 10555 - RNA, 8787 nt, synthetic construct; identical to SEQ ID NO: 8958
  modified_base 1..8787: mod_base = OTHER; note = Each t is m1f
  source 1..8787: mol_type = other RNA

SEQ ID NO: 10556 - RNA, 8787 nt, synthetic construct; identical to SEQ ID NO: 8959
  modified_base 1..8787: mod_base = OTHER; note = Each t is m1f
  source 1..8787: mol_type = other RNA

SEQ ID NO: 10557 - RNA, 8787 nt, synthetic construct; identical to SEQ ID NO: 8960
  modified_base 1..8787: mod_base = OTHER; note = Each t is m1f
  source 1..8787: mol_type = other RNA

SEQ ID NO: 10558 - RNA, 8787 nt, synthetic construct; identical to SEQ ID NO: 8961
  modified_base 1..8787: mod_base = OTHER; note = Each t is m1f
  source 1..8787: mol_type = other RNA

SEQ ID NO: 10559 - RNA, 8787 nt, synthetic construct; identical to SEQ ID NO: 8962
  modified_base 1..8787: mod_base = OTHER; note = Each t is m1f
  source 1..8787: mol_type = other RNA

SEQ ID NO: 10560 - RNA, 8787 nt, synthetic construct; identical to SEQ ID NO: 8963
  modified_base 1..8787: mod_base = OTHER; note = Each t is m1f
  source 1..8787: mol_type = other RNA

SEQ ID NO: 10561 - RNA, 8796 nt, synthetic construct; identical to SEQ ID NO: 8964
  modified_base 1..8796: mod_base = OTHER; note = Each t is m1f
  source 1..8796: mol_type = other RNA

SEQ ID NO: 10562 - RNA, 8787 nt, synthetic construct; identical to SEQ ID NO: 8965
  modified_base 1..8787: mod_base = OTHER; note = Each t is m1f
  source 1..8787: mol_type = other RNA

SEQ ID NO: 10563 - RNA, 8787 nt, synthetic construct; identical to SEQ ID NO: 8966
  modified_base 1..8787: mod_base = OTHER; note = Each t is m1f
  source 1..8787: mol_type = other RNA

SEQ ID NO: 10564 - RNA, 8787 nt, synthetic construct; identical to SEQ ID NO: 8967
  modified_base 1..8787: mod_base = OTHER; note = Each t is m1f
  source 1..8787: mol_type = other RNA

SEQ ID NO: 10565 - RNA, 8784 nt, synthetic construct; identical to SEQ ID NO: 8968
  modified_base 1..8784: mod_base = OTHER; note = Each t is m1f
  source 1..8784: mol_type = other RNA

SEQ ID NO: 10566 - RNA, 8787 nt, synthetic construct; identical to SEQ ID NO: 8969
  modified_base 1..8787: mod_base = OTHER; note = Each t is m1f
  source 1..8787: mol_type = other RNA

SEQ ID NO: 10567 - RNA, 8787 nt, synthetic construct; identical to SEQ ID NO: 8970
  modified_base 1..8787: mod_base = OTHER; note = Each t is m1f
  source 1..8787: mol_type = other RNA

SEQ ID NO: 10568 - RNA, 8787 nt, synthetic construct; identical to SEQ ID NO: 8971
  modified_base 1..8787: mod_base = OTHER; note = Each t is m1f
  source 1..8787: mol_type = other RNA

SEQ ID NO: 10569 - RNA, 8787 nt, synthetic construct; identical to SEQ ID NO: 8972
  modified_base 1..8787: mod_base = OTHER; note = Each t is m1f
  source 1..8787: mol_type = other RNA

SEQ ID NO: 10570 - RNA, 8787 nt, synthetic construct; identical to SEQ ID NO: 8973
  modified_base 1..8787: mod_base = OTHER; note = Each t is m1f
  source 1..8787: mol_type = other RNA

SEQ ID NO: 10571 - RNA, 8787 nt, synthetic construct; identical to SEQ ID NO: 8974
  modified_base 1..8787: mod_base = OTHER; note = Each t is m1f
  source 1..8787: mol_type = other RNA

SEQ ID NO: 10572 - RNA, 8787 nt, synthetic construct; identical to SEQ ID NO: 8975
  modified_base 1..8787: mod_base = OTHER; note = Each t is m1f
  source 1..8787: mol_type = other RNA

SEQ ID NO: 10573 - RNA, 8787 nt, synthetic construct; identical to SEQ ID NO: 8976
  modified_base 1..8787: mod_base = OTHER; note = Each t is m1f
  source 1..8787: mol_type = other RNA

SEQ ID NO: 10574 - RNA, 8787 nt, synthetic construct; identical to SEQ ID NO: 8977
  modified_base 1..8787: mod_base = OTHER; note = Each t is m1f
  source 1..8787: mol_type = other RNA

SEQ ID NO: 10575 - RNA, 8787 nt, synthetic construct; identical to SEQ ID NO: 8978
  modified_base 1..8787: mod_base = OTHER; note = Each t is m1f
  source 1..8787: mol_type = other RNA

SEQ ID NO: 10576 - RNA, 8787 nt, synthetic construct; identical to SEQ ID NO: 8979
  modified_base 1..8787: mod_base = OTHER; note = Each t is m1f
  source 1..8787: mol_type = other RNA

SEQ ID NO: 10577 - RNA, 8787 nt, synthetic construct; identical to SEQ ID NO: 8980
  modified_base 1..8787: mod_base = OTHER; note = Each t is m1f
  source 1..8787: mol_type = other RNA

SEQ ID NO: 10578 - RNA, 8787 nt, synthetic construct; identical to SEQ ID NO: 8981
  modified_base 1..8787: mod_base = OTHER; note = Each t is m1f
  source 1..8787: mol_type = other RNA

SEQ ID NO: 10579 - RNA, 8787 nt, synthetic construct; identical to SEQ ID NO: 8982
  modified_base 1..8787: mod_base = OTHER; note = Each t is m1f
  source 1..8787: mol_type = other RNA

SEQ ID NO: 10580 - RNA, 8787 nt, synthetic construct; identical to SEQ ID NO: 8983
  modified_base 1..8787: mod_base = OTHER; note = Each t is m1f
  source 1..8787: mol_type = other RNA

SEQ ID NO: 10581 - RNA, 8787 nt, synthetic construct; identical to SEQ ID NO: 8984
  modified_base 1..8787: mod_base = OTHER; note = Each t is m1f
  source 1..8787: mol_type = other RNA

SEQ ID NO: 10582 - RNA, 8787 nt, synthetic construct; identical to SEQ ID NO: 8985
  modified_base 1..8787: mod_base = OTHER; note = Each t is m1f
  source 1..8787: mol_type = other RNA

SEQ ID NO: 10583 - RNA, 8787 nt, synthetic construct; identical to SEQ ID NO: 8986
  modified_base 1..8787: mod_base = OTHER; note = Each t is m1f
  source 1..8787: mol_type = other RNA

SEQ ID NO: 10584 - RNA, 8787 nt, synthetic construct; identical to SEQ ID NO: 8987
  modified_base 1..8787: mod_base = OTHER; note = Each t is m1f
  source 1..8787: mol_type = other RNA

SEQ ID NO: 10585 - RNA, 8787 nt, synthetic construct; identical to SEQ ID NO: 8988
  modified_base 1..8787: mod_base = OTHER; note = Each t is m1f
  source 1..8787: mol_type = other RNA

SEQ ID NO: 10586 - RNA, 8787 nt, synthetic construct; identical to SEQ ID NO: 8989
  modified_base 1..8787: mod_base = OTHER; note = Each t is m1f
  source 1..8787: mol_type = other RNA

SEQ ID NO: 10587 - RNA, 8787 nt, synthetic construct; identical to SEQ ID NO: 8990
  modified_base 1..8787: mod_base = OTHER; note = Each t is m1f
  source 1..8787: mol_type = other RNA

SEQ ID NO: 10588 - RNA, 8787 nt, synthetic construct; identical to SEQ ID NO: 8991
  modified_base 1..8787: mod_base = OTHER; note = Each t is m1f
  source 1..8787: mol_type = other RNA

SEQ ID NO: 10589 - RNA, 8787 nt, synthetic construct; identical to SEQ ID NO: 8992
  modified_base 1..8787: mod_base = OTHER; note = Each t is m1f
  source 1..8787: mol_type = other RNA

SEQ ID NO: 10590 - RNA, 8787 nt, synthetic construct; identical to SEQ ID NO: 8993
  modified_base 1..8787: mod_base = OTHER; note = Each t is m1f
  source 1..8787: mol_type = other RNA

SEQ ID NO: 10591 - RNA, 8787 nt, synthetic construct; identical to SEQ ID NO: 8994
  modified_base 1..8787: mod_base = OTHER; note = Each t is m1f
  source 1..8787: mol_type = other RNA

SEQ ID NO: 10592 - RNA, 8787 nt, synthetic construct; identical to SEQ ID NO: 8995
  modified_base 1..8787: mod_base = OTHER; note = Each t is m1f
  source 1..8787: mol_type = other RNA

SEQ ID NO: 10593 - RNA, 8787 nt, synthetic construct; identical to SEQ ID NO: 8996
  modified_base 1..8787: mod_base = OTHER; note = Each t is m1f
  source 1..8787: mol_type = other RNA

SEQ ID NO: 10594 - RNA, 8787 nt, synthetic construct; identical to SEQ ID NO: 8997
  modified_base 1..8787: mod_base = OTHER; note = Each t is m1f
  source 1..8787: mol_type = other RNA

SEQ ID NO: 10595 - RNA, 8787 nt, synthetic construct; identical to SEQ ID NO: 8998
  modified_base 1..8787: mod_base = OTHER; note = Each t is m1f
  source 1..8787: mol_type = other RNA

SEQ ID NO: 10596 - RNA, 8787 nt, synthetic construct; identical to SEQ ID NO: 8999
  modified_base 1..8787: mod_base = OTHER; note = Each t is m1f
  source 1..8787: mol_type = other RNA

SEQ ID NO: 10597 - RNA, 8787 nt, synthetic construct; identical to SEQ ID NO: 9000
  modified_base 1..8787: mod_base = OTHER; note = Each t is m1f
  source 1..8787: mol_type = other RNA

SEQ ID NO: 10598 - RNA, 8787 nt, synthetic construct; identical to SEQ ID NO: 9001
  modified_base 1..8787: mod_base = OTHER; note = Each t is m1f
  source 1..8787: mol_type = other RNA

SEQ ID NO: 10599 - RNA, 8787 nt, synthetic construct; identical to SEQ ID NO: 9002
  modified_base 1..8787: mod_base = OTHER; note = Each t is m1f
  source 1..8787: mol_type = other RNA

SEQ ID NO: 10600 - RNA, 8787 nt, synthetic construct; identical to SEQ ID NO: 9003
  modified_base 1..8787: mod_base = OTHER; note = Each t is m1f
  source 1..8787: mol_type = other RNA

SEQ ID NO: 10601 - RNA, 8787 nt, synthetic construct; identical to SEQ ID NO: 9004
  modified_base 1..8787: mod_base = OTHER; note = Each t is m1f
  source 1..8787: mol_type = other RNA

SEQ ID NO: 10602 - RNA, 8787 nt, synthetic construct; identical to SEQ ID NO: 9005
  modified_base 1..8787: mod_base = OTHER; note = Each t is m1f
  source 1..8787: mol_type = other RNA

SEQ ID NO: 10603 - RNA, 8787 nt, synthetic construct; identical to SEQ ID NO: 9006
  modified_base 1..8787: mod_base = OTHER; note = Each t is m1f
  source 1..8787: mol_type = other RNA

SEQ ID NO: 10604 - RNA, 8787 nt, synthetic construct; identical to SEQ ID NO: 9007
  modified_base 1..8787: mod_base = OTHER; note = Each t is m1f
  source 1..8787: mol_type = other RNA

SEQ ID NO: 10605 - RNA, 8787 nt, synthetic construct; identical to SEQ ID NO: 9008
  modified_base 1..8787: mod_base = OTHER; note = Each t is m1f
  source 1..8787: mol_type = other RNA

SEQ ID NO: 10606 - RNA, 8787 nt, synthetic construct; identical to SEQ ID NO: 9009
  modified_base 1..8787: mod_base = OTHER; note = Each t is m1f
  source 1..8787: mol_type = other RNA

SEQ ID NO: 10607 - RNA, 8787 nt, synthetic construct; identical to SEQ ID NO: 9010
  modified_base 1..8787: mod_base = OTHER; note = Each t is m1f
  source 1..8787: mol_type = other RNA

SEQ ID NO: 10608 - RNA, 8787 nt, synthetic construct; identical to SEQ ID NO: 9011
  modified_base 1..8787: mod_base = OTHER; note = Each t is m1f
  source 1..8787: mol_type = other RNA

SEQ ID NO: 10609 - RNA, 8787 nt, synthetic construct; identical to SEQ ID NO: 9012
  modified_base 1..8787: mod_base = OTHER; note = Each t is m1f
  source 1..8787: mol_type = other RNA

SEQ ID NO: 10610 - RNA, 8787 nt, synthetic construct; identical to SEQ ID NO: 9013
  modified_base 1..8787: mod_base = OTHER; note = Each t is m1f
  source 1..8787: mol_type = other RNA

SEQ ID NO: 10611 - RNA, 8787 nt, synthetic construct; identical to SEQ ID NO: 9014
  modified_base 1..8787: mod_base = OTHER; note = Each t is m1f
  source 1..8787: mol_type = other RNA

SEQ ID NO: 10612 - RNA, 8787 nt, synthetic construct; identical to SEQ ID NO: 9015
  modified_base 1..8787: mod_base = OTHER; note = Each t is m1f
  source 1..8787: mol_type = other RNA

SEQ ID NO: 10613 - RNA, 8787 nt, synthetic construct; identical to SEQ ID NO: 9016
  modified_base 1..8787: mod_base = OTHER; note = Each t is m1f
  source 1..8787: mol_type = other RNA

SEQ ID NO: 10614 - RNA, 8787 nt, synthetic construct; identical to SEQ ID NO: 9017
  modified_base 1..8787: mod_base = OTHER; note = Each t is m1f
  source 1..8787: mol_type = other RNA

SEQ ID NO: 10615 - RNA, 8787 nt, synthetic construct; identical to SEQ ID NO: 9018
  modified_base 1..8787: mod_base = OTHER; note = Each t is m1f
  source 1..8787: mol_type = other RNA

SEQ ID NO: 10616 - RNA, 8787 nt, synthetic construct; identical to SEQ ID NO: 9019
  modified_base 1..8787: mod_base = OTHER; note = Each t is m1f
  source 1..8787: mol_type = other RNA

SEQ ID NO: 10617 - RNA, 8787 nt, synthetic construct; identical to SEQ ID NO: 9020
  modified_base 1..8787: mod_base = OTHER; note = Each t is m1f
  source 1..8787: mol_type = other RNA

SEQ ID NO: 10618 - RNA, 8787 nt, synthetic construct; identical to SEQ ID NO: 9021
  modified_base 1..8787: mod_base = OTHER; note = Each t is m1f
  source 1..8787: mol_type = other RNA

SEQ ID NO: 10619 - RNA, 8787 nt, synthetic construct; identical to SEQ ID NO: 9022
  modified_base 1..8787: mod_base = OTHER; note = Each t is m1f
  source 1..8787: mol_type = other RNA

SEQ ID NO: 10620 - RNA, 8787 nt, synthetic construct; identical to SEQ ID NO: 9023
  modified_base 1..8787: mod_base = OTHER; note = Each t is m1f
  source 1..8787: mol_type = other RNA

SEQ ID NO: 10621 - RNA, 8787 nt, synthetic construct; identical to SEQ ID NO: 9024
  modified_base 1..8787: mod_base = OTHER; note = Each t is m1f
  source 1..8787: mol_type = other RNA

SEQ ID NO: 10622 - RNA, 8787 nt, synthetic construct; identical to SEQ ID NO: 9025
  modified_base 1..8787: mod_base = OTHER; note = Each t is m1f
  source 1..8787: mol_type = other RNA

SEQ ID NO: 10623 - RNA, 8787 nt, synthetic construct; identical to SEQ ID NO: 9026
  modified_base 1..8787: mod_base = OTHER; note = Each t is m1f
  source 1..8787: mol_type = other RNA

SEQ ID NO: 10624 - RNA, 8787 nt, synthetic construct; identical to SEQ ID NO: 9027
  modified_base 1..8787: mod_base = OTHER; note = Each t is m1f
  source 1..8787: mol_type = other RNA

SEQ ID NO: 10625 - RNA, 8787 nt, synthetic construct; identical to SEQ ID NO: 9028
  modified_base 1..8787: mod_base = OTHER; note = Each t is m1f
  source 1..8787: mol_type = other RNA

SEQ ID NO: 10626 - RNA, 8787 nt, synthetic construct; identical to SEQ ID NO: 9029
  modified_base 1..8787: mod_base = OTHER; note = Each t is m1f
  source 1..8787: mol_type = other RNA

SEQ ID NO: 10627 - RNA, 8787 nt, synthetic construct; identical to SEQ ID NO: 9030
  modified_base 1..8787: mod_base = OTHER; note = Each t is m1f
  source 1..8787: mol_type = other RNA

SEQ ID NO: 10628 - RNA, 8787 nt, synthetic construct; identical to SEQ ID NO: 9031
  modified_base 1..8787: mod_base = OTHER; note = Each t is m1f
  source 1..8787: mol_type = other RNA

SEQ ID NO: 10629 - RNA, 8787 nt, synthetic construct; identical to SEQ ID NO: 9032
  modified_base 1..8787: mod_base = OTHER; note = Each t is m1f
  source 1..8787: mol_type = other RNA

SEQ ID NO: 10630 - RNA, 8787 nt, synthetic construct; identical to SEQ ID NO: 9033
  modified_base 1..8787: mod_base = OTHER; note = Each t is m1f
  source 1..8787: mol_type = other RNA

SEQ ID NO: 10631 - RNA, 8787 nt, synthetic construct; identical to SEQ ID NO: 9034
  modified_base 1..8787: mod_base = OTHER; note = Each t is m1f
  source 1..8787: mol_type = other RNA

SEQ ID NO: 10632 - RNA, 8787 nt, synthetic construct; identical to SEQ ID NO: 9035
  modified_base 1..8787: mod_base = OTHER; note = Each t is m1f
  source 1..8787: mol_type = other RNA

SEQ ID NO: 10633 - RNA, 8787 nt, synthetic construct; identical to SEQ ID NO: 9036
  modified_base 1..8787: mod_base = OTHER; note = Each t is m1f
  source 1..8787: mol_type = other RNA

SEQ ID NO: 10634 - RNA, 8787 nt, synthetic construct; identical to SEQ ID NO: 9037
  modified_base 1..8787: mod_base = OTHER; note = Each t is m1f
  source 1..8787: mol_type = other RNA

SEQ ID NO: 10635 - RNA, 8787 nt, synthetic construct; identical to SEQ ID NO: 9038
  modified_base 1..8787: mod_base = OTHER; note = Each t is m1f
  source 1..8787: mol_type = other RNA

SEQ ID NO: 10636 - RNA, 8787 nt, synthetic construct; identical to SEQ ID NO: 9039
  modified_base 1..8787: mod_base = OTHER; note = Each t is m1f
  source 1..8787: mol_type = other RNA

SEQ ID NO: 10637 - RNA, 8787 nt, synthetic construct; identical to SEQ ID NO: 9040
  modified_base 1..8787: mod_base = OTHER; note = Each t is m1f
  source 1..8787: mol_type = other RNA

SEQ ID NO: 10638 - RNA, 8787 nt, synthetic construct; identical to SEQ ID NO: 9041
  modified_base 1..8787: mod_base = OTHER; note = Each t is m1f
  source 1..8787: mol_type = other RNA

SEQ ID NO: 10639 - RNA, 8787 nt, synthetic construct; identical to SEQ ID NO: 9042
  modified_base 1..8787: mod_base = OTHER; note = Each t is m1f
  source 1..8787: mol_type = other RNA

SEQ ID NO: 10640 - RNA, 8787 nt, synthetic construct; identical to SEQ ID NO: 9043
  modified_base 1..8787: mod_base = OTHER; note = Each t is m1f
  source 1..8787: mol_type = other RNA

SEQ ID NO: 10641 - RNA, 8787 nt, synthetic construct; identical to SEQ ID NO: 9044
  modified_base 1..8787: mod_base = OTHER; note = Each t is m1f
  source 1..8787: mol_type = other RNA

SEQ ID NO: 10642 - RNA, 8787 nt, synthetic construct; identical to SEQ ID NO: 9045
  modified_base 1..8787: mod_base = OTHER; note = Each t is m1f
  source 1..8787: mol_type = other RNA

SEQ ID NO: 10643 - RNA, 8787 nt, synthetic construct; identical to SEQ ID NO: 9046
  modified_base 1..8787: mod_base = OTHER; note = Each t is m1f
  source 1..8787: mol_type = other RNA

SEQ ID NO: 10644 - RNA, 8787 nt, synthetic construct; identical to SEQ ID NO: 9047
  modified_base 1..8787: mod_base = OTHER; note = Each t is m1f
  source 1..8787: mol_type = other RNA

SEQ ID NO: 10645 - RNA, 8787 nt, synthetic construct; identical to SEQ ID NO: 9048
  modified_base 1..8787: mod_base = OTHER; note = Each t is m1f
  source 1..8787: mol_type = other RNA

SEQ ID NO: 10646 - RNA, 8787 nt, synthetic construct; identical to SEQ ID NO: 9049
  modified_base 1..8787: mod_base = OTHER; note = Each t is m1f
  source 1..8787: mol_type = other RNA

SEQ ID NO: 10647 - RNA, 8787 nt, synthetic construct; identical to SEQ ID NO: 9050
  modified_base 1..8787: mod_base = OTHER; note = Each t is m1f
  source 1..8787: mol_type = other RNA

SEQ ID NO: 10648 - RNA, 8787 nt, synthetic construct; identical to SEQ ID NO: 9051
  modified_base 1..8787: mod_base = OTHER; note = Each t is m1f
  source 1..8787: mol_type = other RNA

SEQ ID NO: 10649 - RNA, 8787 nt, synthetic construct; identical to SEQ ID NO: 9052
  modified_base 1..8787: mod_base = OTHER; note = Each t is m1f
  source 1..8787: mol_type = other RNA

SEQ ID NO: 10650 - RNA, 8787 nt, synthetic construct; identical to SEQ ID NO: 9053
  modified_base 1..8787: mod_base = OTHER; note = Each t is m1f
  source 1..8787: mol_type = other RNA

SEQ ID NO: 10651 - RNA, 8787 nt, synthetic construct; identical to SEQ ID NO: 9054
  modified_base 1..8787: mod_base = OTHER; note = Each t is m1f
  source 1..8787: mol_type = other RNA

SEQ ID NO: 10652 - RNA, 8787 nt, synthetic construct; identical to SEQ ID NO: 9055
  modified_base 1..8787: mod_base = OTHER; note = Each t is m1f
  source 1..8787: mol_type = other RNA

SEQ ID NO: 10653 - RNA, 8787 nt, synthetic construct; identical to SEQ ID NO: 9056
  modified_base 1..8787: mod_base = OTHER; note = Each t is m1f
  source 1..8787: mol_type = other RNA

SEQ ID NO: 10654 - RNA, 8787 nt, synthetic construct; identical to SEQ ID NO: 9057
  modified_base 1..8787: mod_base = OTHER; note = Each t is m1f
  source 1..8787: mol_type = other RNA

SEQ ID NO: 10655 - RNA, 8787 nt, synthetic construct; identical to SEQ ID NO: 9058
  modified_base 1..8787: mod_base = OTHER; note = Each t is m1f
  source 1..8787: mol_type = other RNA

SEQ ID NO: 10656 - RNA, 8787 nt, synthetic construct; identical to SEQ ID NO: 9059
  modified_base 1..8787: mod_base = OTHER; note = Each t is m1f
  source 1..8787: mol_type = other RNA

SEQ ID NO: 10657 - RNA, 8787 nt, synthetic construct; identical to SEQ ID NO: 9060
  modified_base 1..8787: mod_base = OTHER; note = Each t is m1f
  source 1..8787: mol_type = other RNA

SEQ ID NO: 10658 - RNA, 8787 nt, synthetic construct; identical to SEQ ID NO: 9061
  modified_base 1..8787: mod_base = OTHER; note = Each t is m1f
  source 1..8787: mol_type = other RNA

SEQ ID NO: 10659 - RNA, 8787 nt, synthetic construct; identical to SEQ ID NO: 9062
  modified_base 1..8787: mod_base = OTHER; note = Each t is m1f
  source 1..8787: mol_type = other RNA

SEQ ID NO: 10660 - RNA, 8787 nt, synthetic construct; identical to SEQ ID NO: 9063
  modified_base 1..8787: mod_base = OTHER; note = Each t is m1f
  source 1..8787: mol_type = other RNA

SEQ ID NO: 10661 - RNA, 8787 nt, synthetic construct; identical to SEQ ID NO: 9064
  modified_base 1..8787: mod_base = OTHER; note = Each t is m1f
  source 1..8787: mol_type = other RNA

SEQ ID NO: 10662 - RNA, 8787 nt, synthetic construct; identical to SEQ ID NO: 9065
  modified_base 1..8787: mod_base = OTHER; note = Each t is m1f
  source 1..8787: mol_type = other RNA

SEQ ID NO: 10663 - RNA, 8787 nt, synthetic construct; identical to SEQ ID NO: 9066
  modified_base 1..8787: mod_base = OTHER; note = Each t is m1f
  source 1..8787: mol_type = other RNA

SEQ ID NO: 10664 - RNA, 8787 nt, synthetic construct; identical to SEQ ID NO: 9067
  modified_base 1..8787: mod_base = OTHER; note = Each t is m1f
  source 1..8787: mol_type = other RNA

SEQ ID NO: 10665 - RNA, 8787 nt, synthetic construct; identical to SEQ ID NO: 9068
  modified_base 1..8787: mod_base = OTHER; note = Each t is m1f
  source 1..8787: mol_type = other RNA

SEQ ID NO: 10666 - RNA, 8787 nt, synthetic construct; identical to SEQ ID NO: 9069
  modified_base 1..8787: mod_base = OTHER; note = Each t is m1f
  source 1..8787: mol_type = other RNA

SEQ ID NO: 10667 - RNA, 8787 nt, synthetic construct; identical to SEQ ID NO: 9070
  modified_base 1..8787: mod_base = OTHER; note = Each t is m1f
  source 1..8787: mol_type = other RNA

SEQ ID NO: 10668 - RNA, 8787 nt, synthetic construct; identical to SEQ ID NO: 9071
  modified_base 1..8787: mod_base = OTHER; note = Each t is m1f
  source 1..8787: mol_type = other RNA

SEQ ID NO: 10669 - RNA, 8784 nt, synthetic construct; identical to SEQ ID NO: 9072
  modified_base 1..8784: mod_base = OTHER; note = Each t is m1f
  source 1..8784: mol_type = other RNA

SEQ ID NO: 10670 - RNA, 8787 nt, synthetic construct; identical to SEQ ID NO: 9073
  modified_base 1..8787: mod_base = OTHER; note = Each t is m1f
  source 1..8787: mol_type = other RNA

SEQ ID NO: 10671 - RNA, 8787 nt, synthetic construct; identical to SEQ ID NO: 9074
  modified_base 1..8787: mod_base = OTHER; note = Each t is m1f
  source 1..8787: mol_type = other RNA

SEQ ID NO: 10672 - RNA, 8787 nt, synthetic construct; identical to SEQ ID NO: 9075
  modified_base 1..8787: mod_base = OTHER; note = Each t is m1f
  source 1..8787: mol_type = other RNA

SEQ ID NO: 10673 - RNA, 8787 nt, synthetic construct; identical to SEQ ID NO: 9076
  modified_base 1..8787: mod_base = OTHER; note = Each t is m1f
  source 1..8787: mol_type = other RNA

SEQ ID NO: 10674 - RNA, 8787 nt, synthetic construct; identical to SEQ ID NO: 9077
  modified_base 1..8787: mod_base = OTHER; note = Each t is m1f
  source 1..8787: mol_type = other RNA

SEQ ID NO: 10675 - RNA, 8787 nt, synthetic construct; identical to SEQ ID NO: 9078
  modified_base 1..8787: mod_base = OTHER; note = Each t is m1f
  source 1..8787: mol_type = other RNA

SEQ ID NO: 10676 - RNA, 8787 nt, synthetic construct; identical to SEQ ID NO: 9079
  modified_base 1..8787: mod_base = OTHER; note = Each t is m1f
  source 1..8787: mol_type = other RNA

SEQ ID NO: 10677 - RNA, 8787 nt, synthetic construct; identical to SEQ ID NO: 9080
  modified_base 1..8787: mod_base = OTHER; note = Each t is m1f
  source 1..8787: mol_type = other RNA

SEQ ID NO: 10678 - RNA, 8787 nt, synthetic construct; identical to SEQ ID NO: 9081
  modified_base 1..8787: mod_base = OTHER; note = Each t is m1f
  source 1..8787: mol_type = other RNA

SEQ ID NO: 10679 - RNA, 8787 nt, synthetic construct; identical to SEQ ID NO: 9082
  modified_base 1..8787: mod_base = OTHER; note = Each t is m1f
  source 1..8787: mol_type = other RNA

SEQ ID NO: 10680 - RNA, 8784 nt, synthetic construct; identical to SEQ ID NO: 9083
  modified_base 1..8784: mod_base = OTHER; note = Each t is m1f
  source 1..8784: mol_type = other RNA

SEQ ID NO: 10681 - RNA, 8787 nt, synthetic construct; identical to SEQ ID NO: 9084
  modified_base 1..8787: mod_base = OTHER; note = Each t is m1f
  source 1..8787: mol_type = other RNA

SEQ ID NO: 10682 - RNA, 8787 nt, synthetic construct; identical to SEQ ID NO: 9085
  modified_base 1..8787: mod_base = OTHER; note = Each t is m1f
  source 1..8787: mol_type = other RNA

SEQ ID NO: 10683 - RNA, 8787 nt, synthetic construct; identical to SEQ ID NO: 9086
  modified_base 1..8787: mod_base = OTHER; note = Each t is m1f
  source 1..8787: mol_type = other RNA

SEQ ID NO: 10684 - RNA, 8787 nt, synthetic construct; identical to SEQ ID NO: 9087
  modified_base 1..8787: mod_base = OTHER; note = Each t is m1f
  source 1..8787: mol_type = other RNA

SEQ ID NO: 10685 - RNA, 8787 nt, synthetic construct; identical to SEQ ID NO: 9088
  modified_base 1..8787: mod_base = OTHER; note = Each t is m1f
  source 1..8787: mol_type = other RNA

SEQ ID NO: 10686 - RNA, 8787 nt, synthetic construct; identical to SEQ ID NO: 9089
  modified_base 1..8787: mod_base = OTHER; note = Each t is m1f
  source 1..8787: mol_type = other RNA

SEQ ID NO: 10687 - RNA, 8787 nt, synthetic construct; identical to SEQ ID NO: 9090
  modified_base 1..8787: mod_base = OTHER; note = Each t is m1f
  source 1..8787: mol_type = other RNA

SEQ ID NO: 10688 - RNA, 8787 nt, synthetic construct; identical to SEQ ID NO: 9091
  modified_base 1..8787: mod_base = OTHER; note = Each t is m1f
  source 1..8787: mol_type = other RNA

SEQ ID NO: 10689 - RNA, 8787 nt, synthetic construct; identical to SEQ ID NO: 9092
  modified_base 1..8787: mod_base = OTHER; note = Each t is m1f
  source 1..8787: mol_type = other RNA

SEQ ID NO: 10690 - RNA, 8787 nt, synthetic construct; identical to SEQ ID NO: 9093
  modified_base 1..8787: mod_base = OTHER; note = Each t is m1f
  source 1..8787: mol_type = other RNA

SEQ ID NO: 10691 - RNA, 8787 nt, synthetic construct; identical to SEQ ID NO: 9094
  modified_base 1..8787: mod_base = OTHER; note = Each t is m1f
  source 1..8787: mol_type = other RNA

SEQ ID NO: 10692 - RNA, 8787 nt, synthetic construct; identical to SEQ ID NO: 9095
  modified_base 1..8787: mod_base = OTHER; note = Each t is m1f
  source 1..8787: mol_type = other RNA

SEQ ID NO: 10693 - RNA, 8787 nt, synthetic construct; identical to SEQ ID NO: 9096
  modified_base 1..8787: mod_base = OTHER; note = Each t is m1f
  source 1..8787: mol_type = other RNA

SEQ ID NO: 10694 - RNA, 8787 nt, synthetic construct; identical to SEQ ID NO: 9097
  modified_base 1..8787: mod_base = OTHER; note = Each t is m1f
  source 1..8787: mol_type = other RNA

SEQ ID NO: 10695 - RNA, 8787 nt, synthetic construct; identical to SEQ ID NO: 9098
  modified_base 1..8787: mod_base = OTHER; note = Each t is m1f
  source 1..8787: mol_type = other RNA

SEQ ID NO: 10696 - RNA, 8787 nt, synthetic construct; identical to SEQ ID NO: 9099
  modified_base 1..8787: mod_base = OTHER; note = Each t is m1f
  source 1..8787: mol_type = other RNA

SEQ ID NO: 10697 - RNA, 8787 nt, synthetic construct; identical to SEQ ID NO: 9100
  modified_base 1..8787: mod_base = OTHER; note = Each t is m1f
  source 1..8787: mol_type = other RNA

SEQ ID NO: 10698 - RNA, 8787 nt, synthetic construct; identical to SEQ ID NO: 9101
  modified_base 1..8787: mod_base = OTHER; note = Each t is m1f
  source 1..8787: mol_type = other RNA

SEQ ID NO: 10699 - RNA, 8787 nt, synthetic construct; identical to SEQ ID NO: 9102
  modified_base 1..8787: mod_base = OTHER; note = Each t is m1f
  source 1..8787: mol_type = other RNA

SEQ ID NO: 10700 - RNA, 8787 nt, synthetic construct; identical to SEQ ID NO: 9103
  modified_base 1..8787: mod_base = OTHER; note = Each t is m1f
  source 1..8787: mol_type = other RNA

SEQ ID NO: 10701 - RNA, 8787 nt, synthetic construct; identical to SEQ ID NO: 9104
  modified_base 1..8787: mod_base = OTHER; note = Each t is m1f
  source 1..8787: mol_type = other RNA

SEQ ID NO: 10702 - RNA, 8787 nt, synthetic construct; identical to SEQ ID NO: 9105
  modified_base 1..8787: mod_base = OTHER; note = Each t is m1f
  source 1..8787: mol_type = other RNA

SEQ ID NO: 10703 - RNA, 8787 nt, synthetic construct; identical to SEQ ID NO: 9106
  modified_base 1..8787: mod_base = OTHER; note = Each t is m1f
  source 1..8787: mol_type = other RNA

SEQ ID NO: 10704 - RNA, 8787 nt, synthetic construct; identical to SEQ ID NO: 9107
  modified_base 1..8787: mod_base = OTHER; note = Each t is m1f
  source 1..8787: mol_type = other RNA

SEQ ID NO: 10705 - RNA, 8787 nt, synthetic construct; identical to SEQ ID NO: 9108
  modified_base 1..8787: mod_base = OTHER; note = Each t is m1f
  source 1..8787: mol_type = other RNA

SEQ ID NO: 10706 - RNA, 8787 nt, synthetic construct; identical to SEQ ID NO: 9109
  modified_base 1..8787: mod_base = OTHER; note = Each t is m1f
  source 1..8787: mol_type = other RNA

SEQ ID NO: 10707 - RNA, 8787 nt, synthetic construct; identical to SEQ ID NO: 9110
  modified_base 1..8787: mod_base = OTHER; note = Each t is m1f
  source 1..8787: mol_type = other RNA

SEQ ID NO: 10708 - RNA, 8784 nt, synthetic construct; identical to SEQ ID NO: 9111
  modified_base 1..8784: mod_base = OTHER; note = Each t is m1f
  source 1..8784: mol_type = other RNA

SEQ ID NO: 10709 - RNA, 8787 nt, synthetic construct; identical to SEQ ID NO: 9112
  modified_base 1..8787: mod_base = OTHER; note = Each t is m1f
  source 1..8787: mol_type = other RNA

SEQ ID NO: 10710 - RNA, 8787 nt, synthetic construct; identical to SEQ ID NO: 9113
  modified_base 1..8787: mod_base = OTHER; note = Each t is m1f
  source 1..8787: mol_type = other RNA

SEQ ID NO: 10711 - RNA, 8787 nt, synthetic construct; identical to SEQ ID NO: 9114
  modified_base 1..8787: mod_base = OTHER; note = Each t is m1f
  source 1..8787: mol_type = other RNA

SEQ ID NO: 10712 - RNA, 8787 nt, synthetic construct; identical to SEQ ID NO: 9115
  modified_base 1..8787: mod_base = OTHER; note = Each t is m1f
  source 1..8787: mol_type = other RNA

SEQ ID NO: 10713 - RNA, 8787 nt, synthetic construct; identical to SEQ ID NO: 9116
  modified_base 1..8787: mod_base = OTHER; note = Each t is m1f
  source 1..8787: mol_type = other RNA

SEQ ID NO: 10714 - RNA, 8787 nt, synthetic construct; identical to SEQ ID NO: 9117
  modified_base 1..8787: mod_base = OTHER; note = Each t is m1f
  source 1..8787: mol_type = other RNA

SEQ ID NO: 10715 - RNA, 8787 nt, synthetic construct; identical to SEQ ID NO: 9118
  modified_base 1..8787: mod_base = OTHER; note = Each t is m1f
  source 1..8787: mol_type = other RNA

SEQ ID NO: 10716 - RNA, 8787 nt, synthetic construct; identical to SEQ ID NO: 9119
  modified_base 1..8787: mod_base = OTHER; note = Each t is m1f
  source 1..8787: mol_type = other RNA

SEQ ID NO: 10717 - RNA, 8787 nt, synthetic construct; identical to SEQ ID NO: 9120
  modified_base 1..8787: mod_base = OTHER; note = Each t is m1f
  source 1..8787: mol_type = other RNA

SEQ ID NO: 10718 - RNA, 8787 nt, synthetic construct; identical to SEQ ID NO: 9121
  modified_base 1..8787: mod_base = OTHER; note = Each t is m1f
  source 1..8787: mol_type = other RNA

SEQ ID NO: 10719 - RNA, 8787 nt, synthetic construct; identical to SEQ ID NO: 9122
  modified_base 1..8787: mod_base = OTHER; note = Each t is m1f
  source 1..8787: mol_type = other RNA

SEQ ID NO: 10720 - RNA, 8787 nt, synthetic construct; identical to SEQ ID NO: 9123
  modified_base 1..8787: mod_base = OTHER; note = Each t is m1f
  source 1..8787: mol_type = other RNA

SEQ ID NO: 10721 - RNA, 8787 nt, synthetic construct; identical to SEQ ID NO: 9124
  modified_base 1..8787: mod_base = OTHER; note = Each t is m1f
  source 1..8787: mol_type = other RNA

SEQ ID NO: 10722 - RNA, 8787 nt, synthetic construct; identical to SEQ ID NO: 9125
  modified_base 1..8787: mod_base = OTHER; note = Each t is m1f
  source 1..8787: mol_type = other RNA

SEQ ID NO: 10723 - RNA, 8787 nt, synthetic construct; identical to SEQ ID NO: 9126
  modified_base 1..8787: mod_base = OTHER; note = Each t is m1f
  source 1..8787: mol_type = other RNA

SEQ ID NO: 10724 - RNA, 8787 nt, synthetic construct; identical to SEQ ID NO: 9127
  modified_base 1..8787: mod_base = OTHER; note = Each t is m1f
  source 1..8787: mol_type = other RNA

SEQ ID NO: 10725 - RNA, 8787 nt, synthetic construct; identical to SEQ ID NO: 9128
  modified_base 1..8787: mod_base = OTHER; note = Each t is m1f
  source 1..8787: mol_type = other RNA

SEQ ID NO: 10726 - RNA, 8787 nt, synthetic construct; identical to SEQ ID NO: 9129
  modified_base 1..8787: mod_base = OTHER; note = Each t is m1f
  source 1..8787: mol_type = other RNA

SEQ ID NO: 10727 - RNA, 8787 nt, synthetic construct; identical to SEQ ID NO: 9130
  modified_base 1..8787: mod_base = OTHER; note = Each t is m1f
  source 1..8787: mol_type = other RNA

SEQ ID NO: 10728 - RNA, 8787 nt, synthetic construct; identical to SEQ ID NO: 9131
  modified_base 1..8787: mod_base = OTHER; note = Each t is m1f
  source 1..8787: mol_type = other RNA

SEQ ID NO: 10729 - RNA, 8787 nt, synthetic construct; identical to SEQ ID NO: 9132
  modified_base 1..8787: mod_base = OTHER; note = Each t is m1f
  source 1..8787: mol_type = other RNA

SEQ ID NO: 10730 - RNA, 8787 nt, synthetic construct; identical to SEQ ID NO: 9133
  modified_base 1..8787: mod_base = OTHER; note = Each t is m1f
  source 1..8787: mol_type = other RNA

SEQ ID NO: 10731 - RNA, 8787 nt, synthetic construct; identical to SEQ ID NO: 9134
  modified_base 1..8787: mod_base = OTHER; note = Each t is m1f
  source 1..8787: mol_type = other RNA

SEQ ID NO: 10732 - RNA, 8787 nt, synthetic construct; identical to SEQ ID NO: 9135
  modified_base 1..8787: mod_base = OTHER; note = Each t is m1f
  source 1..8787: mol_type = other RNA

SEQ ID NO: 10733 - RNA, 8787 nt, synthetic construct; identical to SEQ ID NO: 9136
  modified_base 1..8787: mod_base = OTHER; note = Each t is m1f
  source 1..8787: mol_type = other RNA

SEQ ID NO: 10734 - RNA, 8787 nt, synthetic construct; identical to SEQ ID NO: 9137
  modified_base 1..8787: mod_base = OTHER; note = Each t is m1f
  source 1..8787: mol_type = other RNA

SEQ ID NO: 10735 - RNA, 8787 nt, synthetic construct; identical to SEQ ID NO: 9138
  modified_base 1..8787: mod_base = OTHER; note = Each t is m1f
  source 1..8787: mol_type = other RNA

SEQ ID NO: 10736 - RNA, 8787 nt, synthetic construct; identical to SEQ ID NO: 9139
  modified_base 1..8787: mod_base = OTHER; note = Each t is m1f
  source 1..8787: mol_type = other RNA

SEQ ID NO: 10737 - RNA, 8787 nt, synthetic construct; identical to SEQ ID NO: 9140
  modified_base 1..8787: mod_base = OTHER; note = Each t is m1f
  source 1..8787: mol_type = other RNA

SEQ ID NO: 10738 - RNA, 8787 nt, synthetic construct; identical to SEQ ID NO: 9141
  modified_base 1..8787: mod_base = OTHER; note = Each t is m1f
  source 1..8787: mol_type = other RNA

SEQ ID NO: 10739 - RNA, 8787 nt, synthetic construct; identical to SEQ ID NO: 9142
  modified_base 1..8787: mod_base = OTHER; note = Each t is m1f
  source 1..8787: mol_type = other RNA

SEQ ID NO: 10740 - RNA, 8787 nt, synthetic construct; identical to SEQ ID NO: 9143
  modified_base 1..8787: mod_base = OTHER; note = Each t is m1f
  source 1..8787: mol_type = other RNA

SEQ ID NO: 10741 - RNA, 8787 nt, synthetic construct; identical to SEQ ID NO: 9144
  modified_base 1..8787: mod_base = OTHER; note = Each t is m1f
  source 1..8787: mol_type = other RNA

SEQ ID NO: 10742 - RNA, 8787 nt, synthetic construct; identical to SEQ ID NO: 9145
  modified_base 1..8787: mod_base = OTHER; note = Each t is m1f
  source 1..8787: mol_type = other RNA

SEQ ID NO: 10743 - RNA, 8787 nt, synthetic construct; identical to SEQ ID NO: 9146
  modified_base 1..8787: mod_base = OTHER; note = Each t is m1f
  source 1..8787: mol_type = other RNA

SEQ ID NO: 10744 - RNA, 8787 nt, synthetic construct; identical to SEQ ID NO: 9147
  modified_base 1..8787: mod_base = OTHER; note = Each t is m1f
  source 1..8787: mol_type = other RNA

SEQ ID NO: 10745 - RNA, 8787 nt, synthetic construct; identical to SEQ ID NO: 9148
  modified_base 1..8787: mod_base = OTHER; note = Each t is m1f
  source 1..8787: mol_type = other RNA

SEQ ID NO: 10746 - RNA, 8787 nt, synthetic construct; identical to SEQ ID NO: 9149
  modified_base 1..8787: mod_base = OTHER; note = Each t is m1f
  source 1..8787: mol_type = other RNA

SEQ ID NO: 10747 - RNA, 8787 nt, synthetic construct; identical to SEQ ID NO: 9150
  modified_base 1..8787: mod_base = OTHER; note = Each t is m1f
  source 1..8787: mol_type = other RNA

SEQ ID NO: 10748 - RNA, 8787 nt, synthetic construct; identical to SEQ ID NO: 9151
  modified_base 1..8787: mod_base = OTHER; note = Each t is m1f
  source 1..8787: mol_type = other RNA

SEQ ID NO: 10749 - RNA, 8787 nt, synthetic construct; identical to SEQ ID NO: 9152
  modified_base 1..8787: mod_base = OTHER; note = Each t is m1f
  source 1..8787: mol_type = other RNA

SEQ ID NO: 10750 - RNA, 8787 nt, synthetic construct; identical to SEQ ID NO: 9153
  modified_base 1..8787: mod_base = OTHER; note = Each t is m1f
  source 1..8787: mol_type = other RNA

SEQ ID NO: 10751 - RNA, 8787 nt, synthetic construct; identical to SEQ ID NO: 9154
  modified_base 1..8787: mod_base = OTHER; note = Each t is m1f
  source 1..8787: mol_type = other RNA

SEQ ID NO: 10752 - RNA, 8787 nt, synthetic construct; identical to SEQ ID NO: 9155
  modified_base 1..8787: mod_base = OTHER; note = Each t is m1f
  source 1..8787: mol_type = other RNA

SEQ ID NO: 10753 - RNA, 8787 nt, synthetic construct; identical to SEQ ID NO: 9156
  modified_base 1..8787: mod_base = OTHER; note = Each t is m1f
  source 1..8787: mol_type = other RNA

SEQ ID NO: 10754 - RNA, 8787 nt, synthetic construct; identical to SEQ ID NO: 9157
  modified_base 1..8787: mod_base = OTHER; note = Each t is m1f
  source 1..8787: mol_type = other RNA

SEQ ID NO: 10755 - RNA, 8787 nt, synthetic construct; identical to SEQ ID NO: 9158
  modified_base 1..8787: mod_base = OTHER; note = Each t is m1f
  source 1..8787: mol_type = other RNA

SEQ ID NO: 10756 - RNA, 8787 nt, synthetic construct; identical to SEQ ID NO: 9159
  modified_base 1..8787: mod_base = OTHER; note = Each t is m1f
  source 1..8787: mol_type = other RNA

SEQ ID NO: 10757 - RNA, 8787 nt, synthetic construct; identical to SEQ ID NO: 9160
  modified_base 1..8787: mod_base = OTHER; note = Each t is m1f
  source 1..8787: mol_type = other RNA

SEQ ID NO: 10758 - RNA, 8787 nt, synthetic construct; identical to SEQ ID NO: 9161
  modified_base 1..8787: mod_base = OTHER; note = Each t is m1f
  source 1..8787: mol_type = other RNA

SEQ ID NO: 10759 - RNA, 8787 nt, synthetic construct; identical to SEQ ID NO: 9162
  modified_base 1..8787: mod_base = OTHER; note = Each t is m1f
  source 1..8787: mol_type = other RNA

SEQ ID NO: 10760 - RNA, 8787 nt, synthetic construct; identical to SEQ ID NO: 9163
  modified_base 1..8787: mod_base = OTHER; note = Each t is m1f
  source 1..8787: mol_type = other RNA

SEQ ID NO: 10761 - RNA, 8796 nt, synthetic construct; identical to SEQ ID NO: 9164
  modified_base 1..8796: mod_base = OTHER; note = Each t is m1f
  source 1..8796: mol_type = other RNA

SEQ ID NO: 10762 - RNA, 8787 nt, synthetic construct; identical to SEQ ID NO: 9165
  modified_base 1..8787: mod_base = OTHER; note = Each t is m1f
  source 1..8787: mol_type = other RNA

SEQ ID NO: 10763 - RNA, 8787 nt, synthetic construct; identical to SEQ ID NO: 9166
  modified_base 1..8787: mod_base = OTHER; note = Each t is m1f
  source 1..8787: mol_type = other RNA

SEQ ID NO: 10764 - RNA, 8787 nt, synthetic construct; identical to SEQ ID NO: 9167
  modified_base 1..8787: mod_base = OTHER; note = Each t is m1f
  source 1..8787: mol_type = other RNA

SEQ ID NO: 10765 - RNA, 8787 nt, synthetic construct; identical to SEQ ID NO: 9168
  modified_base 1..8787: mod_base = OTHER; note = Each t is m1f
  source 1..8787: mol_type = other RNA

SEQ ID NO: 10766 - RNA, 8787 nt, synthetic construct; identical to SEQ ID NO: 9169
  modified_base 1..8787: mod_base = OTHER; note = Each t is m1f
  source 1..8787: mol_type = other RNA

SEQ ID NO: 10767 - RNA, 8784 nt, synthetic construct; identical to SEQ ID NO: 9170
  modified_base 1..8784: mod_base = OTHER; note = Each t is m1f
  source 1..8784: mol_type = other RNA

SEQ ID NO: 10768 - RNA, 8787 nt, synthetic construct; identical to SEQ ID NO: 9171
  modified_base 1..8787: mod_base = OTHER; note = Each t is m1f
  source 1..8787: mol_type = other RNA

SEQ ID NO: 10769 - RNA, 8787 nt, synthetic construct; identical to SEQ ID NO: 9172
  modified_base 1..8787: mod_base = OTHER; note = Each t is m1f
  source 1..8787: mol_type = other RNA

SEQ ID NO: 10770 - RNA, 8787 nt, synthetic construct; identical to SEQ ID NO: 9173
  modified_base 1..8787: mod_base = OTHER; note = Each t is m1f
  source 1..8787: mol_type = other RNA

SEQ ID NO: 10771 - RNA, 8787 nt, synthetic construct; identical to SEQ ID NO: 9174
  modified_base 1..8787: mod_base = OTHER; note = Each t is m1f
  source 1..8787: mol_type = other RNA

SEQ ID NO: 10772 - RNA, 8787 nt, synthetic construct; identical to SEQ ID NO: 9175
  modified_base 1..8787: mod_base = OTHER; note = Each t is m1f
  source 1..8787: mol_type = other RNA

SEQ ID NO: 10773 - RNA, 8787 nt, synthetic construct; identical to SEQ ID NO: 9176
  modified_base 1..8787: mod_base = OTHER; note = Each t is m1f
  source 1..8787: mol_type = other RNA

SEQ ID NO: 10774 - RNA, 8805 nt, synthetic construct; identical to SEQ ID NO: 9177
  modified_base 1..8805: mod_base = OTHER; note = Each t is m1f
  source 1..8805: mol_type = other RNA

SEQ ID NO: 10775 - RNA, 8787 nt, synthetic construct; identical to SEQ ID NO: 9178
  modified_base 1..8787: mod_base = OTHER; note = Each t is m1f
  source 1..8787: mol_type = other RNA

SEQ ID NO: 10776 - RNA, 8787 nt, synthetic construct; identical to SEQ ID NO: 9179
  modified_base 1..8787: mod_base = OTHER; note = Each t is m1f
  source 1..8787: mol_type = other RNA

SEQ ID NO: 10777 - RNA, 8787 nt, synthetic construct; identical to SEQ ID NO: 9180
  modified_base 1..8787: mod_base = OTHER; note = Each t is m1f
  source 1..8787: mol_type = other RNA

SEQ ID NO: 10778 - RNA, 8787 nt, synthetic construct; identical to SEQ ID NO: 9181
  modified_base 1..8787: mod_base = OTHER; note = Each t is m1f
  source 1..8787: mol_type = other RNA

SEQ ID NO: 10779 - RNA, 8787 nt, synthetic construct; identical to SEQ ID NO: 9182
  modified_base 1..8787: mod_base = OTHER; note = Each t is m1f
  source 1..8787: mol_type = other RNA

SEQ ID NO: 10780 - RNA, 8787 nt, synthetic construct; identical to SEQ ID NO: 9183
  modified_base 1..8787: mod_base = OTHER; note = Each t is m1f
  source 1..8787: mol_type = other RNA

SEQ ID NO: 10781 - RNA, 8787 nt, synthetic construct; identical to SEQ ID NO: 9184
  modified_base 1..8787: mod_base = OTHER; note = Each t is m1f
  source 1..8787: mol_type = other RNA

SEQ ID NO: 10782 - RNA, 8787 nt, synthetic construct; identical to SEQ ID NO: 9185
  modified_base 1..8787: mod_base = OTHER; note = Each t is m1f
  source 1..8787: mol_type = other RNA

SEQ ID NO: 10783 - RNA, 8787 nt, synthetic construct; identical to SEQ ID NO: 9186
  modified_base 1..8787: mod_base = OTHER; note = Each t is m1f
  source 1..8787: mol_type = other RNA

SEQ ID NO: 10784 - RNA, 8787 nt, synthetic construct; identical to SEQ ID NO: 9187
  modified_base 1..8787: mod_base = OTHER; note = Each t is m1f
  source 1..8787: mol_type = other RNA

SEQ ID NO: 10785 - RNA, 8787 nt, synthetic construct; identical to SEQ ID NO: 9188
  modified_base 1..8787: mod_base = OTHER; note = Each t is m1f
  source 1..8787: mol_type = other RNA

SEQ ID NO: 10786 - RNA, 8787 nt, synthetic construct; identical to SEQ ID NO: 9189
  modified_base 1..8787: mod_base = OTHER; note = Each t is m1f
  source 1..8787: mol_type = other RNA

SEQ ID NO: 10787 - RNA, 8787 nt, synthetic construct; identical to SEQ ID NO: 9190
  modified_base 1..8787: mod_base = OTHER; note = Each t is m1f
  source 1..8787: mol_type = other RNA

SEQ ID NO: 10788 - RNA, 8787 nt, synthetic construct; identical to SEQ ID NO: 9191
  modified_base 1..8787: mod_base = OTHER; note = Each t is m1f
  source 1..8787: mol_type = other RNA

SEQ ID NO: 10789 - RNA, 8787 nt, synthetic construct; identical to SEQ ID NO: 9192
  modified_base 1..8787: mod_base = OTHER; note = Each t is m1f
  source 1..8787: mol_type = other RNA

SEQ ID NO: 10790 - RNA, 8787 nt, synthetic construct; identical to SEQ ID NO: 9193
  modified_base 1..8787: mod_base = OTHER; note = Each t is m1f
  source 1..8787: mol_type = other RNA

SEQ ID NO: 10791 - RNA, 8787 nt, synthetic construct; identical to SEQ ID NO: 9194
  modified_base 1..8787: mod_base = OTHER; note = Each t is m1f
  source 1..8787: mol_type = other RNA

SEQ ID NO: 10792 - RNA, 8787 nt, synthetic construct; identical to SEQ ID NO: 9195
  modified_base 1..8787: mod_base = OTHER; note = Each t is m1f
  source 1..8787: mol_type = other RNA

SEQ ID NO: 10793 - RNA, 8787 nt, synthetic construct; identical to SEQ ID NO: 9196
  modified_base 1..8787: mod_base = OTHER; note = Each t is m1f
  source 1..8787: mol_type = other RNA

SEQ ID NO: 10794 - RNA, 8787 nt, synthetic construct; identical to SEQ ID NO: 9197
  modified_base 1..8787: mod_base = OTHER; note = Each t is m1f
  source 1..8787: mol_type = other RNA

SEQ ID NO: 10795 - RNA, 8787 nt, synthetic construct; identical to SEQ ID NO: 9198
  modified_base 1..8787: mod_base = OTHER; note = Each t is m1f
  source 1..8787: mol_type = other RNA

SEQ ID NO: 10796 - RNA, 8787 nt, synthetic construct; identical to SEQ ID NO: 9199
  modified_base 1..8787: mod_base = OTHER; note = Each t is m1f
  source 1..8787: mol_type = other RNA

SEQ ID NO: 10797 - RNA, 8787 nt, synthetic construct; identical to SEQ ID NO: 9200
  modified_base 1..8787: mod_base = OTHER; note = Each t is m1f
  source 1..8787: mol_type = other RNA

SEQ ID NO: 10798 - RNA, 8787 nt, synthetic construct; identical to SEQ ID NO: 9201
  modified_base 1..8787: mod_base = OTHER; note = Each t is m1f
  source 1..8787: mol_type = other RNA

SEQ ID NO: 10799 - RNA, 8787 nt, synthetic construct; identical to SEQ ID NO: 9202
  modified_base 1..8787: mod_base = OTHER; note = Each t is m1f
  source 1..8787: mol_type = other RNA

SEQ ID NO: 10800 - RNA, 8787 nt, synthetic construct; identical to SEQ ID NO: 9203
  modified_base 1..8787: mod_base = OTHER; note = Each t is m1f
  source 1..8787: mol_type = other RNA

SEQ ID NO: 10801 - RNA, 8787 nt, synthetic construct; identical to SEQ ID NO: 9204
  modified_base 1..8787: mod_base = OTHER; note = Each t is m1f
  source 1..8787: mol_type = other RNA

SEQ ID NO: 10802 - RNA, 8787 nt, synthetic construct; identical to SEQ ID NO: 9205
  modified_base 1..8787: mod_base = OTHER; note = Each t is m1f
  source 1..8787: mol_type = other RNA

SEQ ID NO: 10803 - RNA, 8787 nt, synthetic construct; identical to SEQ ID NO: 9206
  modified_base 1..8787: mod_base = OTHER; note = Each t is m1f
  source 1..8787: mol_type = other RNA

SEQ ID NO: 10804 - RNA, 8787 nt, synthetic construct; identical to SEQ ID NO: 9207
  modified_base 1..8787: mod_base = OTHER; note = Each t is m1f
  source 1..8787: mol_type = other RNA

SEQ ID NO: 10805 - RNA, 8787 nt, synthetic construct; identical to SEQ ID NO: 9208
  modified_base 1..8787: mod_base = OTHER; note = Each t is m1f
  source 1..8787: mol_type = other RNA

SEQ ID NO: 10806 - RNA, 8787 nt, synthetic construct; identical to SEQ ID NO: 9209
  modified_base 1..8787: mod_base = OTHER; note = Each t is m1f
  source 1..8787: mol_type = other RNA

SEQ ID NO: 10807 - RNA, 8805 nt, synthetic construct; identical to SEQ ID NO: 9210
  modified_base 1..8805: mod_base = OTHER; note = Each t is m1f
  source 1..8805: mol_type = other RNA

SEQ ID NO: 10808 - RNA, 8787 nt, synthetic construct; identical to SEQ ID NO: 9211
  modified_base 1..8787: mod_base = OTHER; note = Each t is m1f
  source 1..8787: mol_type = other RNA

SEQ ID NO: 10809 - RNA, 8787 nt, synthetic construct; identical to SEQ ID NO: 9212
  modified_base 1..8787: mod_base = OTHER; note = Each t is m1f
  source 1..8787: mol_type = other RNA

SEQ ID NO: 10810 - RNA, 8787 nt, synthetic construct; identical to SEQ ID NO: 9213
  modified_base 1..8787: mod_base = OTHER; note = Each t is m1f
  source 1..8787: mol_type = other RNA

SEQ ID NO: 10811 - RNA, 8787 nt, synthetic construct; identical to SEQ ID NO: 9214
  modified_base 1..8787: mod_base = OTHER; note = Each t is m1f
  source 1..8787: mol_type = other RNA

SEQ ID NO: 10812 - RNA, 8787 nt, synthetic construct; identical to SEQ ID NO: 9215
  modified_base 1..8787: mod_base = OTHER; note = Each t is m1f
  source 1..8787: mol_type = other RNA

SEQ ID NO: 10813 - RNA, 8787 nt, synthetic construct; identical to SEQ ID NO: 9216
  modified_base 1..8787: mod_base = OTHER; note = Each t is m1f
  source 1..8787: mol_type = other RNA

SEQ ID NO: 10814 - RNA, 8787 nt, synthetic construct; identical to SEQ ID NO: 9217
  modified_base 1..8787: mod_base = OTHER; note = Each t is m1f
  source 1..8787: mol_type = other RNA

SEQ ID NO: 10815 - RNA, 8787 nt, synthetic construct; identical to SEQ ID NO: 9218
  modified_base 1..8787: mod_base = OTHER; note = Each t is m1f
  source 1..8787: mol_type = other RNA

SEQ ID NO: 10816 - RNA, 8796 nt, synthetic construct; identical to SEQ ID NO: 9219
  modified_base 1..8796: mod_base = OTHER; note = Each t is m1f
  source 1..8796: mol_type = other RNA

SEQ ID NO: 10817 - RNA, 8787 nt, synthetic construct; identical to SEQ ID NO: 9220
  modified_base 1..8787: mod_base = OTHER; note = Each t is m1f
  source 1..8787: mol_type = other RNA

SEQ ID NO: 10818 - RNA, 8787 nt, synthetic construct; identical to SEQ ID NO: 9221
  modified_base 1..8787: mod_base = OTHER; note = Each t is m1f
  source 1..8787: mol_type = other RNA

SEQ ID NO: 10819 - RNA, 8787 nt, synthetic construct; identical to SEQ ID NO: 9222
  modified_base 1..8787: mod_base = OTHER; note = Each t is m1f
  source 1..8787: mol_type = other RNA

SEQ ID NO: 10820 - RNA, 8787 nt, synthetic construct; identical to SEQ ID NO: 9223
  modified_base 1..8787: mod_base = OTHER; note = Each t is m1f
  source 1..8787: mol_type = other RNA

SEQ ID NO: 10821 - RNA, 8787 nt, synthetic construct; identical to SEQ ID NO: 9224
  modified_base 1..8787: mod_base = OTHER; note = Each t is m1f
  source 1..8787: mol_type = other RNA

SEQ ID NO: 10822 - RNA, 8787 nt, synthetic construct; identical to SEQ ID NO: 9225
  modified_base 1..8787: mod_base = OTHER; note = Each t is m1f
  source 1..8787: mol_type = other RNA

SEQ ID NO: 10823 - RNA, 8787 nt, synthetic construct; identical to SEQ ID NO: 9226
  modified_base 1..8787: mod_base = OTHER; note = Each t is m1f
  source 1..8787: mol_type = other RNA

SEQ ID NO: 10824 - RNA, 8784 nt, synthetic construct; identical to SEQ ID NO: 9227
  modified_base 1..8784: mod_base = OTHER; note = Each t is m1f
  source 1..8784: mol_type = other RNA

SEQ ID NO: 10825 - RNA, 8787 nt, synthetic construct; identical to SEQ ID NO: 9228
  modified_base 1..8787: mod_base = OTHER; note = Each t is m1f
  source 1..8787: mol_type = other RNA

SEQ ID NO: 10826 - RNA, 8787 nt, synthetic construct; identical to SEQ ID NO: 9229
  modified_base 1..8787: mod_base = OTHER; note = Each t is m1f
  source 1..8787: mol_type = other RNA

SEQ ID NO: 10827 - RNA, 8787 nt, synthetic construct; identical to SEQ ID NO: 9230
  modified_base 1..8787: mod_base = OTHER; note = Each t is m1f
  source 1..8787: mol_type = other RNA

SEQ ID NO: 10828 - RNA, 8787 nt, synthetic construct; identical to SEQ ID NO: 9231
  modified_base 1..8787: mod_base = OTHER; note = Each t is m1f
  source 1..8787: mol_type = other RNA

SEQ ID NO: 10829 - RNA, 8787 nt, synthetic construct; identical to SEQ ID NO: 9232
  modified_base 1..8787: mod_base = OTHER; note = Each t is m1f
  source 1..8787: mol_type = other RNA

SEQ ID NO: 10830 - RNA, 8787 nt, synthetic construct; identical to SEQ ID NO: 9233
  modified_base 1..8787: mod_base = OTHER; note = Each t is m1f
  source 1..8787: mol_type = other RNA

SEQ ID NO: 10831 - RNA, 8787 nt, synthetic construct; identical to SEQ ID NO: 9234
  modified_base 1..8787: mod_base = OTHER; note = Each t is m1f
  source 1..8787: mol_type = other RNA

SEQ ID NO: 10832 - RNA, 8787 nt, synthetic construct; identical to SEQ ID NO: 9235
  modified_base 1..8787: mod_base = OTHER; note = Each t is m1f
  source 1..8787: mol_type = other RNA

SEQ ID NO: 10833 - RNA, 8787 nt, synthetic construct; identical to SEQ ID NO: 9236
  modified_base 1..8787: mod_base = OTHER; note = Each t is m1f
  source 1..8787: mol_type = other RNA

SEQ ID NO: 10834 - RNA, 8787 nt, synthetic construct; identical to SEQ ID NO: 9237
  modified_base 1..8787: mod_base = OTHER; note = Each t is m1f
  source 1..8787: mol_type = other RNA

SEQ ID NO: 10835 - RNA, 8787 nt, synthetic construct; identical to SEQ ID NO: 9238
  modified_base 1..8787: mod_base = OTHER; note = Each t is m1f
  source 1..8787: mol_type = other RNA

SEQ ID NO: 10836 - RNA, 8787 nt, synthetic construct; identical to SEQ ID NO: 9239
  modified_base 1..8787: mod_base = OTHER; note = Each t is m1f
  source 1..8787: mol_type = other RNA

SEQ ID NO: 10837 - RNA, 8787 nt, synthetic construct; identical to SEQ ID NO: 9240
  modified_base 1..8787: mod_base = OTHER; note = Each t is m1f
  source 1..8787: mol_type = other RNA

SEQ ID NO: 10838 - RNA, 8787 nt, synthetic construct; identical to SEQ ID NO: 9241
  modified_base 1..8787: mod_base = OTHER; note = Each t is m1f
  source 1..8787: mol_type = other RNA

SEQ ID NO: 10839 - RNA, 8787 nt, synthetic construct; identical to SEQ ID NO: 9242
  modified_base 1..8787: mod_base = OTHER; note = Each t is m1f
  source 1..8787: mol_type = other RNA

SEQ ID NO: 10840 - RNA, 8787 nt, synthetic construct; identical to SEQ ID NO: 9243
  modified_base 1..8787: mod_base = OTHER; note = Each t is m1f
  source 1..8787: mol_type = other RNA

SEQ ID NO: 10841 - RNA, 8787 nt, synthetic construct; identical to SEQ ID NO: 9244
  modified_base 1..8787: mod_base = OTHER; note = Each t is m1f
  source 1..8787: mol_type = other RNA

SEQ ID NO: 10842 - RNA, 8787 nt, synthetic construct; identical to SEQ ID NO: 9245
  modified_base 1..8787: mod_base = OTHER; note = Each t is m1f
  source 1..8787: mol_type = other RNA

SEQ ID NO: 10843 - RNA, 8787 nt, synthetic construct; identical to SEQ ID NO: 9246
  modified_base 1..8787: mod_base = OTHER; note = Each t is m1f
  source 1..8787: mol_type = other RNA

SEQ ID NO: 10844 - RNA, 8787 nt, synthetic construct; identical to SEQ ID NO: 9247
  modified_base 1..8787: mod_base = OTHER; note = Each t is m1f
  source 1..8787: mol_type = other RNA

SEQ ID NO: 10845 - RNA, 8787 nt, synthetic construct; identical to SEQ ID NO: 9248
  modified_base 1..8787: mod_base = OTHER; note = Each t is m1f
  source 1..8787: mol_type = other RNA

SEQ ID NO: 10846 - RNA, 8787 nt, synthetic construct; identical to SEQ ID NO: 9249
  modified_base 1..8787: mod_base = OTHER; note = Each t is m1f
  source 1..8787: mol_type = other RNA

SEQ ID NO: 10847 - RNA, 8787 nt, synthetic construct; identical to SEQ ID NO: 9250
  modified_base 1..8787: mod_base = OTHER; note = Each t is m1f
  source 1..8787: mol_type = other RNA

SEQ ID NO: 10848 - RNA, 8787 nt, synthetic construct; identical to SEQ ID NO: 9251
  modified_base 1..8787: mod_base = OTHER; note = Each t is m1f
  source 1..8787: mol_type = other RNA

SEQ ID NO: 10849 - RNA, 8787 nt, synthetic construct; identical to SEQ ID NO: 9252
  modified_base 1..8787: mod_base = OTHER; note = Each t is m1f
  source 1..8787: mol_type = other RNA

SEQ ID NO: 10850 - RNA, 8787 nt, synthetic construct; identical to SEQ ID NO: 9253
  modified_base 1..8787: mod_base = OTHER; note = Each t is m1f
  source 1..8787: mol_type = other RNA

SEQ ID NO: 10851 - RNA, 8787 nt, synthetic construct; identical to SEQ ID NO: 9254
  modified_base 1..8787: mod_base = OTHER; note = Each t is m1f
  source 1..8787: mol_type = other RNA

SEQ ID NO: 10852 - RNA, 8787 nt, synthetic construct; identical to SEQ ID NO: 9255
  modified_base 1..8787: mod_base = OTHER; note = Each t is m1f
  source 1..8787: mol_type = other RNA

SEQ ID NO: 10853 - RNA, 8787 nt, synthetic construct; identical to SEQ ID NO: 9256
  modified_base 1..8787: mod_base = OTHER; note = Each t is m1f
  source 1..8787: mol_type = other RNA

SEQ ID NO: 10854 - RNA, 8787 nt, synthetic construct; identical to SEQ ID NO: 9257
  modified_base 1..8787: mod_base = OTHER; note = Each t is m1f
  source 1..8787: mol_type = other RNA

SEQ ID NO: 10855 - RNA, 8787 nt, synthetic construct; identical to SEQ ID NO: 9258
  modified_base 1..8787: mod_base = OTHER; note = Each t is m1f
  source 1..8787: mol_type = other RNA

SEQ ID NO: 10856 - RNA, 8787 nt, synthetic construct; identical to SEQ ID NO: 9259
  modified_base 1..8787: mod_base = OTHER; note = Each t is m1f
  source 1..8787: mol_type = other RNA

SEQ ID NO: 10857 - RNA, 8787 nt, synthetic construct; identical to SEQ ID NO: 9260
  modified_base 1..8787: mod_base = OTHER; note = Each t is m1f
  source 1..8787: mol_type = other RNA

SEQ ID NO: 10858 - RNA, 8823 nt, synthetic construct; identical to SEQ ID NO: 9261
  modified_base 1..8823: mod_base = OTHER; note = Each t is m1f
  source 1..8823: mol_type = other RNA

SEQ ID NO: 10859 - RNA, 8787 nt, synthetic construct; identical to SEQ ID NO: 9262
  modified_base 1..8787: mod_base = OTHER; note = Each t is m1f
  source 1..8787: mol_type = other RNA

SEQ ID NO: 10860 - RNA, 8787 nt, synthetic construct; identical to SEQ ID NO: 9263
  modified_base 1..8787: mod_base = OTHER; note = Each t is m1f
  source 1..8787: mol_type = other RNA

SEQ ID NO: 10861 - RNA, 8787 nt, synthetic construct; identical to SEQ ID NO: 9264
  modified_base 1..8787: mod_base = OTHER; note = Each t is m1f
  source 1..8787: mol_type = other RNA

SEQ ID NO: 10862 - RNA, 8787 nt, synthetic construct; identical to SEQ ID NO: 9265
  modified_base 1..8787: mod_base = OTHER; note = Each t is m1f
  source 1..8787: mol_type = other RNA

SEQ ID NO: 10863 - RNA, 8787 nt, synthetic construct; identical to SEQ ID NO: 9266
  modified_base 1..8787: mod_base = OTHER; note = Each t is m1f
  source 1..8787: mol_type = other RNA

SEQ ID NO: 10864 - RNA, 8787 nt, synthetic construct; identical to SEQ ID NO: 9267
  modified_base 1..8787: mod_base = OTHER; note = Each t is m1f
  source 1..8787: mol_type = other RNA

SEQ ID NO: 10865 - RNA, 8787 nt, synthetic construct; identical to SEQ ID NO: 9268
  modified_base 1..8787: mod_base = OTHER; note = Each t is m1f
  source 1..8787: mol_type = other RNA

SEQ ID NO: 10866 - RNA, 8787 nt, synthetic construct; identical to SEQ ID NO: 9269
  modified_base 1..8787: mod_base = OTHER; note = Each t is m1f
  source 1..8787: mol_type = other RNA

SEQ ID NO: 10867 - RNA, 8787 nt, synthetic construct; identical to SEQ ID NO: 9270
  modified_base 1..8787: mod_base = OTHER; note = Each t is m1f
  source 1..8787: mol_type = other RNA

SEQ ID NO: 10868 - RNA, 8787 nt, synthetic construct; identical to SEQ ID NO: 9271
  modified_base 1..8787: mod_base = OTHER; note = Each t is m1f
  source 1..8787: mol_type = other RNA

SEQ ID NO: 10869 - RNA, 8787 nt, synthetic construct; identical to SEQ ID NO: 9272
  modified_base 1..8787: mod_base = OTHER; note = Each t is m1f
  source 1..8787: mol_type = other RNA

SEQ ID NO: 10870 - RNA, 8787 nt, synthetic construct; identical to SEQ ID NO: 9273
  modified_base 1..8787: mod_base = OTHER; note = Each t is m1f
  source 1..8787: mol_type = other RNA

SEQ ID NO: 10871 - RNA, 8787 nt, synthetic construct; identical to SEQ ID NO: 9274
  modified_base 1..8787: mod_base = OTHER; note = Each t is m1f
  source 1..8787: mol_type = other RNA

SEQ ID NO: 10872 - RNA, 8787 nt, synthetic construct; identical to SEQ ID NO: 9275
  modified_base 1..8787: mod_base = OTHER; note = Each t is m1f
  source 1..8787: mol_type = other RNA

SEQ ID NO: 10873 - RNA, 8787 nt, synthetic construct; identical to SEQ ID NO: 9276
  modified_base 1..8787: mod_base = OTHER; note = Each t is m1f
  source 1..8787: mol_type = other RNA

SEQ ID NO: 10874 - RNA, 8787 nt, synthetic construct; identical to SEQ ID NO: 9277
  modified_base 1..8787: mod_base = OTHER; note = Each t is m1f
  source 1..8787: mol_type = other RNA

SEQ ID NO: 10875 - RNA, 8787 nt, synthetic construct; identical to SEQ ID NO: 9278
  modified_base 1..8787: mod_base = OTHER; note = Each t is m1f
  source 1..8787: mol_type = other RNA

SEQ ID NO: 10876 - RNA, 8787 nt, synthetic construct; identical to SEQ ID NO: 9279
  modified_base 1..8787: mod_base = OTHER; note = Each t is m1f
  source 1..8787: mol_type = other RNA

SEQ ID NO: 10877 - RNA, 8787 nt, synthetic construct; identical to SEQ ID NO: 9280
  modified_base 1..8787: mod_base = OTHER; note = Each t is m1f
  source 1..8787: mol_type = other RNA

SEQ ID NO: 10878 - RNA, 8787 nt, synthetic construct; identical to SEQ ID NO: 9281
  modified_base 1..8787: mod_base = OTHER; note = Each t is m1f
  source 1..8787: mol_type = other RNA

SEQ ID NO: 10879 - RNA, 8787 nt, synthetic construct; identical to SEQ ID NO: 9282
  modified_base 1..8787: mod_base = OTHER; note = Each t is m1f
  source 1..8787: mol_type = other RNA

SEQ ID NO: 10880 - RNA, 8787 nt, synthetic construct; identical to SEQ ID NO: 9283
  modified_base 1..8787: mod_base = OTHER; note = Each t is m1f
  source 1..8787: mol_type = other RNA

SEQ ID NO: 10881 - RNA, 8787 nt, synthetic construct; identical to SEQ ID NO: 9284
  modified_base 1..8787: mod_base = OTHER; note = Each t is m1f
  source 1..8787: mol_type = other RNA

SEQ ID NO: 10882 - RNA, 8787 nt, synthetic construct; identical to SEQ ID NO: 9285
  modified_base 1..8787: mod_base = OTHER; note = Each t is m1f
  source 1..8787: mol_type = other RNA

SEQ ID NO: 10883 - RNA, 8787 nt, synthetic construct; identical to SEQ ID NO: 9286
  modified_base 1..8787: mod_base = OTHER; note = Each t is m1f
  source 1..8787: mol_type = other RNA

SEQ ID NO: 10884 - RNA, 8787 nt, synthetic construct; identical to SEQ ID NO: 9287
  modified_base 1..8787: mod_base = OTHER; note = Each t is m1f
  source 1..8787: mol_type = other RNA

SEQ ID NO: 10885 - RNA, 8787 nt, synthetic construct; identical to SEQ ID NO: 9288
  modified_base 1..8787: mod_base = OTHER; note = Each t is m1f
  source 1..8787: mol_type = other RNA

SEQ ID NO: 10886 - RNA, 8787 nt, synthetic construct; identical to SEQ ID NO: 9289
  modified_base 1..8787: mod_base = OTHER; note = Each t is m1f
  source 1..8787: mol_type = other RNA

SEQ ID NO: 10887 - RNA, 8787 nt, synthetic construct; identical to SEQ ID NO: 9290
  modified_base 1..8787: mod_base = OTHER; note = Each t is m1f
  source 1..8787: mol_type = other RNA

SEQ ID NO: 10888 - RNA, 8787 nt, synthetic construct; identical to SEQ ID NO: 9291
  modified_base 1..8787: mod_base = OTHER; note = Each t is m1f
  source 1..8787: mol_type = other RNA

SEQ ID NO: 10889 - RNA, 8787 nt, synthetic construct; identical to SEQ ID NO: 9292
  modified_base 1..8787: mod_base = OTHER; note = Each t is m1f
  source 1..8787: mol_type = other RNA

SEQ ID NO: 10890 - RNA, 8787 nt, synthetic construct; identical to SEQ ID NO: 9293
  modified_base 1..8787: mod_base = OTHER; note = Each t is m1f
  source 1..8787: mol_type = other RNA

SEQ ID NO: 10891 - RNA, 8787 nt, synthetic construct; identical to SEQ ID NO: 9294
  modified_base 1..8787: mod_base = OTHER; note = Each t is m1f
  source 1..8787: mol_type = other RNA

SEQ ID NO: 10892 - RNA, 8787 nt, synthetic construct; identical to SEQ ID NO: 9295
  modified_base 1..8787: mod_base = OTHER; note = Each t is m1f
  source 1..8787: mol_type = other RNA

SEQ ID NO: 10893 - RNA, 8787 nt, synthetic construct; identical to SEQ ID NO: 9296
  modified_base 1..8787: mod_base = OTHER; note = Each t is m1f
  source 1..8787: mol_type = other RNA

SEQ ID NO: 10894 - RNA, 8787 nt, synthetic construct; identical to SEQ ID NO: 9297
  modified_base 1..8787: mod_base = OTHER; note = Each t is m1f
  source 1..8787: mol_type = other RNA

SEQ ID NO: 10895 - RNA, 8787 nt, synthetic construct; identical to SEQ ID NO: 9298
  modified_base 1..8787: mod_base = OTHER; note = Each t is m1f
  source 1..8787: mol_type = other RNA

SEQ ID NO: 10896 - RNA, 8787 nt, synthetic construct; identical to SEQ ID NO: 9299
  modified_base 1..8787: mod_base = OTHER; note = Each t is m1f
  source 1..8787: mol_type = other RNA

SEQ ID NO: 10897 - RNA, 8787 nt, synthetic construct; identical to SEQ ID NO: 9300
  modified_base 1..8787: mod_base = OTHER; note = Each t is m1f
  source 1..8787: mol_type = other RNA

SEQ ID NO: 10898 - RNA, 8787 nt, synthetic construct; identical to SEQ ID NO: 9301
  modified_base 1..8787: mod_base = OTHER; note = Each t is m1f
  source 1..8787: mol_type = other RNA

SEQ ID NO: 10899 - RNA, 8787 nt, synthetic construct; identical to SEQ ID NO: 9302
  modified_base 1..8787: mod_base = OTHER; note = Each t is m1f
  source 1..8787: mol_type = other RNA

SEQ ID NO: 10900 - RNA, 8787 nt, synthetic construct; identical to SEQ ID NO: 9303
  modified_base 1..8787: mod_base = OTHER; note = Each t is m1f
  source 1..8787: mol_type = other RNA

SEQ ID NO: 10901 - RNA, 8787 nt, synthetic construct; identical to SEQ ID NO: 9304
  modified_base 1..8787: mod_base = OTHER; note = Each t is m1f
  source 1..8787: mol_type = other RNA

SEQ ID NO: 10902 - RNA, 8787 nt, synthetic construct; identical to SEQ ID NO: 9305
  modified_base 1..8787: mod_base = OTHER; note = Each t is m1f
  source 1..8787: mol_type = other RNA

SEQ ID NO: 10903 - RNA, 8787 nt, synthetic construct; identical to SEQ ID NO: 9306
  modified_base 1..8787: mod_base = OTHER; note = Each t is m1f
  source 1..8787: mol_type = other RNA

SEQ ID NO: 10904 - RNA, 8787 nt, synthetic construct; identical to SEQ ID NO: 9307
  modified_base 1..8787: mod_base = OTHER; note = Each t is m1f
  source 1..8787: mol_type = other RNA

SEQ ID NO: 10905 - RNA, 8796 nt, synthetic construct; identical to SEQ ID NO: 9308
  modified_base 1..8796: mod_base = OTHER; note = Each t is m1f
  source 1..8796: mol_type = other RNA

SEQ ID NO: 10906 - RNA, 8787 nt, synthetic construct; identical to SEQ ID NO: 9309
  modified_base 1..8787: mod_base = OTHER; note = Each t is m1f
  source 1..8787: mol_type = other RNA

SEQ ID NO: 10907 - RNA, 8787 nt, synthetic construct; identical to SEQ ID NO: 9310
  modified_base 1..8787: mod_base = OTHER; note = Each t is m1f
  source 1..8787: mol_type = other RNA

SEQ ID NO: 10908 - RNA, 8787 nt, synthetic construct; identical to SEQ ID NO: 9311
  modified_base 1..8787: mod_base = OTHER; note = Each t is m1f
  source 1..8787: mol_type = other RNA

SEQ ID NO: 10909 - RNA, 8787 nt, synthetic construct; identical to SEQ ID NO: 9312
  modified_base 1..8787: mod_base = OTHER; note = Each t is m1f
  source 1..8787: mol_type = other RNA

SEQ ID NO: 10910 - RNA, 8787 nt, synthetic construct; identical to SEQ ID NO: 9313
  modified_base 1..8787: mod_base = OTHER; note = Each t is m1f
  source 1..8787: mol_type = other RNA

SEQ ID NO: 10911 - RNA, 8787 nt, synthetic construct; identical to SEQ ID NO: 9314
  modified_base 1..8787: mod_base = OTHER; note = Each t is m1f
  source 1..8787: mol_type = other RNA

SEQ ID NO: 10912 - RNA, 8787 nt, synthetic construct; identical to SEQ ID NO: 9315
  modified_base 1..8787: mod_base = OTHER; note = Each t is m1f
  source 1..8787: mol_type = other RNA

SEQ ID NO: 10913 - RNA, 8787 nt, synthetic construct; identical to SEQ ID NO: 9316
  modified_base 1..8787: mod_base = OTHER; note = Each t is m1f
  source 1..8787: mol_type = other RNA

SEQ ID NO: 10914 - RNA, 8787 nt, synthetic construct; identical to SEQ ID NO: 9317
  modified_base 1..8787: mod_base = OTHER; note = Each t is m1f
  source 1..8787: mol_type = other RNA

SEQ ID NO: 10915 - RNA, 8787 nt, synthetic construct; identical to SEQ ID NO: 9318
  modified_base 1..8787: mod_base = OTHER; note = Each t is m1f
  source 1..8787: mol_type = other RNA

SEQ ID NO: 10916 - RNA, 8787 nt, synthetic construct; identical to SEQ ID NO: 9319
  modified_base 1..8787: mod_base = OTHER; note = Each t is m1f
  source 1..8787: mol_type = other RNA

SEQ ID NO: 10917 - RNA, 8787 nt, synthetic construct; identical to SEQ ID NO: 9320
  modified_base 1..8787: mod_base = OTHER; note = Each t is m1f
  source 1..8787: mol_type = other RNA

SEQ ID NO: 10918 - RNA, 8787 nt, synthetic construct; identical to SEQ ID NO: 9321
  modified_base 1..8787: mod_base = OTHER; note = Each t is m1f
  source 1..8787: mol_type = other RNA

SEQ ID NO: 10919 - RNA, 8787 nt, synthetic construct; identical to SEQ ID NO: 9322
  modified_base 1..8787: mod_base = OTHER; note = Each t is m1f
  source 1..8787: mol_type = other RNA

SEQ ID NO: 10920 - RNA, 8787 nt, synthetic construct; identical to SEQ ID NO: 9323
  modified_base 1..8787: mod_base = OTHER; note = Each t is m1f
  source 1..8787: mol_type = other RNA

SEQ ID NO: 10921 - RNA, 8787 nt, synthetic construct; identical to SEQ ID NO: 9324
  modified_base 1..8787: mod_base = OTHER; note = Each t is m1f
  source 1..8787: mol_type = other RNA

SEQ ID NO: 10922 - RNA, 8787 nt, synthetic construct; identical to SEQ ID NO: 9325
  modified_base 1..8787: mod_base = OTHER; note = Each t is m1f
  source 1..8787: mol_type = other RNA

SEQ ID NO: 10923 - RNA, 8787 nt, synthetic construct; identical to SEQ ID NO: 9326
  modified_base 1..8787: mod_base = OTHER; note = Each t is m1f
  source 1..8787: mol_type = other RNA

SEQ ID NO: 10924 - RNA, 8787 nt, synthetic construct; identical to SEQ ID NO: 9327
  modified_base 1..8787: mod_base = OTHER; note = Each t is m1f
  source 1..8787: mol_type = other RNA

SEQ ID NO: 10925 - RNA, 8787 nt, synthetic construct; identical to SEQ ID NO: 9328
  modified_base 1..8787: mod_base = OTHER; note = Each t is m1f
  source 1..8787: mol_type = other RNA

SEQ ID NO: 10926 - RNA, 8787 nt, synthetic construct; identical to SEQ ID NO: 9329
  modified_base 1..8787: mod_base = OTHER; note = Each t is m1f
  source 1..8787: mol_type = other RNA

SEQ ID NO: 10927 - RNA, 8787 nt, synthetic construct; identical to SEQ ID NO: 9330
  modified_base 1..8787: mod_base = OTHER; note = Each t is m1f
  source 1..8787: mol_type = other RNA

SEQ ID NO: 10928 - RNA, 8787 nt, synthetic construct; identical to SEQ ID NO: 9331
  modified_base 1..8787: mod_base = OTHER; note = Each t is m1f
  source 1..8787: mol_type = other RNA

SEQ ID NO: 10929 - RNA, 8787 nt, synthetic construct; identical to SEQ ID NO: 9332
  modified_base 1..8787: mod_base = OTHER; note = Each t is m1f
  source 1..8787: mol_type = other RNA

SEQ ID NO: 10930 - RNA, 8787 nt, synthetic construct; identical to SEQ ID NO: 9333
  modified_base 1..8787: mod_base = OTHER; note = Each t is m1f
  source 1..8787: mol_type = other RNA

SEQ ID NO: 10931 - RNA, 8787 nt, synthetic construct; identical to SEQ ID NO: 9334
  modified_base 1..8787: mod_base = OTHER; note = Each t is m1f
  source 1..8787: mol_type = other RNA

SEQ ID NO: 10932 - RNA, 8787 nt, synthetic construct; identical to SEQ ID NO: 9335
  modified_base 1..8787: mod_base = OTHER; note = Each t is m1f
  source 1..8787: mol_type = other RNA

SEQ ID NO: 10933 - RNA, 8787 nt, synthetic construct; identical to SEQ ID NO: 9336
  modified_base 1..8787: mod_base = OTHER; note = Each t is m1f
  source 1..8787: mol_type = other RNA

SEQ ID NO: 10934 - RNA, 8787 nt, synthetic construct; identical to SEQ ID NO: 9337
  modified_base 1..8787: mod_base = OTHER; note = Each t is m1f
  source 1..8787: mol_type = other RNA

SEQ ID NO: 10935 - RNA, 8787 nt, synthetic construct; identical to SEQ ID NO: 9338
  modified_base 1..8787: mod_base = OTHER; note = Each t is m1f
  source 1..8787: mol_type = other RNA

SEQ ID NO: 10936 - RNA, 8787 nt, synthetic construct; identical to SEQ ID NO: 9339
  modified_base 1..8787: mod_base = OTHER; note = Each t is m1f
  source 1..8787: mol_type = other RNA

SEQ ID NO: 10937 - RNA, 8787 nt, synthetic construct; identical to SEQ ID NO: 9340
  modified_base 1..8787: mod_base = OTHER; note = Each t is m1f
  source 1..8787: mol_type = other RNA

SEQ ID NO: 10938 - RNA, 8787 nt, synthetic construct; identical to SEQ ID NO: 9341
  modified_base 1..8787: mod_base = OTHER; note = Each t is m1f
  source 1..8787: mol_type = other RNA

SEQ ID NO: 10939 - RNA, 8787 nt, synthetic construct; identical to SEQ ID NO: 9342
  modified_base 1..8787: mod_base = OTHER; note = Each t is m1f
  source 1..8787: mol_type = other RNA

SEQ ID NO: 10940 - RNA, 8787 nt, synthetic construct; identical to SEQ ID NO: 9343
  modified_base 1..8787: mod_base = OTHER; note = Each t is m1f
  source 1..8787: mol_type = other RNA

SEQ ID NO: 10941 - RNA, 8787 nt, synthetic construct; identical to SEQ ID NO: 9344
  modified_base 1..8787: mod_base = OTHER; note = Each t is m1f
  source 1..8787: mol_type = other RNA

SEQ ID NO: 10942 - RNA, 8787 nt, synthetic construct; identical to SEQ ID NO: 9345
  modified_base 1..8787: mod_base = OTHER; note = Each t is m1f
  source 1..8787: mol_type = other RNA

SEQ ID NO: 10943 - RNA, 8787 nt, synthetic construct; identical to SEQ ID NO: 9346
  modified_base 1..8787: mod_base = OTHER; note = Each t is m1f
  source 1..8787: mol_type = other RNA

SEQ ID NO: 10944 - RNA, 8787 nt, synthetic construct; identical to SEQ ID NO: 9347
  modified_base 1..8787: mod_base = OTHER; note = Each t is m1f
  source 1..8787: mol_type = other RNA

SEQ ID NO: 10945 - RNA, 8787 nt, synthetic construct; identical to SEQ ID NO: 9348
  modified_base 1..8787: mod_base = OTHER; note = Each t is m1f
  source 1..8787: mol_type = other RNA

SEQ ID NO: 10946 - RNA, 8787 nt, synthetic construct; identical to SEQ ID NO: 9349
  modified_base 1..8787: mod_base = OTHER; note = Each t is m1f
  source 1..8787: mol_type = other RNA

SEQ ID NO: 10947 - RNA, 8787 nt, synthetic construct; identical to SEQ ID NO: 9350
  modified_base 1..8787: mod_base = OTHER; note = Each t is m1f
  source 1..8787: mol_type = other RNA

SEQ ID NO: 10948 - RNA, 8787 nt, synthetic construct; identical to SEQ ID NO: 9351
  modified_base 1..8787: mod_base = OTHER; note = Each t is m1f
  source 1..8787: mol_type = other RNA

SEQ ID NO: 10949 - RNA, 8787 nt, synthetic construct; identical to SEQ ID NO: 9352
  modified_base 1..8787: mod_base = OTHER; note = Each t is m1f
  source 1..8787: mol_type = other RNA

SEQ ID NO: 10950 - RNA, 8787 nt, synthetic construct; identical to SEQ ID NO: 9353
  modified_base 1..8787: mod_base = OTHER; note = Each t is m1f
  source 1..8787: mol_type = other RNA

SEQ ID NO: 10951 - RNA, 8787 nt, synthetic construct; identical to SEQ ID NO: 9354
  modified_base 1..8787: mod_base = OTHER; note = Each t is m1f
  source 1..8787: mol_type = other RNA

SEQ ID NO: 10952 - RNA, 8787 nt, synthetic construct; identical to SEQ ID NO: 9355
  modified_base 1..8787: mod_base = OTHER; note = Each t is m1f
  source 1..8787: mol_type = other RNA

SEQ ID NO: 10953 - RNA, 8787 nt, synthetic construct; identical to SEQ ID NO: 9356
  modified_base 1..8787: mod_base = OTHER; note = Each t is m1f
  source 1..8787: mol_type = other RNA

SEQ ID NO: 10954 - RNA, 8787 nt, synthetic construct; identical to SEQ ID NO: 9357
  modified_base 1..8787: mod_base = OTHER; note = Each t is m1f
  source 1..8787: mol_type = other RNA

SEQ ID NO: 10955 - RNA, 8787 nt, synthetic construct; identical to SEQ ID NO: 9358
  modified_base 1..8787: mod_base = OTHER; note = Each t is m1f
  source 1..8787: mol_type = other RNA

SEQ ID NO: 10956 - RNA, 8787 nt, synthetic construct; identical to SEQ ID NO: 9359
  modified_base 1..8787: mod_base = OTHER; note = Each t is m1f
  source 1..8787: mol_type = other RNA

SEQ ID NO: 10957 - RNA, 8787 nt, synthetic construct; identical to SEQ ID NO: 9360
  modified_base 1..8787: mod_base = OTHER; note = Each t is m1f
  source 1..8787: mol_type = other RNA

SEQ ID NO: 10958 - RNA, 8787 nt, synthetic construct; identical to SEQ ID NO: 9361
  modified_base 1..8787: mod_base = OTHER; note = Each t is m1f
  source 1..8787: mol_type = other RNA

SEQ ID NO: 10959 - RNA, 8787 nt, synthetic construct; identical to SEQ ID NO: 9362
  modified_base 1..8787: mod_base = OTHER; note = Each t is m1f
  source 1..8787: mol_type = other RNA

SEQ ID NO: 10960 - RNA, 8787 nt, synthetic construct; identical to SEQ ID NO: 9363
  modified_base 1..8787: mod_base = OTHER; note = Each t is m1f
  source 1..8787: mol_type = other RNA

SEQ ID NO: 10961 - RNA, 8787 nt, synthetic construct; identical to SEQ ID NO: 9364
  modified_base 1..8787: mod_base = OTHER; note = Each t is m1f
  source 1..8787: mol_type = other RNA

SEQ ID NO: 10962 - RNA, 8787 nt, synthetic construct; identical to SEQ ID NO: 9365
  modified_base 1..8787: mod_base = OTHER; note = Each t is m1f
  source 1..8787: mol_type = other RNA

SEQ ID NO: 10963 - RNA, 8787 nt, synthetic construct; identical to SEQ ID NO: 9366
  modified_base 1..8787: mod_base = OTHER; note = Each t is m1f
  source 1..8787: mol_type = other RNA

SEQ ID NO: 10964 - RNA, 8787 nt, synthetic construct; identical to SEQ ID NO: 9367
  modified_base 1..8787: mod_base = OTHER; note = Each t is m1f
  source 1..8787: mol_type = other RNA

SEQ ID NO: 10965 - RNA, 8787 nt, synthetic construct; identical to SEQ ID NO: 9368
  modified_base 1..8787: mod_base = OTHER; note = Each t is m1f
  source 1..8787: mol_type = other RNA

SEQ ID NO: 10966 - RNA, 8787 nt, synthetic construct; identical to SEQ ID NO: 9369
  modified_base 1..8787: mod_base = OTHER; note = Each t is m1f
  source 1..8787: mol_type = other RNA

SEQ ID NO: 10967 - RNA, 8787 nt, synthetic construct; identical to SEQ ID NO: 9370
  modified_base 1..8787: mod_base = OTHER; note = Each t is m1f
  source 1..8787: mol_type = other RNA

SEQ ID NO: 10968 - RNA, 8787 nt, synthetic construct; identical to SEQ ID NO: 9371
  modified_base 1..8787: mod_base = OTHER; note = Each t is m1f
  source 1..8787: mol_type = other RNA

SEQ ID NO: 10969 - RNA, 8787 nt, synthetic construct; identical to SEQ ID NO: 9372
  modified_base 1..8787: mod_base = OTHER; note = Each t is m1f
  source 1..8787: mol_type = other RNA

SEQ ID NO: 10970 - RNA, 8787 nt, synthetic construct; identical to SEQ ID NO: 9373
  modified_base 1..8787: mod_base = OTHER; note = Each t is m1f
  source 1..8787: mol_type = other RNA

SEQ ID NO: 10971 - RNA, 8787 nt, synthetic construct; identical to SEQ ID NO: 9374
  modified_base 1..8787: mod_base = OTHER; note = Each t is m1f
  source 1..8787: mol_type = other RNA

SEQ ID NO: 10972 - RNA, 8787 nt, synthetic construct; identical to SEQ ID NO: 9375
  modified_base 1..8787: mod_base = OTHER; note = Each t is m1f
  source 1..8787: mol_type = other RNA

SEQ ID NO: 10973 - RNA, 8787 nt, synthetic construct; identical to SEQ ID NO: 9376
  modified_base 1..8787: mod_base = OTHER; note = Each t is m1f
  source 1..8787: mol_type = other RNA

SEQ ID NO: 10974 - RNA, 8787 nt, synthetic construct; identical to SEQ ID NO: 9377
  modified_base 1..8787: mod_base = OTHER; note = Each t is m1f
  source 1..8787: mol_type = other RNA

SEQ ID NO: 10975 - RNA, 8787 nt, synthetic construct; identical to SEQ ID NO: 9378
  modified_base 1..8787: mod_base = OTHER; note = Each t is m1f
  source 1..8787: mol_type = other RNA

SEQ ID NO: 10976 - RNA, 8787 nt, synthetic construct; identical to SEQ ID NO: 9379
  modified_base 1..8787: mod_base = OTHER; note = Each t is m1f
  source 1..8787: mol_type = other RNA

SEQ ID NO: 10977 - RNA, 8787 nt, synthetic construct; identical to SEQ ID NO: 9380
  modified_base 1..8787: mod_base = OTHER; note = Each t is m1f
  source 1..8787: mol_type = other RNA

SEQ ID NO: 10978 - RNA, 8787 nt, synthetic construct; identical to SEQ ID NO: 9381
  modified_base 1..8787: mod_base = OTHER; note = Each t is m1f
  source 1..8787: mol_type = other RNA

SEQ ID NO: 10979 - RNA, 8787 nt, synthetic construct; identical to SEQ ID NO: 9382
  modified_base 1..8787: mod_base = OTHER; note = Each t is m1f
  source 1..8787: mol_type = other RNA

SEQ ID NO: 10980 - RNA, 8787 nt, synthetic construct; identical to SEQ ID NO: 9383
  modified_base 1..8787: mod_base = OTHER; note = Each t is m1f
  source 1..8787: mol_type = other RNA

SEQ ID NO: 10981 - RNA, 8787 nt, synthetic construct; identical to SEQ ID NO: 9384
  modified_base 1..8787: mod_base = OTHER; note = Each t is m1f
  source 1..8787: mol_type = other RNA

SEQ ID NO: 10982 - RNA, 8787 nt, synthetic construct; identical to SEQ ID NO: 9385
  modified_base 1..8787: mod_base = OTHER; note = Each t is m1f
  source 1..8787: mol_type = other RNA

SEQ ID NO: 10983 - RNA, 8787 nt, synthetic construct; identical to SEQ ID NO: 9386
  modified_base 1..8787: mod_base = OTHER; note = Each t is m1f
  source 1..8787: mol_type = other RNA

SEQ ID NO: 10984 - RNA, 8787 nt, synthetic construct; identical to SEQ ID NO: 9387
  modified_base 1..8787: mod_base = OTHER; note = Each t is m1f
  source 1..8787: mol_type = other RNA

SEQ ID NO: 10985 - RNA, 8787 nt, synthetic construct; identical to SEQ ID NO: 9388
  modified_base 1..8787: mod_base = OTHER; note = Each t is m1f
  source 1..8787: mol_type = other RNA

SEQ ID NO: 10986 - RNA, 8787 nt, synthetic construct; identical to SEQ ID NO: 9389
  modified_base 1..8787: mod_base = OTHER; note = Each t is m1f
  source 1..8787: mol_type = other RNA

SEQ ID NO: 10987 - RNA, 8787 nt, synthetic construct; identical to SEQ ID NO: 9390
  modified_base 1..8787: mod_base = OTHER; note = Each t is m1f
  source 1..8787: mol_type = other RNA

SEQ ID NO: 10988 - RNA, 8787 nt, synthetic construct; identical to SEQ ID NO: 9391
  modified_base 1..8787: mod_base = OTHER; note = Each t is m1f
  source 1..8787: mol_type = other RNA

SEQ ID NO: 10989 - RNA, 8787 nt, synthetic construct; identical to SEQ ID NO: 9392
  modified_base 1..8787: mod_base = OTHER; note = Each t is m1f
  source 1..8787: mol_type = other RNA

SEQ ID NO: 10990 - RNA, 8787 nt, synthetic construct; identical to SEQ ID NO: 9393
  modified_base 1..8787: mod_base = OTHER; note = Each t is m1f
  source 1..8787: mol_type = other RNA

SEQ ID NO: 10991 - RNA, 8787 nt, synthetic construct; identical to SEQ ID NO: 9394
  modified_base 1..8787: mod_base = OTHER; note = Each t is m1f
  source 1..8787: mol_type = other RNA

SEQ ID NO: 10992 - RNA, 8787 nt, synthetic construct; identical to SEQ ID NO: 9395
  modified_base 1..8787: mod_base = OTHER; note = Each t is m1f
  source 1..8787: mol_type = other RNA

SEQ ID NO: 10993 - RNA, 8787 nt, synthetic construct; identical to SEQ ID NO: 9396
  modified_base 1..8787: mod_base = OTHER; note = Each t is m1f
  source 1..8787: mol_type = other RNA

SEQ ID NO: 10994 - RNA, 8787 nt, synthetic construct; identical to SEQ ID NO: 9397
  modified_base 1..8787: mod_base = OTHER; note = Each t is m1f
  source 1..8787: mol_type = other RNA

SEQ ID NO: 10995 - RNA, 8787 nt, synthetic construct; identical to SEQ ID NO: 9398
  modified_base 1..8787: mod_base = OTHER; note = Each t is m1f
  source 1..8787: mol_type = other RNA

SEQ ID NO: 10996 - RNA, 8787 nt, synthetic construct; identical to SEQ ID NO: 9399
  modified_base 1..8787: mod_base = OTHER; note = Each t is m1f
  source 1..8787: mol_type = other RNA

SEQ ID NO: 10997 - RNA, 8787 nt, synthetic construct; identical to SEQ ID NO: 9400
  modified_base 1..8787: mod_base = OTHER; note = Each t is m1f
  source 1..8787: mol_type = other RNA

SEQ ID NO: 10998 - RNA, 8787 nt, synthetic construct; identical to SEQ ID NO: 9401
  modified_base 1..8787: mod_base = OTHER; note = Each t is m1f
  source 1..8787: mol_type = other RNA

SEQ ID NO: 10999 - RNA, 8787 nt, synthetic construct; identical to SEQ ID NO: 9402
  modified_base 1..8787: mod_base = OTHER; note = Each t is m1f
  source 1..8787: mol_type = other RNA

SEQ ID NO: 11000 - RNA, 8787 nt, synthetic construct; identical to SEQ ID NO: 9403
  modified_base 1..8787: mod_base = OTHER; note = Each t is m1f
  source 1..8787: mol_type = other RNA

SEQ ID NO: 11001 - RNA, 8787 nt, synthetic construct; identical to SEQ ID NO: 9404
  modified_base 1..8787: mod_base = OTHER; note = Each t is m1f
  source 1..8787: mol_type = other RNA

SEQ ID NO: 11002 - RNA, 8787 nt, synthetic construct; identical to SEQ ID NO: 9405
  modified_base 1..8787: mod_base = OTHER; note = Each t is m1f
  source 1..8787: mol_type = other RNA

SEQ ID NO: 11003 - RNA, 8787 nt, synthetic construct; identical to SEQ ID NO: 9406
  modified_base 1..8787: mod_base = OTHER; note = Each t is m1f
  source 1..8787: mol_type = other RNA

SEQ ID NO: 11004 - RNA, 8787 nt, synthetic construct; identical to SEQ ID NO: 9407
  modified_base 1..8787: mod_base = OTHER; note = Each t is m1f
  source 1..8787: mol_type = other RNA

SEQ ID NO: 11005 - RNA, 8787 nt, synthetic construct; identical to SEQ ID NO: 9408
  modified_base 1..8787: mod_base = OTHER; note = Each t is m1f
  source 1..8787: mol_type = other RNA

SEQ ID NO: 11006 - RNA, 8787 nt, synthetic construct; identical to SEQ ID NO: 9409
  modified_base 1..8787: mod_base = OTHER; note = Each t is m1f
  source 1..8787: mol_type = other RNA

SEQ ID NO: 11007 - RNA, 8787 nt, synthetic construct; identical to SEQ ID NO: 9410
  modified_base 1..8787: mod_base = OTHER; note = Each t is m1f
  source 1..8787: mol_type = other RNA

SEQ ID NO: 11008 - RNA, 8787 nt, synthetic construct; identical to SEQ ID NO: 9411
  modified_base 1..8787: mod_base = OTHER; note = Each t is m1f
  source 1..8787: mol_type = other RNA

SEQ ID NO: 11009 - RNA, 8787 nt, synthetic construct; identical to SEQ ID NO: 9412
  modified_base 1..8787: mod_base = OTHER; note = Each t is m1f
  source 1..8787: mol_type = other RNA

SEQ ID NO: 11010 - RNA, 8787 nt, synthetic construct; identical to SEQ ID NO: 9413
  modified_base 1..8787: mod_base = OTHER; note = Each t is m1f
  source 1..8787: mol_type = other RNA

SEQ ID NO: 11011 - RNA, 8787 nt, synthetic construct; identical to SEQ ID NO: 9414
  modified_base 1..8787: mod_base = OTHER; note = Each t is m1f
  source 1..8787: mol_type = other RNA

SEQ ID NO: 11012 - RNA, 8787 nt, synthetic construct; identical to SEQ ID NO: 9415
  modified_base 1..8787: mod_base = OTHER; note = Each t is m1f
  source 1..8787: mol_type = other RNA

SEQ ID NO: 11013 - RNA, 8787 nt, synthetic construct; identical to SEQ ID NO: 9416
  modified_base 1..8787: mod_base = OTHER; note = Each t is m1f
  source 1..8787: mol_type = other RNA

SEQ ID NO: 11014 - RNA, 8787 nt, synthetic construct; identical to SEQ ID NO: 9417
  modified_base 1..8787: mod_base = OTHER; note = Each t is m1f
  source 1..8787: mol_type = other RNA

SEQ ID NO: 11015 - RNA, 8787 nt, synthetic construct; identical to SEQ ID NO: 9418
  modified_base 1..8787: mod_base = OTHER; note = Each t is m1f
  source 1..8787: mol_type = other RNA

SEQ ID NO: 11016 - RNA, 8787 nt, synthetic construct; identical to SEQ ID NO: 9419
  modified_base 1..8787: mod_base = OTHER; note = Each t is m1f
  source 1..8787: mol_type = other RNA

SEQ ID NO: 11017 - RNA, 8787 nt, synthetic construct; identical to SEQ ID NO: 9420
  modified_base 1..8787: mod_base = OTHER; note = Each t is m1f
  source 1..8787: mol_type = other RNA

SEQ ID NO: 11018 - RNA, 8787 nt, synthetic construct; identical to SEQ ID NO: 9421
  modified_base 1..8787: mod_base = OTHER; note = Each t is m1f
  source 1..8787: mol_type = other RNA

SEQ ID NO: 11019 - RNA, 8787 nt, synthetic construct; identical to SEQ ID NO: 9422
  modified_base 1..8787: mod_base = OTHER; note = Each t is m1f
  source 1..8787: mol_type = other RNA

SEQ ID NO: 11020 - RNA, 8787 nt, synthetic construct; identical to SEQ ID NO: 9423
  modified_base 1..8787: mod_base = OTHER; note = Each t is m1f
  source 1..8787: mol_type = other RNA

SEQ ID NO: 11021 - RNA, 8787 nt, synthetic construct; identical to SEQ ID NO: 9424
  modified_base 1..8787: mod_base = OTHER; note = Each t is m1f
  source 1..8787: mol_type = other RNA

SEQ ID NO: 11022 - RNA, 8787 nt, synthetic construct; identical to SEQ ID NO: 9425
  modified_base 1..8787: mod_base = OTHER; note = Each t is m1f
  source 1..8787: mol_type = other RNA

SEQ ID NO: 11023 - RNA, 8787 nt, synthetic construct; identical to SEQ ID NO: 9426
  modified_base 1..8787: mod_base = OTHER; note = Each t is m1f
  source 1..8787: mol_type = other RNA

SEQ ID NO: 11024 - RNA, 8787 nt, synthetic construct; identical to SEQ ID NO: 9427
  modified_base 1..8787: mod_base = OTHER; note = Each t is m1f
  source 1..8787: mol_type = other RNA

SEQ ID NO: 11025 - RNA, 8784 nt, synthetic construct; identical to SEQ ID NO: 9428
  modified_base 1..8784: mod_base = OTHER; note = Each t is m1f
  source 1..8784: mol_type = other RNA

SEQ ID NO: 11026 - RNA, 8787 nt, synthetic construct; identical to SEQ ID NO: 9429
  modified_base 1..8787: mod_base = OTHER; note = Each t is m1f
  source 1..8787: mol_type = other RNA

SEQ ID NO: 11027 - RNA, 8787 nt, synthetic construct; identical to SEQ ID NO: 9430
  modified_base 1..8787: mod_base = OTHER; note = Each t is m1f
  source 1..8787: mol_type = other RNA

SEQ ID NO: 11028 - RNA, 8787 nt, synthetic construct; identical to SEQ ID NO: 9431
  modified_base 1..8787: mod_base = OTHER; note = Each t is m1f
  source 1..8787: mol_type = other RNA

SEQ ID NO: 11029 - RNA, 8787 nt, synthetic construct; identical to SEQ ID NO: 9432
  modified_base 1..8787: mod_base = OTHER; note = Each t is m1f
  source 1..8787: mol_type = other RNA

SEQ ID NO: 11030 - RNA, 8787 nt, synthetic construct; identical to SEQ ID NO: 9433
  modified_base 1..8787: mod_base = OTHER; note = Each t is m1f
  source 1..8787: mol_type = other RNA

SEQ ID NO: 11031 - RNA, 8787 nt, synthetic construct; identical to SEQ ID NO: 9434
  modified_base 1..8787: mod_base = OTHER; note = Each t is m1f
  source 1..8787: mol_type = other RNA

SEQ ID NO: 11032 - RNA, 8787 nt, synthetic construct; identical to SEQ ID NO: 9435
  modified_base 1..8787: mod_base = OTHER; note = Each t is m1f
  source 1..8787: mol_type = other RNA

SEQ ID NO: 11033 - RNA, 8787 nt, synthetic construct; identical to SEQ ID NO: 9436
  modified_base 1..8787: mod_base = OTHER; note = Each t is m1f
  source 1..8787: mol_type = other RNA

SEQ ID NO: 11034 - RNA, 8787 nt, synthetic construct; identical to SEQ ID NO: 9437
  modified_base 1..8787: mod_base = OTHER; note = Each t is m1f
  source 1..8787: mol_type = other RNA

SEQ ID NO: 11035 - RNA, 8787 nt, synthetic construct; identical to SEQ ID NO: 9438
  modified_base 1..8787: mod_base = OTHER; note = Each t is m1f
  source 1..8787: mol_type = other RNA

SEQ ID NO: 11036 - RNA, 8787 nt, synthetic construct; identical to SEQ ID NO: 9439
  modified_base 1..8787: mod_base = OTHER; note = Each t is m1f
  source 1..8787: mol_type = other RNA

SEQ ID NO: 11037 - RNA, 8787 nt, synthetic construct; identical to SEQ ID NO: 9440
  modified_base 1..8787: mod_base = OTHER; note = Each t is m1f
  source 1..8787: mol_type = other RNA

SEQ ID NO: 11038 - RNA, 8787 nt, synthetic construct; identical to SEQ ID NO: 9441
  modified_base 1..8787: mod_base = OTHER; note = Each t is m1f
  source 1..8787: mol_type = other RNA

SEQ ID NO: 11039 - RNA, 8787 nt, synthetic construct; identical to SEQ ID NO: 9442
  modified_base 1..8787: mod_base = OTHER; note = Each t is m1f
  source 1..8787: mol_type = other RNA

SEQ ID NO: 11040 - RNA, 8787 nt, synthetic construct; identical to SEQ ID NO: 9443
  modified_base 1..8787: mod_base = OTHER; note = Each t is m1f
  source 1..8787: mol_type = other RNA

SEQ ID NO: 11041 - RNA, 8787 nt, synthetic construct; identical to SEQ ID NO: 9444
  modified_base 1..8787: mod_base = OTHER; note = Each t is m1f
  source 1..8787: mol_type = other RNA

SEQ ID NO: 11042 - RNA, 8787 nt, synthetic construct; identical to SEQ ID NO: 9445
  modified_base 1..8787: mod_base = OTHER; note = Each t is m1f
  source 1..8787: mol_type = other RNA

SEQ ID NO: 11043 - RNA, 8787 nt, synthetic construct; identical to SEQ ID NO: 9446
  modified_base 1..8787: mod_base = OTHER; note = Each t is m1f
  source 1..8787: mol_type = other RNA

SEQ ID NO: 11044 - RNA, 8787 nt, synthetic construct; identical to SEQ ID NO: 9447
  modified_base 1..8787: mod_base = OTHER; note = Each t is m1f
  source 1..8787: mol_type = other RNA

SEQ ID NO: 11045 - RNA, 8787 nt, synthetic construct; identical to SEQ ID NO: 9448
  modified_base 1..8787: mod_base = OTHER; note = Each t is m1f
  source 1..8787: mol_type = other RNA

SEQ ID NO: 11046 - RNA, 8787 nt, synthetic construct; identical to SEQ ID NO: 9449
  modified_base 1..8787: mod_base = OTHER; note = Each t is m1f
  source 1..8787: mol_type = other RNA

SEQ ID NO: 11047 - RNA, 8787 nt, synthetic construct; identical to SEQ ID NO: 9450
  modified_base 1..8787: mod_base = OTHER; note = Each t is m1f
  source 1..8787: mol_type = other RNA

SEQ ID NO: 11048 - RNA, 8787 nt, synthetic construct; identical to SEQ ID NO: 9451
  modified_base 1..8787: mod_base = OTHER; note = Each t is m1f
  source 1..8787: mol_type = other RNA

SEQ ID NO: 11049 - RNA, 8787 nt, synthetic construct; identical to SEQ ID NO: 9452
  modified_base 1..8787: mod_base = OTHER; note = Each t is m1f
  source 1..8787: mol_type = other RNA

SEQ ID NO: 11050 - RNA, 8787 nt, synthetic construct; identical to SEQ ID NO: 9453
  modified_base 1..8787: mod_base = OTHER; note = Each t is m1f
  source 1..8787: mol_type = other RNA

SEQ ID NO: 11051 - RNA, 8787 nt, synthetic construct; identical to SEQ ID NO: 9454
  modified_base 1..8787: mod_base = OTHER; note = Each t is m1f
  source 1..8787: mol_type = other RNA

SEQ ID NO: 11052 - RNA, 8787 nt, synthetic construct; identical to SEQ ID NO: 9455
  modified_base 1..8787: mod_base = OTHER; note = Each t is m1f
  source 1..8787: mol_type = other RNA

SEQ ID NO: 11053 - RNA, 8787 nt, synthetic construct; identical to SEQ ID NO: 9456
  modified_base 1..8787: mod_base = OTHER; note = Each t is m1f
  source 1..8787: mol_type = other RNA

SEQ ID NO: 11054 - RNA, 8787 nt, synthetic construct; identical to SEQ ID NO: 9457
  modified_base 1..8787: mod_base = OTHER; note = Each t is m1f
  source 1..8787: mol_type = other RNA

SEQ ID NO: 11055 - RNA, 8787 nt, synthetic construct; identical to SEQ ID NO: 9458
  modified_base 1..8787: mod_base = OTHER; note = Each t is m1f
  source 1..8787: mol_type = other RNA

SEQ ID NO: 11056 - RNA, 8787 nt, synthetic construct; identical to SEQ ID NO: 9459
  modified_base 1..8787: mod_base = OTHER; note = Each t is m1f
  source 1..8787: mol_type = other RNA

SEQ ID NO: 11057 - RNA, 8787 nt, synthetic construct; identical to SEQ ID NO: 9460
  modified_base 1..8787: mod_base = OTHER; note = Each t is m1f
  source 1..8787: mol_type = other RNA

SEQ ID NO: 11058 - RNA, 8787 nt, synthetic construct; identical to SEQ ID NO: 9461
  modified_base 1..8787: mod_base = OTHER; note = Each t is m1f
  source 1..8787: mol_type = other RNA

SEQ ID NO: 11059 - RNA, 8787 nt, synthetic construct; identical to SEQ ID NO: 9462
  modified_base 1..8787: mod_base = OTHER; note = Each t is m1f
  source 1..8787: mol_type = other RNA

SEQ ID NO: 11060 - RNA, 8787 nt, synthetic construct; identical to SEQ ID NO: 9463
  modified_base 1..8787: mod_base = OTHER; note = Each t is m1f
  source 1..8787: mol_type = other RNA

SEQ ID NO: 11061 - RNA, 8787 nt, synthetic construct; identical to SEQ ID NO: 9464
  modified_base 1..8787: mod_base = OTHER; note = Each t is m1f
  source 1..8787: mol_type = other RNA

SEQ ID NO: 11062 - RNA, 8787 nt, synthetic construct; identical to SEQ ID NO: 9465
  modified_base 1..8787: mod_base = OTHER; note = Each t is m1f
  source 1..8787: mol_type = other RNA

SEQ ID NO: 11063 - RNA, 8787 nt, synthetic construct; identical to SEQ ID NO: 9466
  modified_base 1..8787: mod_base = OTHER; note = Each t is m1f
  source 1..8787: mol_type = other RNA

SEQ ID NO: 11064 - RNA, 8787 nt, synthetic construct; identical to SEQ ID NO: 9467
  modified_base 1..8787: mod_base = OTHER; note = Each t is m1f
  source 1..8787: mol_type = other RNA

SEQ ID NO: 11065 - RNA, 8787 nt, synthetic construct; identical to SEQ ID NO: 9468
  modified_base 1..8787: mod_base = OTHER; note = Each t is m1f
  source 1..8787: mol_type = other RNA

SEQ ID NO: 11066 - RNA, 8787 nt, synthetic construct; identical to SEQ ID NO: 9469
  modified_base 1..8787: mod_base = OTHER; note = Each t is m1f
  source 1..8787: mol_type = other RNA

SEQ ID NO: 11067 - RNA, 8787 nt, synthetic construct; identical to SEQ ID NO: 9470
  modified_base 1..8787: mod_base = OTHER; note = Each t is m1f
  source 1..8787: mol_type = other RNA

SEQ ID NO: 11068 - RNA, 8787 nt, synthetic construct; identical to SEQ ID NO: 9471
  modified_base 1..8787: mod_base = OTHER; note = Each t is m1f
  source 1..8787: mol_type = other RNA

SEQ ID NO: 11069 - RNA, 8787 nt, synthetic construct; identical to SEQ ID NO: 9472
  modified_base 1..8787: mod_base = OTHER; note = Each t is m1f
  source 1..8787: mol_type = other RNA

SEQ ID NO: 11070 - RNA, 8787 nt, synthetic construct; identical to SEQ ID NO: 9473
  modified_base 1..8787: mod_base = OTHER; note = Each t is m1f
  source 1..8787: mol_type = other RNA

SEQ ID NO: 11071 - RNA, 8787 nt, synthetic construct; identical to SEQ ID NO: 9474
  modified_base 1..8787: mod_base = OTHER; note = Each t is m1f
  source 1..8787: mol_type = other RNA

SEQ ID NO: 11072 - RNA, 8787 nt, synthetic construct; identical to SEQ ID NO: 9475
  modified_base 1..8787: mod_base = OTHER; note = Each t is m1f
  source 1..8787: mol_type = other RNA

SEQ ID NO: 11073 - RNA, 8787 nt, synthetic construct; identical to SEQ ID NO: 9476
  modified_base 1..8787: mod_base = OTHER; note = Each t is m1f
  source 1..8787: mol_type = other RNA

SEQ ID NO: 11074 - RNA, 8787 nt, synthetic construct; identical to SEQ ID NO: 9477
  modified_base 1..8787: mod_base = OTHER; note = Each t is m1f
  source 1..8787: mol_type = other RNA

SEQ ID NO: 11075 - RNA, 8787 nt, synthetic construct; identical to SEQ ID NO: 9478
  modified_base 1..8787: mod_base = OTHER; note = Each t is m1f
  source 1..8787: mol_type = other RNA

SEQ ID NO: 11076 - RNA, 8787 nt, synthetic construct; identical to SEQ ID NO: 9479
  modified_base 1..8787: mod_base = OTHER; note = Each t is m1f
  source 1..8787: mol_type = other RNA

SEQ ID NO: 11077 - RNA, 8787 nt, synthetic construct; identical to SEQ ID NO: 9480
  modified_base 1..8787: mod_base = OTHER; note = Each t is m1f
  source 1..8787: mol_type = other RNA

SEQ ID NO: 11078 - RNA, 8787 nt, synthetic construct; identical to SEQ ID NO: 9481
  modified_base 1..8787: mod_base = OTHER; note = Each t is m1f
  source 1..8787: mol_type = other RNA

SEQ ID NO: 11079 - RNA, 8787 nt, synthetic construct; identical to SEQ ID NO: 9482
  modified_base 1..8787: mod_base = OTHER; note = Each t is m1f
  source 1..8787: mol_type = other RNA

SEQ ID NO: 11080 - RNA, 8787 nt, synthetic construct; identical to SEQ ID NO: 9483
  modified_base 1..8787: mod_base = OTHER; note = Each t is m1f
  source 1..8787: mol_type = other RNA

SEQ ID NO: 11081 - RNA, 8787 nt, synthetic construct; identical to SEQ ID NO: 9484
  modified_base 1..8787: mod_base = OTHER; note = Each t is m1f
  source 1..8787: mol_type = other RNA

SEQ ID NO: 11082 - RNA, 8787 nt, synthetic construct; identical to SEQ ID NO: 9485
  modified_base 1..8787: mod_base = OTHER; note = Each t is m1f
  source 1..8787: mol_type = other RNA

SEQ ID NO: 11083 - RNA, 8787 nt, synthetic construct; identical to SEQ ID NO: 9486
  modified_base 1..8787: mod_base = OTHER; note = Each t is m1f
  source 1..8787: mol_type = other RNA

SEQ ID NO: 11084 - RNA, 8787 nt, synthetic construct; identical to SEQ ID NO: 9487
  modified_base 1..8787: mod_base = OTHER; note = Each t is m1f
  source 1..8787: mol_type = other RNA

SEQ ID NO: 11085 - RNA, 8787 nt, synthetic construct; identical to SEQ ID NO: 9488
  modified_base 1..8787: mod_base = OTHER; note = Each t is m1f
  source 1..8787: mol_type = other RNA

SEQ ID NO: 11086 - RNA, 8787 nt, synthetic construct; identical to SEQ ID NO: 9489
  modified_base 1..8787: mod_base = OTHER; note = Each t is m1f
  source 1..8787: mol_type = other RNA

SEQ ID NO: 11087 - RNA, 8787 nt, synthetic construct; identical to SEQ ID NO: 9490
  modified_base 1..8787: mod_base = OTHER; note = Each t is m1f
  source 1..8787: mol_type = other RNA

SEQ ID NO: 11088 - RNA, 8787 nt, synthetic construct; identical to SEQ ID NO: 9491
  modified_base 1..8787: mod_base = OTHER; note = Each t is m1f
  source 1..8787: mol_type = other RNA

SEQ ID NO: 11089 - RNA, 8787 nt, synthetic construct; identical to SEQ ID NO: 9492
  modified_base 1..8787: mod_base = OTHER; note = Each t is m1f
  source 1..8787: mol_type = other RNA

SEQ ID NO: 11090 - RNA, 8787 nt, synthetic construct; identical to SEQ ID NO: 9493
  modified_base 1..8787: mod_base = OTHER; note = Each t is m1f
  source 1..8787: mol_type = other RNA

SEQ ID NO: 11091 - RNA, 8787 nt, synthetic construct; identical to SEQ ID NO: 9494
  modified_base 1..8787: mod_base = OTHER; note = Each t is m1f
  source 1..8787: mol_type = other RNA

SEQ ID NO: 11092 - RNA, 8787 nt, synthetic construct; identical to SEQ ID NO: 9495
  modified_base 1..8787: mod_base = OTHER; note = Each t is m1f
  source 1..8787: mol_type = other RNA

SEQ ID NO: 11093 - RNA, 8787 nt, synthetic construct; identical to SEQ ID NO: 9496
  modified_base 1..8787: mod_base = OTHER; note = Each t is m1f
  source 1..8787: mol_type = other RNA

SEQ ID NO: 11094 - RNA, 8820 nt, synthetic construct; identical to SEQ ID NO: 9497
  modified_base 1..8820: mod_base = OTHER; note = Each t is m1f
  source 1..8820: mol_type = other RNA

SEQ ID NO: 11095 - RNA, 8787 nt, synthetic construct; identical to SEQ ID NO: 9498
  modified_base 1..8787: mod_base = OTHER; note = Each t is m1f
  source 1..8787: mol_type = other RNA

SEQ ID NO: 11096 - RNA, 8787 nt, synthetic construct; identical to SEQ ID NO: 9499
  modified_base 1..8787: mod_base = OTHER; note = Each t is m1f
  source 1..8787: mol_type = other RNA

SEQ ID NO: 11097 - RNA, 8787 nt, synthetic construct; identical to SEQ ID NO: 9500
  modified_base 1..8787: mod_base = OTHER; note = Each t is m1f
  source 1..8787: mol_type = other RNA

SEQ ID NO: 11098 - RNA, 8787 nt, synthetic construct; identical to SEQ ID NO: 9501
  modified_base 1..8787: mod_base = OTHER; note = Each t is m1f
  source 1..8787: mol_type = other RNA

SEQ ID NO: 11099 - RNA, 8787 nt, synthetic construct; identical to SEQ ID NO: 9502
  modified_base 1..8787: mod_base = OTHER; note = Each t is m1f
  source 1..8787: mol_type = other RNA

SEQ ID NO: 11100 - RNA, 8787 nt, synthetic construct; identical to SEQ ID NO: 9503
  modified_base 1..8787: mod_base = OTHER; note = Each t is m1f
  source 1..8787: mol_type = other RNA

SEQ ID NO: 11101 - RNA, 8787 nt, synthetic construct; identical to SEQ ID NO: 9504
  modified_base 1..8787: mod_base = OTHER; note = Each t is m1f
  source 1..8787: mol_type = other RNA

SEQ ID NO: 11102 - RNA, 8787 nt, synthetic construct; identical to SEQ ID NO: 9505
  modified_base 1..8787: mod_base = OTHER; note = Each t is m1f
  source 1..8787: mol_type = other RNA

SEQ ID NO: 11103 - RNA, 8787 nt, synthetic construct; identical to SEQ ID NO: 9506
  modified_base 1..8787: mod_base = OTHER; note = Each t is m1f
  source 1..8787: mol_type = other RNA

SEQ ID NO: 11104 - RNA, 8787 nt, synthetic construct; identical to SEQ ID NO: 9507
  modified_base 1..8787: mod_base = OTHER; note = Each t is m1f
  source 1..8787: mol_type = other RNA

SEQ ID NO: 11105 - RNA, 8787 nt, synthetic construct; identical to SEQ ID NO: 9508
  modified_base 1..8787: mod_base = OTHER; note = Each t is m1f
  source 1..8787: mol_type = other RNA

SEQ ID NO: 11106 - RNA, 8787 nt, synthetic construct; identical to SEQ ID NO: 9509
  modified_base 1..8787: mod_base = OTHER; note = Each t is m1f
  source 1..8787: mol_type = other RNA

SEQ ID NO: 11107 - RNA, 8787 nt, synthetic construct; identical to SEQ ID NO: 9510
  modified_base 1..8787: mod_base = OTHER; note = Each t is m1f
  source 1..8787: mol_type = other RNA

SEQ ID NO: 11108 - RNA, 8787 nt, synthetic construct; identical to SEQ ID NO: 9511
  modified_base 1..8787: mod_base = OTHER; note = Each t is m1f
  source 1..8787: mol_type = other RNA

SEQ ID NO: 11109 - RNA, 8787 nt, synthetic construct; identical to SEQ ID NO: 9512
  modified_base 1..8787: mod_base = OTHER; note = Each t is m1f
  source 1..8787: mol_type = other RNA

SEQ ID NO: 11110 - RNA, 8787 nt, synthetic construct; identical to SEQ ID NO: 9513
  modified_base 1..8787: mod_base = OTHER; note = Each t is m1f
  source 1..8787: mol_type = other RNA

SEQ ID NO: 11111 - RNA, 8787 nt, synthetic construct; identical to SEQ ID NO: 9514
  modified_base 1..8787: mod_base = OTHER; note = Each t is m1f
  source 1..8787: mol_type = other RNA

SEQ ID NO: 11112 - RNA, 8787 nt, synthetic construct; identical to SEQ ID NO: 9515
  modified_base 1..8787: mod_base = OTHER; note = Each t is m1f
  source 1..8787: mol_type = other RNA

SEQ ID NO: 11113 - RNA, 8787 nt, synthetic construct; identical to SEQ ID NO: 9516
  modified_base 1..8787: mod_base = OTHER; note = Each t is m1f
  source 1..8787: mol_type = other RNA

SEQ ID NO: 11114 - RNA, 8787 nt, synthetic construct; identical to SEQ ID NO: 9517
  modified_base 1..8787: mod_base = OTHER; note = Each t is m1f
  source 1..8787: mol_type = other RNA

SEQ ID NO: 11115 - RNA, 8787 nt, synthetic construct; identical to SEQ ID NO: 9518
  modified_base 1..8787: mod_base = OTHER; note = Each t is m1f
  source 1..8787: mol_type = other RNA

SEQ ID NO: 11116 - RNA, 8787 nt, synthetic construct; identical to SEQ ID NO: 9519
  modified_base 1..8787: mod_base = OTHER; note = Each t is m1f
  source 1..8787: mol_type = other RNA

SEQ ID NO: 11117 - RNA, 8787 nt, synthetic construct; identical to SEQ ID NO: 9520
  modified_base 1..8787: mod_base = OTHER; note = Each t is m1f
  source 1..8787: mol_type = other RNA

SEQ ID NO: 11118 - RNA, 8787 nt, synthetic construct; identical to SEQ ID NO: 9521
  modified_base 1..8787: mod_base = OTHER; note = Each t is m1f
  source 1..8787: mol_type = other RNA

SEQ ID NO: 11119 - RNA, 8787 nt, synthetic construct; identical to SEQ ID NO: 9522
  modified_base 1..8787: mod_base = OTHER; note = Each t is m1f
  source 1..8787: mol_type = other RNA

SEQ ID NO: 11120 - RNA, 8787 nt, synthetic construct; identical to SEQ ID NO: 9523
  modified_base 1..8787: mod_base = OTHER; note = Each t is m1f
  source 1..8787: mol_type = other RNA

SEQ ID NO: 11121 - RNA, 8787 nt, synthetic construct; identical to SEQ ID NO: 9524
  modified_base 1..8787: mod_base = OTHER; note = Each t is m1f
  source 1..8787: mol_type = other RNA

SEQ ID NO: 11122 - RNA, 8787 nt, synthetic construct; identical to SEQ ID NO: 9525
  modified_base 1..8787: mod_base = OTHER; note = Each t is m1f
  source 1..8787: mol_type = other RNA

SEQ ID NO: 11123 - RNA, 8787 nt, synthetic construct; identical to SEQ ID NO: 9526
  modified_base 1..8787: mod_base = OTHER; note = Each t is m1f
  source 1..8787: mol_type = other RNA

SEQ ID NO: 11124 - RNA, 8787 nt, synthetic construct; identical to SEQ ID NO: 9527
  modified_base 1..8787: mod_base = OTHER; note = Each t is m1f
  source 1..8787: mol_type = other RNA

SEQ ID NO: 11125 - RNA, 8787 nt, synthetic construct; identical to SEQ ID NO: 9528
  modified_base 1..8787: mod_base = OTHER; note = Each t is m1f
  source 1..8787: mol_type = other RNA

SEQ ID NO: 11126 - RNA, 8787 nt, synthetic construct; identical to SEQ ID NO: 9529
  modified_base 1..8787: mod_base = OTHER; note = Each t is m1f
  source 1..8787: mol_type = other RNA

SEQ ID NO: 11127 - RNA, 8787 nt, synthetic construct; identical to SEQ ID NO: 9530
  modified_base 1..8787: mod_base = OTHER; note = Each t is m1f
  source 1..8787: mol_type = other RNA

SEQ ID NO: 11128 - RNA, 8787 nt, synthetic construct; identical to SEQ ID NO: 9531
  modified_base 1..8787: mod_base = OTHER; note = Each t is m1f
  source 1..8787: mol_type = other RNA

SEQ ID NO: 11129 - RNA, 8787 nt, synthetic construct; identical to SEQ ID NO: 9532
  modified_base 1..8787: mod_base = OTHER; note = Each t is m1f
  source 1..8787: mol_type = other RNA

SEQ ID NO: 11130 - RNA, 8787 nt, synthetic construct; identical to SEQ ID NO: 9533
  modified_base 1..8787: mod_base = OTHER; note = Each t is m1f
  source 1..8787: mol_type = other RNA

SEQ ID NO: 11131 - RNA, 8787 nt, synthetic construct; identical to SEQ ID NO: 9534
  modified_base 1..8787: mod_base = OTHER; note = Each t is m1f
  source 1..8787: mol_type = other RNA

SEQ ID NO: 11132 - RNA, 8787 nt, synthetic construct; identical to SEQ ID NO: 9535
  modified_base 1..8787: mod_base = OTHER; note = Each t is m1f
  source 1..8787: mol_type = other RNA

SEQ ID NO: 11133 - RNA, 8787 nt, synthetic construct; identical to SEQ ID NO: 9536
  modified_base 1..8787: mod_base = OTHER; note = Each t is m1f
  source 1..8787: mol_type = other RNA

SEQ ID NO: 11134 - RNA, 8787 nt, synthetic construct; identical to SEQ ID NO: 9537
  modified_base 1..8787: mod_base = OTHER; note = Each t is m1f
  source 1..8787: mol_type = other RNA

SEQ ID NO: 11135 - RNA, 8787 nt, synthetic construct; identical to SEQ ID NO: 9538
  modified_base 1..8787: mod_base = OTHER; note = Each t is m1f
  source 1..8787: mol_type = other RNA

SEQ ID NO: 11136 - RNA, 8787 nt, synthetic construct; identical to SEQ ID NO: 9539
  modified_base 1..8787: mod_base = OTHER; note = Each t is m1f
  source 1..8787: mol_type = other RNA

SEQ ID NO: 11137 - RNA, 8787 nt, synthetic construct; identical to SEQ ID NO: 9540
  modified_base 1..8787: mod_base = OTHER; note = Each t is m1f
  source 1..8787: mol_type = other RNA

SEQ ID NO: 11138 - RNA, 8787 nt, synthetic construct; identical to SEQ ID NO: 9541
  modified_base 1..8787: mod_base = OTHER; note = Each t is m1f
  source 1..8787: mol_type = other RNA

SEQ ID NO: 11139 - RNA, 8787 nt, synthetic construct; identical to SEQ ID NO: 9542
  modified_base 1..8787: mod_base = OTHER; note = Each t is m1f
  source 1..8787: mol_type = other RNA

SEQ ID NO: 11140 - RNA, 8787 nt, synthetic construct; identical to SEQ ID NO: 9543
  modified_base 1..8787: mod_base = OTHER; note = Each t is m1f
  source 1..8787: mol_type = other RNA

SEQ ID NO: 11141 - RNA, 8787 nt, synthetic construct; identical to SEQ ID NO: 9544
  modified_base 1..8787: mod_base = OTHER; note = Each t is m1f
  source 1..8787: mol_type = other RNA

SEQ ID NO: 11142 - RNA, 8787 nt, synthetic construct; identical to SEQ ID NO: 9545
  modified_base 1..8787: mod_base = OTHER; note = Each t is m1f
  source 1..8787: mol_type = other RNA

SEQ ID NO: 11143 - RNA, 8787 nt, synthetic construct; identical to SEQ ID NO: 9546
  modified_base 1..8787: mod_base = OTHER; note = Each t is m1f
  source 1..8787: mol_type = other RNA

SEQ ID NO: 11144 - RNA, 8787 nt, synthetic construct; identical to SEQ ID NO: 9547
  modified_base 1..8787: mod_base = OTHER; note = Each t is m1f
  source 1..8787: mol_type = other RNA

SEQ ID NO: 11145 - RNA, 8787 nt, synthetic construct; identical to SEQ ID NO: 9548
  modified_base 1..8787: mod_base = OTHER; note = Each t is m1f
  source 1..8787: mol_type = other RNA

SEQ ID NO: 11146 - RNA, 8787 nt, synthetic construct; identical to SEQ ID NO: 9549
  modified_base 1..8787: mod_base = OTHER; note = Each t is m1f
  source 1..8787: mol_type = other RNA

SEQ ID NO: 11147 - RNA, 8787 nt, synthetic construct; identical to SEQ ID NO: 9550
  modified_base 1..8787: mod_base = OTHER; note = Each t is m1f
  source 1..8787: mol_type = other RNA

SEQ ID NO: 11148 - RNA, 8787 nt, synthetic construct; identical to SEQ ID NO: 9551
  modified_base 1..8787: mod_base = OTHER; note = Each t is m1f
  source 1..8787: mol_type = other RNA

SEQ ID NO: 11149 - RNA, 8787 nt, synthetic construct; identical to SEQ ID NO: 9552
  modified_base 1..8787: mod_base = OTHER; note = Each t is m1f
  source 1..8787: mol_type = other RNA

SEQ ID NO: 11150 - RNA, 8787 nt, synthetic construct; identical to SEQ ID NO: 9553
  modified_base 1..8787: mod_base = OTHER; note = Each t is m1f
  source 1..8787: mol_type = other RNA

SEQ ID NO: 11151 - RNA, 8787 nt, synthetic construct; identical to SEQ ID NO: 9554
  modified_base 1..8787: mod_base = OTHER; note = Each t is m1f
  source 1..8787: mol_type = other RNA

SEQ ID NO: 11152 - RNA, 8787 nt, synthetic construct; identical to SEQ ID NO: 9555
  modified_base 1..8787: mod_base = OTHER; note = Each t is m1f
  source 1..8787: mol_type = other RNA

SEQ ID NO: 11153 - RNA, 8787 nt, synthetic construct; identical to SEQ ID NO: 9556
  modified_base 1..8787: mod_base = OTHER; note = Each t is m1f
  source 1..8787: mol_type = other RNA

SEQ ID NO: 11154 - RNA, 8787 nt, synthetic construct; identical to SEQ ID NO: 9557
  modified_base 1..8787: mod_base = OTHER; note = Each t is m1f
  source 1..8787: mol_type = other RNA

SEQ ID NO: 11155 - RNA, 8787 nt, synthetic construct; identical to SEQ ID NO: 9558
  modified_base 1..8787: mod_base = OTHER; note = Each t is m1f
  source 1..8787: mol_type = other RNA

SEQ ID NO: 11156 - RNA, 8787 nt, synthetic construct; identical to SEQ ID NO: 9559
  modified_base 1..8787: mod_base = OTHER; note = Each t is m1f
  source 1..8787: mol_type = other RNA

SEQ ID NO: 11157 - RNA, 8787 nt, synthetic construct; identical to SEQ ID NO: 9560
  modified_base 1..8787: mod_base = OTHER; note = Each t is m1f
  source 1..8787: mol_type = other RNA

SEQ ID NO: 11158 - RNA, 8787 nt, synthetic construct; identical to SEQ ID NO: 9561
  modified_base 1..8787: mod_base = OTHER; note = Each t is m1f
  source 1..8787: mol_type = other RNA

SEQ ID NO: 11159 - RNA, 8787 nt, synthetic construct; identical to SEQ ID NO: 9562
  modified_base 1..8787: mod_base = OTHER; note = Each t is m1f
  source 1..8787: mol_type = other RNA

SEQ ID NO: 11160 - RNA, 8787 nt, synthetic construct; identical to SEQ ID NO: 9563
  modified_base 1..8787: mod_base = OTHER; note = Each t is m1f
  source 1..8787: mol_type = other RNA

SEQ ID NO: 11161 - RNA, 8787 nt, synthetic construct; identical to SEQ ID NO: 9564
  modified_base 1..8787: mod_base = OTHER; note = Each t is m1f
  source 1..8787: mol_type = other RNA

SEQ ID NO: 11162 - RNA, 8787 nt, synthetic construct; identical to SEQ ID NO: 9565
  modified_base 1..8787: mod_base = OTHER; note = Each t is m1f
  source 1..8787: mol_type = other RNA

SEQ ID NO: 11163 - RNA, 8787 nt, synthetic construct; identical to SEQ ID NO: 9566
  modified_base 1..8787: mod_base = OTHER; note = Each t is m1f
  source 1..8787: mol_type = other RNA

SEQ ID NO: 11164 - RNA, 8796 nt, synthetic construct; identical to SEQ ID NO: 9567
  modified_base 1..8796: mod_base = OTHER; note = Each t is m1f
  source 1..8796: mol_type = other RNA

SEQ ID NO: 11165 - RNA, 8796 nt, synthetic construct; identical to SEQ ID NO: 9568
  modified_base 1..8796: mod_base = OTHER; note = Each t is m1f
  source 1..8796: mol_type = other RNA

SEQ ID NO: 11166 - RNA, 8787 nt, synthetic construct; identical to SEQ ID NO: 9569
  modified_base 1..8787: mod_base = OTHER; note = Each t is m1f
  source 1..8787: mol_type = other RNA

SEQ ID NO: 11167 - RNA, 8787 nt, synthetic construct; identical to SEQ ID NO: 9570
  modified_base 1..8787: mod_base = OTHER; note = Each t is m1f
  source 1..8787: mol_type = other RNA

SEQ ID NO: 11168 - RNA, 8787 nt, synthetic construct; identical to SEQ ID NO: 9571
  modified_base 1..8787: mod_base = OTHER; note = Each t is m1f
  source 1..8787: mol_type = other RNA

SEQ ID NO: 11169 - RNA, 8787 nt, synthetic construct; identical to SEQ ID NO: 9572
  modified_base 1..8787: mod_base = OTHER; note = Each t is m1f
  source 1..8787: mol_type = other RNA

SEQ ID NO: 11170 - RNA, 8787 nt, synthetic construct; identical to SEQ ID NO: 9573
  modified_base 1..8787: mod_base = OTHER; note = Each t is m1f
  source 1..8787: mol_type = other RNA

SEQ ID NO: 11171 - RNA, 8787 nt, synthetic construct; identical to SEQ ID NO: 9574
  modified_base 1..8787: mod_base = OTHER; note = Each t is m1f
  source 1..8787: mol_type = other RNA

SEQ ID NO: 11172 - RNA, 8787 nt, synthetic construct; identical to SEQ ID NO: 9575
  modified_base 1..8787: mod_base = OTHER; note = Each t is m1f
  source 1..8787: mol_type = other RNA

SEQ ID NO: 11173 - RNA, 8787 nt, synthetic construct; identical to SEQ ID NO: 9576
  modified_base 1..8787: mod_base = OTHER; note = Each t is m1f
  source 1..8787: mol_type = other RNA

SEQ ID NO: 11174 - RNA, 8787 nt, synthetic construct; identical to SEQ ID NO: 9577
  modified_base 1..8787: mod_base = OTHER; note = Each t is m1f
  source 1..8787: mol_type = other RNA

SEQ ID NO: 11175 - RNA, 8787 nt, synthetic construct; identical to SEQ ID NO: 9578
  modified_base 1..8787: mod_base = OTHER; note = Each t is m1f
  source 1..8787: mol_type = other RNA

SEQ ID NO: 11176 - RNA, 8787 nt, synthetic construct; identical to SEQ ID NO: 9579
  modified_base 1..8787: mod_base = OTHER; note = Each t is m1f
  source 1..8787: mol_type = other RNA

SEQ ID NO: 11177 - RNA, 8787 nt, synthetic construct; identical to SEQ ID NO: 9580
  modified_base 1..8787: mod_base = OTHER; note = Each t is m1f
  source 1..8787: mol_type = other RNA

SEQ ID NO: 11178 - RNA, 8787 nt, synthetic construct; identical to SEQ ID NO: 9581
  modified_base 1..8787: mod_base = OTHER; note = Each t is m1f
  source 1..8787: mol_type = other RNA

SEQ ID NO: 11179 - RNA, 8787 nt, synthetic construct; identical to SEQ ID NO: 9582
  modified_base 1..8787: mod_base = OTHER; note = Each t is m1f
  source 1..8787: mol_type = other RNA

SEQ ID NO: 11180 - RNA, 8787 nt, synthetic construct; identical to SEQ ID NO: 9583
  modified_base 1..8787: mod_base = OTHER; note = Each t is m1f
  source 1..8787: mol_type = other RNA

SEQ ID NO: 11181 - RNA, 8787 nt, synthetic construct; identical to SEQ ID NO: 9584
  modified_base 1..8787: mod_base = OTHER; note = Each t is m1f
  source 1..8787: mol_type = other RNA

SEQ ID NO: 11182 - RNA, 8787 nt, synthetic construct; identical to SEQ ID NO: 9585
  modified_base 1..8787: mod_base = OTHER; note = Each t is m1f
  source 1..8787: mol_type = other RNA

SEQ ID NO: 11183 - RNA, 8787 nt, synthetic construct; identical to SEQ ID NO: 9586
  modified_base 1..8787: mod_base = OTHER; note = Each t is m1f
  source 1..8787: mol_type = other RNA

SEQ ID NO: 11184 - RNA, 8787 nt, synthetic construct; identical to SEQ ID NO: 9587
  modified_base 1..8787: mod_base = OTHER; note = Each t is m1f
  source 1..8787: mol_type = other RNA

SEQ ID NO: 11185 - RNA, 8787 nt, synthetic construct; identical to SEQ ID NO: 9588
  modified_base 1..8787: mod_base = OTHER; note = Each t is m1f
  source 1..8787: mol_type = other RNA

SEQ ID NO: 11186 - RNA, 8787 nt, synthetic construct; identical to SEQ ID NO: 9589
  modified_base 1..8787: mod_base = OTHER; note = Each t is m1f
  source 1..8787: mol_type = other RNA

SEQ ID NO: 11187 - RNA, 8787 nt, synthetic construct; identical to SEQ ID NO: 9590
  modified_base 1..8787: mod_base = OTHER; note = Each t is m1f
  source 1..8787: mol_type = other RNA

SEQ ID NO: 11188 - RNA, 8787 nt, synthetic construct; identical to SEQ ID NO: 9591
  modified_base 1..8787: mod_base = OTHER; note = Each t is m1f
  source 1..8787: mol_type = other RNA

SEQ ID NO: 11189 - RNA, 8787 nt, synthetic construct; identical to SEQ ID NO: 9592
  modified_base 1..8787: mod_base = OTHER; note = Each t is m1f
  source 1..8787: mol_type = other RNA

SEQ ID NO: 11190 - RNA, 8787 nt, synthetic construct; identical to SEQ ID NO: 9593
  modified_base 1..8787: mod_base = OTHER; note = Each t is m1f
  source 1..8787: mol_type = other RNA

SEQ ID NO: 11191 - RNA, 8787 nt, synthetic construct; identical to SEQ ID NO: 9594
  modified_base 1..8787: mod_base = OTHER; note = Each t is m1f
  source 1..8787: mol_type = other RNA

SEQ ID NO: 11192 - RNA, 8787 nt, synthetic construct; identical to SEQ ID NO: 9595
  modified_base 1..8787: mod_base = OTHER; note = Each t is m1f
  source 1..8787: mol_type = other RNA

SEQ ID NO: 11193 - RNA, 8787 nt, synthetic construct; identical to SEQ ID NO: 9596
  modified_base 1..8787: mod_base = OTHER; note = Each t is m1f
  source 1..8787: mol_type = other RNA

SEQ ID NO: 11194 - RNA, 8787 nt, synthetic construct; identical to SEQ ID NO: 9597
  modified_base 1..8787: mod_base = OTHER; note = Each t is m1f
  source 1..8787: mol_type = other RNA

SEQ ID NO: 11195 - RNA, 8787 nt, synthetic construct; identical to SEQ ID NO: 9598
  modified_base 1..8787: mod_base = OTHER; note = Each t is m1f
  source 1..8787: mol_type = other RNA

SEQ ID NO: 11196 - RNA, 8787 nt, synthetic construct; identical to SEQ ID NO: 9599
  modified_base 1..8787: mod_base = OTHER; note = Each t is m1f
  source 1..8787: mol_type = other RNA

SEQ ID NO: 11197 - RNA, 8787 nt, synthetic construct; identical to SEQ ID NO: 9600
  modified_base 1..8787: mod_base = OTHER; note = Each t is m1f
  source 1..8787: mol_type = other RNA

SEQ ID NO: 11198 - RNA, 8787 nt, synthetic construct; identical to SEQ ID NO: 9601
  modified_base 1..8787: mod_base = OTHER; note = Each t is m1f
  source 1..8787: mol_type = other RNA

SEQ ID NO: 11199 - RNA, 8787 nt, synthetic construct; identical to SEQ ID NO: 9602
  modified_base 1..8787: mod_base = OTHER; note = Each t is m1f
  source 1..8787: mol_type = other RNA

SEQ ID NO: 11200 - RNA, 8787 nt, synthetic construct; identical to SEQ ID NO: 9603
  modified_base 1..8787: mod_base = OTHER; note = Each t is m1f
  source 1..8787: mol_type = other RNA

SEQ ID NO: 11201 - RNA, 8787 nt, synthetic construct; identical to SEQ ID NO: 9604
  modified_base 1..8787: mod_base = OTHER; note = Each t is m1f
  source 1..8787: mol_type = other RNA

SEQ ID NO: 11202 - RNA, 8787 nt, synthetic construct; identical to SEQ ID NO: 9605
  modified_base 1..8787: mod_base = OTHER; note = Each t is m1f
  source 1..8787: mol_type = other RNA

SEQ ID NO: 11203 - RNA, 8787 nt, synthetic construct; identical to SEQ ID NO: 9606
  modified_base 1..8787: mod_base = OTHER; note = Each t is m1f
  source 1..8787: mol_type = other RNA

SEQ ID NO: 11204 - RNA, 8787 nt, synthetic construct; identical to SEQ ID NO: 9607
  modified_base 1..8787: mod_base = OTHER; note = Each t is m1f
  source 1..8787: mol_type = other RNA

SEQ ID NO: 11205 - RNA, 8787 nt, synthetic construct; identical to SEQ ID NO: 9608
  modified_base 1..8787: mod_base = OTHER; note = Each t is m1f
  source 1..8787: mol_type = other RNA

SEQ ID NO: 11206 - RNA, 8787 nt, synthetic construct; identical to SEQ ID NO: 9609
  modified_base 1..8787: mod_base = OTHER; note = Each t is m1f
  source 1..8787: mol_type = other RNA

SEQ ID NO: 11207 - RNA, 8787 nt, synthetic construct; identical to SEQ ID NO: 9610
  modified_base 1..8787: mod_base = OTHER; note = Each t is m1f
  source 1..8787: mol_type = other RNA

SEQ ID NO: 11208 - RNA, 8787 nt, synthetic construct; identical to SEQ ID NO: 9611
  modified_base 1..8787: mod_base = OTHER; note = Each t is m1f
  source 1..8787: mol_type = other RNA

SEQ ID NO: 11209 - RNA, 8787 nt, synthetic construct; identical to SEQ ID NO: 9612
  modified_base 1..8787: mod_base = OTHER; note = Each t is m1f
  source 1..8787: mol_type = other RNA

SEQ ID NO: 11210 - RNA, 8787 nt, synthetic construct; identical to SEQ ID NO: 9613
  modified_base 1..8787: mod_base = OTHER; note = Each t is m1f
  source 1..8787: mol_type = other RNA

SEQ ID NO: 11211 - RNA, 8814 nt, synthetic construct; identical to SEQ ID NO: 9614
  modified_base 1..8814: mod_base = OTHER; note = Each t is m1f
  source 1..8814: mol_type = other RNA

SEQ ID NO: 11212 - RNA, 8787 nt, synthetic construct; identical to SEQ ID NO: 9615
  modified_base 1..8787: mod_base = OTHER; note = Each t is m1f
  source 1..8787: mol_type = other RNA

SEQ ID NO: 11213 - RNA, 8787 nt, synthetic construct; identical to SEQ ID NO: 9616
  modified_base 1..8787: mod_base = OTHER; note = Each t is m1f
  source 1..8787: mol_type = other RNA

SEQ ID NO: 11214 - RNA, 8787 nt, synthetic construct; identical to SEQ ID NO: 9617
  modified_base 1..8787: mod_base = OTHER; note = Each t is m1f
  source 1..8787: mol_type = other RNA

SEQ ID NO: 11215 - RNA, 8787 nt, synthetic construct; identical to SEQ ID NO: 9618
  modified_base 1..8787: mod_base = OTHER; note = Each t is m1f
  source 1..8787: mol_type = other RNA

SEQ ID NO: 11216 - RNA, 8787 nt, synthetic construct; identical to SEQ ID NO: 9619
  modified_base 1..8787: mod_base = OTHER; note = Each t is m1f
  source 1..8787: mol_type = other RNA

SEQ ID NO: 11217 - RNA, 8787 nt, synthetic construct; identical to SEQ ID NO: 9620
  modified_base 1..8787: mod_base = OTHER; note = Each t is m1f
  source 1..8787: mol_type = other RNA

SEQ ID NO: 11218 - RNA, 8787 nt, synthetic construct; identical to SEQ ID NO: 9621
  modified_base 1..8787: mod_base = OTHER; note = Each t is m1f
  source 1..8787: mol_type = other RNA

SEQ ID NO: 11219 - RNA, 8787 nt, synthetic construct; identical to SEQ ID NO: 9622
  modified_base 1..8787: mod_base = OTHER; note = Each t is m1f
  source 1..8787: mol_type = other RNA

SEQ ID NO: 11220 - RNA, 8787 nt, synthetic construct; identical to SEQ ID NO: 9623
  modified_base 1..8787: mod_base = OTHER; note = Each t is m1f
  source 1..8787: mol_type = other RNA

SEQ ID NO: 11221 - RNA, 8787 nt, synthetic construct; identical to SEQ ID NO: 9624
  modified_base 1..8787: mod_base = OTHER; note = Each t is m1f
  source 1..8787: mol_type = other RNA

SEQ ID NO: 11222 - RNA, 8787 nt, synthetic construct; identical to SEQ ID NO: 9625
  modified_base 1..8787: mod_base = OTHER; note = Each t is m1f
  source 1..8787: mol_type = other RNA

SEQ ID NO: 11223 - RNA, 8787 nt, synthetic construct; identical to SEQ ID NO: 9626
  modified_base 1..8787: mod_base = OTHER; note = Each t is m1f
  source 1..8787: mol_type = other RNA

SEQ ID NO: 11224 - RNA, 8787 nt, synthetic construct; identical to SEQ ID NO: 9627
  modified_base 1..8787: mod_base = OTHER; note = Each t is m1f
  source 1..8787: mol_type = other RNA

SEQ ID NO: 11225 - RNA, 8787 nt, synthetic construct; identical to SEQ ID NO: 9628
  modified_base 1..8787: mod_base = OTHER; note = Each t is m1f
  source 1..8787: mol_type = other RNA

SEQ ID NO: 11226 - RNA, 8787 nt, synthetic construct; identical to SEQ ID NO: 9629
  modified_base 1..8787: mod_base = OTHER; note = Each t is m1f
  source 1..8787: mol_type = other RNA

SEQ ID NO: 11227 - RNA, 8787 nt, synthetic construct; identical to SEQ ID NO: 9630
  modified_base 1..8787: mod_base = OTHER; note = Each t is m1f
  source 1..8787: mol_type = other RNA

SEQ ID NO: 11228 - RNA, 8787 nt, synthetic construct; identical to SEQ ID NO: 9631
  modified_base 1..8787: mod_base = OTHER; note = Each t is m1f
  source 1..8787: mol_type = other RNA

SEQ ID NO: 11229 - RNA, 8787 nt, synthetic construct; identical to SEQ ID NO: 9632
  modified_base 1..8787: mod_base = OTHER; note = Each t is m1f
  source 1..8787: mol_type = other RNA

SEQ ID NO: 11230 - RNA, 8787 nt, synthetic construct; identical to SEQ ID NO: 9633
  modified_base 1..8787: mod_base = OTHER; note = Each t is m1f
  source 1..8787: mol_type = other RNA

SEQ ID NO: 11231 - RNA, 8787 nt, synthetic construct; identical to SEQ ID NO: 9634
  modified_base 1..8787: mod_base = OTHER; note = Each t is m1f
  source 1..8787: mol_type = other RNA

SEQ ID NO: 11232 - RNA, 8787 nt, synthetic construct; identical to SEQ ID NO: 9635
  modified_base 1..8787: mod_base = OTHER; note = Each t is m1f
  source 1..8787: mol_type = other RNA

SEQ ID NO: 11233 - RNA, 8787 nt, synthetic construct; identical to SEQ ID NO: 9636
  modified_base 1..8787: mod_base = OTHER; note = Each t is m1f
  source 1..8787: mol_type = other RNA

SEQ ID NO: 11234 - RNA, 8787 nt, synthetic construct; identical to SEQ ID NO: 9637
  modified_base 1..8787: mod_base = OTHER; note = Each t is m1f
  source 1..8787: mol_type = other RNA

SEQ ID NO: 11235 - RNA, 8787 nt, synthetic construct; identical to SEQ ID NO: 9638
  modified_base 1..8787: mod_base = OTHER; note = Each t is m1f
  source 1..8787: mol_type = other RNA

SEQ ID NO: 11236 - RNA, 8787 nt, synthetic construct; identical to SEQ ID NO: 9639
  modified_base 1..8787: mod_base = OTHER; note = Each t is m1f
  source 1..8787: mol_type = other RNA

SEQ ID NO: 11237 - RNA, 8787 nt, synthetic construct; identical to SEQ ID NO: 9640
  modified_base 1..8787: mod_base = OTHER; note = Each t is m1f
  source 1..8787: mol_type = other RNA

SEQ ID NO: 11238 - RNA, 8823 nt, synthetic construct; identical to SEQ ID NO: 9641
  modified_base 1..8823: mod_base = OTHER; note = Each t is m1f
  source 1..8823: mol_type = other RNA

SEQ ID NO: 11239 - RNA, 8787 nt, synthetic construct; identical to SEQ ID NO: 9642
  modified_base 1..8787: mod_base = OTHER; note = Each t is m1f
  source 1..8787: mol_type = other RNA

SEQ ID NO: 11240 - RNA, 8787 nt, synthetic construct; identical to SEQ ID NO: 9643
  modified_base 1..8787: mod_base = OTHER; note = Each t is m1f
  source 1..8787: mol_type = other RNA

SEQ ID NO: 11241 - RNA, 8787 nt, synthetic construct; identical to SEQ ID NO: 9644
  modified_base 1..8787: mod_base = OTHER; note = Each t is m1f
  source 1..8787: mol_type = other RNA

SEQ ID NO: 11242 - RNA, 8787 nt, synthetic construct; identical to SEQ ID NO: 9645
  modified_base 1..8787: mod_base = OTHER; note = Each t is m1f
  source 1..8787: mol_type = other RNA

SEQ ID NO: 11243 - RNA, 8787 nt, synthetic construct; identical to SEQ ID NO: 9646
  modified_base 1..8787: mod_base = OTHER; note = Each t is m1f
  source 1..8787: mol_type = other RNA

SEQ ID NO: 11244 - RNA, 8787 nt, synthetic construct; identical to SEQ ID NO: 9647
  modified_base 1..8787: mod_base = OTHER; note = Each t is m1f
  source 1..8787: mol_type = other RNA

SEQ ID NO: 11245 - RNA, 8787 nt, synthetic construct; identical to SEQ ID NO: 9648
  modified_base 1..8787: mod_base = OTHER; note = Each t is m1f
  source 1..8787: mol_type = other RNA

SEQ ID NO: 11246 - RNA, 8787 nt, synthetic construct; identical to SEQ ID NO: 9649
  modified_base 1..8787: mod_base = OTHER; note = Each t is m1f
  source 1..8787: mol_type = other RNA

SEQ ID NO: 11247 - RNA, 8787 nt, synthetic construct; identical to SEQ ID NO: 9650
  modified_base 1..8787: mod_base = OTHER; note = Each t is m1f
  source 1..8787: mol_type = other RNA

SEQ ID NO: 11248 - RNA, 8787 nt, synthetic construct; identical to SEQ ID NO: 9651
  modified_base 1..8787: mod_base = OTHER; note = Each t is m1f
  source 1..8787: mol_type = other RNA

SEQ ID NO: 11249 - RNA, 8787 nt, synthetic construct; identical to SEQ ID NO: 9652
  modified_base 1..8787: mod_base = OTHER; note = Each t is m1f
  source 1..8787: mol_type = other RNA

SEQ ID NO: 11250 - RNA, 8787 nt, synthetic construct; identical to SEQ ID NO: 9653
  modified_base 1..8787: mod_base = OTHER; note = Each t is m1f
  source 1..8787: mol_type = other RNA

SEQ ID NO: 11251 - RNA, 8787 nt, synthetic construct; identical to SEQ ID NO: 9654
  modified_base 1..8787: mod_base = OTHER; note = Each t is m1f
  source 1..8787: mol_type = other RNA

SEQ ID NO: 11252 - RNA, 8787 nt, synthetic construct; identical to SEQ ID NO: 9655
  modified_base 1..8787: mod_base = OTHER; note = Each t is m1f
  source 1..8787: mol_type = other RNA

SEQ ID NO: 11253 - RNA, 8787 nt, synthetic construct; identical to SEQ ID NO: 9656
  modified_base 1..8787: mod_base = OTHER; note = Each t is m1f
  source 1..8787: mol_type = other RNA

SEQ ID NO: 11254 - RNA, 8787 nt, synthetic construct; identical to SEQ ID NO: 9657
  modified_base 1..8787: mod_base = OTHER; note = Each t is m1f
  source 1..8787: mol_type = other RNA

SEQ ID NO: 11255 - RNA, 8787 nt, synthetic construct; identical to SEQ ID NO: 9658
  modified_base 1..8787: mod_base = OTHER; note = Each t is m1f
  source 1..8787: mol_type = other RNA

SEQ ID NO: 11256 - RNA, 8787 nt, synthetic construct; identical to SEQ ID NO: 9659
  modified_base 1..8787: mod_base = OTHER; note = Each t is m1f
  source 1..8787: mol_type = other RNA

SEQ ID NO: 11257 - RNA, 8787 nt, synthetic construct; identical to SEQ ID NO: 9660
  modified_base 1..8787: mod_base = OTHER; note = Each t is m1f
  source 1..8787: mol_type = other RNA

SEQ ID NO: 11258 - RNA, 8787 nt, synthetic construct; identical to SEQ ID NO: 9661
  modified_base 1..8787: mod_base = OTHER; note = Each t is m1f
  source 1..8787: mol_type = other RNA

SEQ ID NO: 11259 - RNA, 8787 nt, synthetic construct; identical to SEQ ID NO: 9662
  modified_base 1..8787: mod_base = OTHER; note = Each t is m1f
  source 1..8787: mol_type = other RNA

SEQ ID NO: 11260 - RNA, 8787 nt, synthetic construct; identical to SEQ ID NO: 9663
  modified_base 1..8787: mod_base = OTHER; note = Each t is m1f
  source 1..8787: mol_type = other RNA

SEQ ID NO: 11261 - RNA, 8787 nt, synthetic construct; identical to SEQ ID NO: 9664
  modified_base 1..8787: mod_base = OTHER; note = Each t is m1f
  source 1..8787: mol_type = other RNA

SEQ ID NO: 11262 - RNA, 8787 nt, synthetic construct; identical to SEQ ID NO: 9665
  modified_base 1..8787: mod_base = OTHER; note = Each t is m1f
  source 1..8787: mol_type = other RNA

SEQ ID NO: 11263 - RNA, 8787 nt, synthetic construct; identical to SEQ ID NO: 9666
  modified_base 1..8787: mod_base = OTHER; note = Each t is m1f
  source 1..8787: mol_type = other RNA

SEQ ID NO: 11264 - RNA, 8787 nt, synthetic construct; identical to SEQ ID NO: 9667
  modified_base 1..8787: mod_base = OTHER; note = Each t is m1f
  source 1..8787: mol_type = other RNA

SEQ ID NO: 11265 - RNA, 8787 nt, synthetic construct; identical to SEQ ID NO: 9668
  modified_base 1..8787: mod_base = OTHER; note = Each t is m1f
  source 1..8787: mol_type = other RNA

SEQ ID NO: 11266 - RNA, 8787 nt, synthetic construct; identical to SEQ ID NO: 9669
  modified_base 1..8787: mod_base = OTHER; note = Each t is m1f
  source 1..8787: mol_type = other RNA

SEQ ID NO: 11267 - RNA, 8787 nt, synthetic construct; identical to SEQ ID NO: 9670
  modified_base 1..8787: mod_base = OTHER; note = Each t is m1f
  source 1..8787: mol_type = other RNA

SEQ ID NO: 11268 - RNA, 8787 nt, synthetic construct; identical to SEQ ID NO: 9671
  modified_base 1..8787: mod_base = OTHER; note = Each t is m1f
  source 1..8787: mol_type = other RNA

SEQ ID NO: 11269 - RNA, 8787 nt, synthetic construct; identical to SEQ ID NO: 9672
  modified_base 1..8787: mod_base = OTHER; note = Each t is m1f
  source 1..8787: mol_type = other RNA

SEQ ID NO: 11270 - RNA, 8787 nt, synthetic construct; identical to SEQ ID NO: 9673
  modified_base 1..8787: mod_base = OTHER; note = Each t is m1f
  source 1..8787: mol_type = other RNA

SEQ ID NO: 11271 - RNA, 8787 nt, synthetic construct; identical to SEQ ID NO: 9674
  modified_base 1..8787: mod_base = OTHER; note = Each t is m1f
  source 1..8787: mol_type = other RNA

SEQ ID NO: 11272 - RNA, 8787 nt, synthetic construct; identical to SEQ ID NO: 9675
  modified_base 1..8787: mod_base = OTHER; note = Each t is m1f
  source 1..8787: mol_type = other RNA

SEQ ID NO: 11273 - RNA, 8787 nt, synthetic construct; identical to SEQ ID NO: 9676
  modified_base 1..8787: mod_base = OTHER; note = Each t is m1f
  source 1..8787: mol_type = other RNA

SEQ ID NO: 11274 - RNA, 8787 nt, synthetic construct; identical to SEQ ID NO: 9677
  modified_base 1..8787: mod_base = OTHER; note = Each t is m1f
  source 1..8787: mol_type = other RNA

SEQ ID NO: 11275 - RNA, 8787 nt, synthetic construct; identical to SEQ ID NO: 9678
  modified_base 1..8787: mod_base = OTHER; note = Each t is m1f
  source 1..8787: mol_type = other RNA

SEQ ID NO: 11276 - RNA, 8787 nt, synthetic construct; identical to SEQ ID NO: 9679
  modified_base 1..8787: mod_base = OTHER; note = Each t is m1f
  source 1..8787: mol_type = other RNA

SEQ ID NO: 11277 - RNA, 8787 nt, synthetic construct; identical to SEQ ID NO: 9680
  modified_base 1..8787: mod_base = OTHER; note = Each t is m1f
  source 1..8787: mol_type = other RNA

SEQ ID NO: 11278 - RNA, 8787 nt, synthetic construct; identical to SEQ ID NO: 9681
  modified_base 1..8787: mod_base = OTHER; note = Each t is m1f
  source 1..8787: mol_type = other RNA

SEQ ID NO: 11279 - RNA, 8787 nt, synthetic construct; identical to SEQ ID NO: 9682
  modified_base 1..8787: mod_base = OTHER; note = Each t is m1f
  source 1..8787: mol_type = other RNA

SEQ ID NO: 11280 - RNA, 8787 nt, synthetic construct; identical to SEQ ID NO: 9683
  modified_base 1..8787: mod_base = OTHER; note = Each t is m1f
  source 1..8787: mol_type = other RNA

SEQ ID NO: 11281 - RNA, 8787 nt, synthetic construct; identical to SEQ ID NO: 9684
  modified_base 1..8787: mod_base = OTHER; note = Each t is m1f
  source 1..8787: mol_type = other RNA

SEQ ID NO: 11282 - RNA, 8787 nt, synthetic construct; identical to SEQ ID NO: 9685
  modified_base 1..8787: mod_base = OTHER; note = Each t is m1f
  source 1..8787: mol_type = other RNA

SEQ ID NO: 11283 - RNA, 8787 nt, synthetic construct; identical to SEQ ID NO: 9686
  modified_base 1..8787: mod_base = OTHER; note = Each t is m1f
  source 1..8787: mol_type = other RNA

SEQ ID NO: 11284 - RNA, 8787 nt, synthetic construct; identical to SEQ ID NO: 9687
  modified_base 1..8787: mod_base = OTHER; note = Each t is m1f
  source 1..8787: mol_type = other RNA

SEQ ID NO: 11285 - RNA, 8787 nt, synthetic construct; identical to SEQ ID NO: 9688
  modified_base 1..8787: mod_base = OTHER; note = Each t is m1f
  source 1..8787: mol_type = other RNA

SEQ ID NO: 11286 - RNA, 8787 nt, synthetic construct; identical to SEQ ID NO: 9689
  modified_base 1..8787: mod_base = OTHER; note = Each t is m1f
  source 1..8787: mol_type = other RNA

SEQ ID NO: 11287 - RNA, 8787 nt, synthetic construct; identical to SEQ ID NO: 9690
  modified_base 1..8787: mod_base = OTHER; note = Each t is m1f
  source 1..8787: mol_type = other RNA

SEQ ID NO: 11288 - RNA, 8787 nt, synthetic construct; identical to SEQ ID NO: 9691
  modified_base 1..8787: mod_base = OTHER; note = Each t is m1f
  source 1..8787: mol_type = other RNA

SEQ ID NO: 11289 - RNA, 8787 nt, synthetic construct; identical to SEQ ID NO: 9692
  modified_base 1..8787: mod_base = OTHER; note = Each t is m1f
  source 1..8787: mol_type = other RNA

SEQ ID NO: 11290 - RNA, 8787 nt, synthetic construct; identical to SEQ ID NO: 9693
  modified_base 1..8787: mod_base = OTHER; note = Each t is m1f
  source 1..8787: mol_type = other RNA

SEQ ID NO: 11291 - RNA, 8787 nt, synthetic construct; identical to SEQ ID NO: 9694
  modified_base 1..8787: mod_base = OTHER; note = Each t is m1f
  source 1..8787: mol_type = other RNA

SEQ ID NO: 11292 - RNA, 8787 nt, synthetic construct; identical to SEQ ID NO: 9695
  modified_base 1..8787: mod_base = OTHER; note = Each t is m1f
  source 1..8787: mol_type = other RNA

SEQ ID NO: 11293 - RNA, 8787 nt, synthetic construct; identical to SEQ ID NO: 9696
  modified_base 1..8787: mod_base = OTHER; note = Each t is m1f
  source 1..8787: mol_type = other RNA

SEQ ID NO: 11294 - RNA, 8787 nt, synthetic construct; identical to SEQ ID NO: 9697
  modified_base 1..8787: mod_base = OTHER; note = Each t is m1f
  source 1..8787: mol_type = other RNA

SEQ ID NO: 11295 - RNA, 8787 nt, synthetic construct; identical to SEQ ID NO: 9698
  modified_base 1..8787: mod_base = OTHER; note = Each t is m1f
  source 1..8787: mol_type = other RNA

SEQ ID NO: 11296 - RNA, 8787 nt, synthetic construct; identical to SEQ ID NO: 9699
  modified_base 1..8787: mod_base = OTHER; note = Each t is m1f
  source 1..8787: mol_type = other RNA

SEQ ID NO: 11297 - RNA, 8787 nt, synthetic construct; identical to SEQ ID NO: 9700
  modified_base 1..8787: mod_base = OTHER; note = Each t is m1f
  source 1..8787: mol_type = other RNA

SEQ ID NO: 11298 - RNA, 8787 nt, synthetic construct; identical to SEQ ID NO: 9701
  modified_base 1..8787: mod_base = OTHER; note = Each t is m1f
  source 1..8787: mol_type = other RNA

SEQ ID NO: 11299 - RNA, 8784 nt, synthetic construct; identical to SEQ ID NO: 9702
  modified_base 1..8784: mod_base = OTHER; note = Each t is m1f
  source 1..8784: mol_type = other RNA

SEQ ID NO: 11300 - RNA, 8787 nt, synthetic construct; identical to SEQ ID NO: 9703
  modified_base 1..8787: mod_base = OTHER; note = Each t is m1f
  source 1..8787: mol_type = other RNA

SEQ ID NO: 11301 - RNA, 8787 nt, synthetic construct; identical to SEQ ID NO: 9704
  modified_base 1..8787: mod_base = OTHER; note = Each t is m1f
  source 1..8787: mol_type = other RNA

SEQ ID NO: 11302 - RNA, 8787 nt, synthetic construct; identical to SEQ ID NO: 9705
  modified_base 1..8787: mod_base = OTHER; note = Each t is m1f
  source 1..8787: mol_type = other RNA

SEQ ID NO: 11303 - RNA, 8784 nt, synthetic construct; identical to SEQ ID NO: 9706
  modified_base 1..8784: mod_base = OTHER; note = Each t is m1f
  source 1..8784: mol_type = other RNA

SEQ ID NO: 11304 - RNA, 8787 nt, synthetic construct; identical to SEQ ID NO: 9707
  modified_base 1..8787: mod_base = OTHER; note = Each t is m1f
  source 1..8787: mol_type = other RNA

SEQ ID NO: 11305 - RNA, 8787 nt, synthetic construct; identical to SEQ ID NO: 9708
  modified_base 1..8787: mod_base = OTHER; note = Each t is m1f
  source 1..8787: mol_type = other RNA

SEQ ID NO: 11306 - RNA, 8787 nt, synthetic construct; identical to SEQ ID NO: 9709
  modified_base 1..8787: mod_base = OTHER; note = Each t is m1f
  source 1..8787: mol_type = other RNA

SEQ ID NO: 11307 - RNA, 8787 nt, synthetic construct; identical to SEQ ID NO: 9710
  modified_base 1..8787: mod_base = OTHER; note = Each t is m1f
  source 1..8787: mol_type = other RNA

SEQ ID NO: 11308 - RNA, 8787 nt, synthetic construct; identical to SEQ ID NO: 9711
  modified_base 1..8787: mod_base = OTHER; note = Each t is m1f
  source 1..8787: mol_type = other RNA

SEQ ID NO: 11309 - RNA, 8787 nt, synthetic construct; identical to SEQ ID NO: 9712
  modified_base 1..8787: mod_base = OTHER; note = Each t is m1f
  source 1..8787: mol_type = other RNA

SEQ ID NO: 11310 - RNA, 8787 nt, synthetic construct; identical to SEQ ID NO: 9713
  modified_base 1..8787: mod_base = OTHER; note = Each t is m1f
  source 1..8787: mol_type = other RNA

SEQ ID NO: 11311 - RNA, 8787 nt, synthetic construct; identical to SEQ ID NO: 9714
  modified_base 1..8787: mod_base = OTHER; note = Each t is m1f
  source 1..8787: mol_type = other RNA

SEQ ID NO: 11312 - RNA, 8787 nt, synthetic construct; identical to SEQ ID NO: 9715
  modified_base 1..8787: mod_base = OTHER; note = Each t is m1f
  source 1..8787: mol_type = other RNA

SEQ ID NO: 11313 - RNA, 8787 nt, synthetic construct; identical to SEQ ID NO: 9716
  modified_base 1..8787: mod_base = OTHER; note = Each t is m1f
  source 1..8787: mol_type = other RNA

SEQ ID NO: 11314 - RNA, 8787 nt, synthetic construct; identical to SEQ ID NO: 9717
  modified_base 1..8787: mod_base = OTHER; note = Each t is m1f
  source 1..8787: mol_type = other RNA

SEQ ID NO: 11315 - RNA, 8787 nt, synthetic construct; identical to SEQ ID NO: 9718
  modified_base 1..8787: mod_base = OTHER; note = Each t is m1f
  source 1..8787: mol_type = other RNA

SEQ ID NO: 11316 - RNA, 8787 nt, synthetic construct; identical to SEQ ID NO: 9719
  modified_base 1..8787: mod_base = OTHER; note = Each t is m1f
  source 1..8787: mol_type = other RNA

SEQ ID NO: 11317 - RNA, 8787 nt, synthetic construct; identical to SEQ ID NO: 9720
  modified_base 1..8787: mod_base = OTHER; note = Each t is m1f
  source 1..8787: mol_type = other RNA

SEQ ID NO: 11318 - RNA, 8784 nt, synthetic construct; identical to SEQ ID NO: 9721
  modified_base 1..8784: mod_base = OTHER; note = Each t is m1f
  source 1..8784: mol_type = other RNA

SEQ ID NO: 11319 - RNA, 8787 nt, synthetic construct; identical to SEQ ID NO: 9722
  modified_base 1..8787: mod_base = OTHER; note = Each t is m1f
  source 1..8787: mol_type = other RNA

SEQ ID NO: 11320 - RNA, 8787 nt, synthetic construct; identical to SEQ ID NO: 9723
  modified_base 1..8787: mod_base = OTHER; note = Each t is m1f
  source 1..8787: mol_type = other RNA

SEQ ID NO: 11321 - RNA, 8787 nt, synthetic construct; identical to SEQ ID NO: 9724
  modified_base 1..8787: mod_base = OTHER; note = Each t is m1f
  source 1..8787: mol_type = other RNA

SEQ ID NO: 11322 - RNA, 8787 nt, synthetic construct; identical to SEQ ID NO: 9725
  modified_base 1..8787: mod_base = OTHER; note = Each t is m1f
  source 1..8787: mol_type = other RNA

SEQ ID NO: 11323 - RNA, 8787 nt, synthetic construct; identical to SEQ ID NO: 9726
  modified_base 1..8787: mod_base = OTHER; note = Each t is m1f
  source 1..8787: mol_type = other RNA

SEQ ID NO: 11324 - RNA, 8787 nt, synthetic construct; identical to SEQ ID NO: 9727
  modified_base 1..8787: mod_base = OTHER; note = Each t is m1f
  source 1..8787: mol_type = other RNA

SEQ ID NO: 11325 - RNA, 8787 nt, synthetic construct; identical to SEQ ID NO: 9728
  modified_base 1..8787: mod_base = OTHER; note = Each t is m1f
  source 1..8787: mol_type = other RNA

SEQ ID NO: 11326 - RNA, 8787 nt, synthetic construct; identical to SEQ ID NO: 9729
  modified_base 1..8787: mod_base = OTHER; note = Each t is m1f
  source 1..8787: mol_type = other RNA

SEQ ID NO: 11327 - RNA, 8787 nt, synthetic construct; identical to SEQ ID NO: 9730
  modified_base 1..8787: mod_base = OTHER; note = Each t is m1f
  source 1..8787: mol_type = other RNA

SEQ ID NO: 11328 - RNA, 8787 nt, synthetic construct; identical to SEQ ID NO: 9731
  modified_base 1..8787: mod_base = OTHER; note = Each t is m1f
  source 1..8787: mol_type = other RNA

SEQ ID NO: 11329 - RNA, 8787 nt, synthetic construct; identical to SEQ ID NO: 9732
  modified_base 1..8787: mod_base = OTHER; note = Each t is m1f
  source 1..8787: mol_type = other RNA

SEQ ID NO: 11330 - RNA, 8787 nt, synthetic construct; identical to SEQ ID NO: 9733
  modified_base 1..8787: mod_base = OTHER; note = Each t is m1f
  source 1..8787: mol_type = other RNA

SEQ ID NO: 11331 - RNA, 8787 nt, synthetic construct; identical to SEQ ID NO: 9734
  modified_base 1..8787: mod_base = OTHER; note = Each t is m1f
  source 1..8787: mol_type = other RNA

SEQ ID NO: 11332 - RNA, 8787 nt, synthetic construct; identical to SEQ ID NO: 9735
  modified_base 1..8787: mod_base = OTHER; note = Each t is m1f
  source 1..8787: mol_type = other RNA

SEQ ID NO: 11333 - RNA, 8787 nt, synthetic construct; identical to SEQ ID NO: 9736
  modified_base 1..8787: mod_base = OTHER; note = Each t is m1f
  source 1..8787: mol_type = other RNA

SEQ ID NO: 11334 - RNA, 8793 nt, synthetic construct; identical to SEQ ID NO: 9737
  modified_base 1..8793: mod_base = OTHER; note = Each t is m1f
  source 1..8793: mol_type = other RNA

SEQ ID NO: 11335 - RNA, 8787 nt, synthetic construct; identical to SEQ ID NO: 9738
  modified_base 1..8787: mod_base = OTHER; note = Each t is m1f
  source 1..8787: mol_type = other RNA

SEQ ID NO: 11336 - RNA, 8787 nt, synthetic construct; identical to SEQ ID NO: 9739
  modified_base 1..8787: mod_base = OTHER; note = Each t is m1f
  source 1..8787: mol_type = other RNA

SEQ ID NO: 11337 - RNA, 8787 nt, synthetic construct; identical to SEQ ID NO: 9740
  modified_base 1..8787: mod_base = OTHER; note = Each t is m1f
  source 1..8787: mol_type = other RNA

SEQ ID NO: 11338 - RNA, 8787 nt, synthetic construct; identical to SEQ ID NO: 9741
  modified_base 1..8787: mod_base = OTHER; note = Each t is m1f
  source 1..8787: mol_type = other RNA

SEQ ID NO: 11339 - RNA, 8787 nt, synthetic construct; identical to SEQ ID NO: 9742
  modified_base 1..8787: mod_base = OTHER; note = Each t is m1f
  source 1..8787: mol_type = other RNA

SEQ ID NO: 11340 - RNA, 8787 nt, synthetic construct; identical to SEQ ID NO: 9743
  modified_base 1..8787: mod_base = OTHER; note = Each t is m1f
  source 1..8787: mol_type = other RNA

SEQ ID NO: 11341 - RNA, 8787 nt, synthetic construct; identical to SEQ ID NO: 9744
  modified_base 1..8787: mod_base = OTHER; note = Each t is m1f
  source 1..8787: mol_type = other RNA

SEQ ID NO: 11342 - RNA, 8787 nt, synthetic construct; identical to SEQ ID NO: 9745
  modified_base 1..8787: mod_base = OTHER; note = Each t is m1f
  source 1..8787: mol_type = other RNA

SEQ ID NO: 11343 - RNA, 8787 nt, synthetic construct; identical to SEQ ID NO: 9746
  modified_base 1..8787: mod_base = OTHER; note = Each t is m1f
  source 1..8787: mol_type = other RNA

SEQ ID NO: 11344 - RNA, 8787 nt, synthetic construct; identical to SEQ ID NO: 9747
  modified_base 1..8787: mod_base = OTHER; note = Each t is m1f
  source 1..8787: mol_type = other RNA

SEQ ID NO: 11345 - RNA, 8787 nt, synthetic construct; identical to SEQ ID NO: 9748
  modified_base 1..8787: mod_base = OTHER; note = Each t is m1f
  source 1..8787: mol_type = other RNA

SEQ ID NO: 11346 - RNA, 8787 nt, synthetic construct; identical to SEQ ID NO: 9749
  modified_base 1..8787: mod_base = OTHER; note = Each t is m1f
  source 1..8787: mol_type = other RNA

SEQ ID NO: 11347 - RNA, 8787 nt, synthetic construct; identical to SEQ ID NO: 9750
  modified_base 1..8787: mod_base = OTHER; note = Each t is m1f
  source 1..8787: mol_type = other RNA

SEQ ID NO: 11348 - RNA, 8787 nt, synthetic construct; identical to SEQ ID NO: 9751
  modified_base 1..8787: mod_base = OTHER; note = Each t is m1f
  source 1..8787: mol_type = other RNA

SEQ ID NO: 11349 - RNA, 8787 nt, synthetic construct; identical to SEQ ID NO: 9752
  modified_base 1..8787: mod_base = OTHER; note = Each t is m1f
  source 1..8787: mol_type = other RNA

SEQ ID NO: 11350 - RNA, 8787 nt, synthetic construct; identical to SEQ ID NO: 9753
  modified_base 1..8787: mod_base = OTHER; note = Each t is m1f
  source 1..8787: mol_type = other RNA

SEQ ID NO: 11351 - RNA, 8787 nt, synthetic construct; identical to SEQ ID NO: 9754
  modified_base 1..8787: mod_base = OTHER; note = Each t is m1f
  source 1..8787: mol_type = other RNA

SEQ ID NO: 11352 - RNA, 8787 nt, synthetic construct; identical to SEQ ID NO: 9755
  modified_base 1..8787: mod_base = OTHER; note = Each t is m1f
  source 1..8787: mol_type = other RNA

SEQ ID NO: 11353 - RNA, 8787 nt, synthetic construct; identical to SEQ ID NO: 9756
  modified_base 1..8787: mod_base = OTHER; note = Each t is m1f
  source 1..8787: mol_type = other RNA

SEQ ID NO: 11354 - RNA, 8787 nt, synthetic construct; identical to SEQ ID NO: 9757
  modified_base 1..8787: mod_base = OTHER; note = Each t is m1f
  source 1..8787: mol_type = other RNA

SEQ ID NO: 11355 - RNA, 8787 nt, synthetic construct; identical to SEQ ID NO: 9758
  modified_base 1..8787: mod_base = OTHER; note = Each t is m1f
  source 1..8787: mol_type = other RNA

SEQ ID NO: 11356 - RNA, 8787 nt, synthetic construct; identical to SEQ ID NO: 9759
  modified_base 1..8787: mod_base = OTHER; note = Each t is m1f
  source 1..8787: mol_type = other RNA

SEQ ID NO: 11357 - RNA, 8787 nt, synthetic construct; identical to SEQ ID NO: 9760
  modified_base 1..8787: mod_base = OTHER; note = Each t is m1f
  source 1..8787: mol_type = other RNA

SEQ ID NO: 11358 - RNA, 8787 nt, synthetic construct; identical to SEQ ID NO: 9761
  modified_base 1..8787: mod_base = OTHER; note = Each t is m1f
  source 1..8787: mol_type = other RNA

SEQ ID NO: 11359 - RNA, 8787 nt, synthetic construct; identical to SEQ ID NO: 9762
  modified_base 1..8787: mod_base = OTHER; note = Each t is m1f
  source 1..8787: mol_type = other RNA

SEQ ID NO: 11360 - RNA, 8787 nt, synthetic construct; identical to SEQ ID NO: 9763
  modified_base 1..8787: mod_base = OTHER; note = Each t is m1f
  source 1..8787: mol_type = other RNA

SEQ ID NO: 11361 - RNA, 8787 nt, synthetic construct; identical to SEQ ID NO: 9764
  modified_base 1..8787: mod_base = OTHER; note = Each t is m1f
  source 1..8787: mol_type = other RNA

SEQ ID NO: 11362 - RNA, 8787 nt, synthetic construct; identical to SEQ ID NO: 9765
  modified_base 1..8787: mod_base = OTHER; note = Each t is m1f
  source 1..8787: mol_type = other RNA

SEQ ID NO: 11363 - RNA, 8787 nt, synthetic construct; identical to SEQ ID NO: 9766
  modified_base 1..8787: mod_base = OTHER; note = Each t is m1f
  source 1..8787: mol_type = other RNA

SEQ ID NO: 11364 - RNA, 8787 nt, synthetic construct; identical to SEQ ID NO: 9767
  modified_base 1..8787: mod_base = OTHER; note = Each t is m1f
  source 1..8787: mol_type = other RNA

SEQ ID NO: 11365 - RNA, 8787 nt, synthetic construct; identical to SEQ ID NO: 9768
  modified_base 1..8787: mod_base = OTHER; note = Each t is m1f
  source 1..8787: mol_type = other RNA

SEQ ID NO: 11366 - RNA, 8787 nt, synthetic construct; identical to SEQ ID NO: 9769
  modified_base 1..8787: mod_base = OTHER; note = Each t is m1f
  source 1..8787: mol_type = other RNA

SEQ ID NO: 11367 - RNA, 8787 nt, synthetic construct; identical to SEQ ID NO: 9770
  modified_base 1..8787: mod_base = OTHER; note = Each t is m1f
  source 1..8787: mol_type = other RNA

SEQ ID NO: 11368 - RNA, 8787 nt, synthetic construct; identical to SEQ ID NO: 9771
  modified_base 1..8787: mod_base = OTHER; note = Each t is m1f
  source 1..8787: mol_type = other RNA

SEQ ID NO: 11369 - RNA, 8787 nt, synthetic construct; identical to SEQ ID NO: 9772
  modified_base 1..8787: mod_base = OTHER; note = Each t is m1f
  source 1..8787: mol_type = other RNA

SEQ ID NO: 11370 - RNA, 8787 nt, synthetic construct; identical to SEQ ID NO: 9773
  modified_base 1..8787: mod_base = OTHER; note = Each t is m1f
  source 1..8787: mol_type = other RNA

SEQ ID NO: 11371 - RNA, 8787 nt, synthetic construct; identical to SEQ ID NO: 9774
  modified_base 1..8787: mod_base = OTHER; note = Each t is m1f
  source 1..8787: mol_type = other RNA

SEQ ID NO: 11372 - RNA, 8787 nt, synthetic construct; identical to SEQ ID NO: 9775
  modified_base 1..8787: mod_base = OTHER; note = Each t is m1f
  source 1..8787: mol_type = other RNA

SEQ ID NO: 11373 - RNA, 8787 nt, synthetic construct; identical to SEQ ID NO: 9776
  modified_base 1..8787: mod_base = OTHER; note = Each t is m1f
  source 1..8787: mol_type = other RNA

SEQ ID NO: 11374 - RNA, 8787 nt, synthetic construct; identical to SEQ ID NO: 9777
  modified_base 1..8787: mod_base = OTHER; note = Each t is m1f
  source 1..8787: mol_type = other RNA

SEQ ID NO: 11375 - RNA, 8787 nt, synthetic construct; identical to SEQ ID NO: 9778
  modified_base 1..8787: mod_base = OTHER; note = Each t is m1f
  source 1..8787: mol_type = other RNA

SEQ ID NO: 11376 - RNA, 8787 nt, synthetic construct; identical to SEQ ID NO: 9779
  modified_base 1..8787: mod_base = OTHER; note = Each t is m1f
  source 1..8787: mol_type = other RNA

SEQ ID NO: 11377 - RNA, 8787 nt, synthetic construct; identical to SEQ ID NO: 9780
  modified_base 1..8787: mod_base = OTHER; note = Each t is m1f
  source 1..8787: mol_type = other RNA

SEQ ID NO: 11378 - RNA, 8787 nt, synthetic construct; identical to SEQ ID NO: 9781
  modified_base 1..8787: mod_base = OTHER; note = Each t is m1f
  source 1..8787: mol_type = other RNA

SEQ ID NO: 11379 - RNA, 8787 nt, synthetic construct; identical to SEQ ID NO: 9782
  modified_base 1..8787: mod_base = OTHER; note = Each t is m1f
  source 1..8787: mol_type = other RNA

SEQ ID NO: 11380 - RNA, 8787 nt, synthetic construct; identical to SEQ ID NO: 9783
  modified_base 1..8787: mod_base = OTHER; note = Each t is m1f
  source 1..8787: mol_type = other RNA

SEQ ID NO: 11381 - RNA, 8787 nt, synthetic construct; identical to SEQ ID NO: 9784
  modified_base 1..8787: mod_base = OTHER; note = Each t is m1f
  source 1..8787: mol_type = other RNA

SEQ ID NO: 11382 - RNA, 8820 nt, synthetic construct; identical to SEQ ID NO: 9785
  modified_base 1..8820: mod_base = OTHER; note = Each t is m1f
  source 1..8820: mol_type = other RNA

SEQ ID NO: 11383 - RNA, 8787 nt, synthetic construct; identical to SEQ ID NO: 9786
  modified_base 1..8787: mod_base = OTHER; note = Each t is m1f
  source 1..8787: mol_type = other RNA

SEQ ID NO: 11384 - RNA, 8787 nt, synthetic construct; identical to SEQ ID NO: 9787
  modified_base 1..8787: mod_base = OTHER; note = Each t is m1f
  source 1..8787: mol_type = other RNA

SEQ ID NO: 11385 - RNA, 8787 nt, synthetic construct; identical to SEQ ID NO: 9788
  modified_base 1..8787: mod_base = OTHER; note = Each t is m1f
  source 1..8787: mol_type = other RNA

SEQ ID NO: 11386 - RNA, 8787 nt, synthetic construct; identical to SEQ ID NO: 9789
  modified_base 1..8787: mod_base = OTHER; note = Each t is m1f
  source 1..8787: mol_type = other RNA

SEQ ID NO: 11387 - RNA, 8787 nt, synthetic construct; identical to SEQ ID NO: 9790
  modified_base 1..8787: mod_base = OTHER; note = Each t is m1f
  source 1..8787: mol_type = other RNA

SEQ ID NO: 11388 - RNA, 8787 nt, synthetic construct; identical to SEQ ID NO: 9791
  modified_base 1..8787: mod_base = OTHER; note = Each t is m1f
  source 1..8787: mol_type = other RNA

SEQ ID NO: 11389 - RNA, 8787 nt, synthetic construct; identical to SEQ ID NO: 9792
  modified_base 1..8787: mod_base = OTHER; note = Each t is m1f
  source 1..8787: mol_type = other RNA

SEQ ID NO: 11390 - RNA, 8787 nt, synthetic construct; identical to SEQ ID NO: 9793
  modified_base 1..8787: mod_base = OTHER; note = Each t is m1f
  source 1..8787: mol_type = other RNA

SEQ ID NO: 11391 - RNA, 8787 nt, synthetic construct; identical to SEQ ID NO: 9794
  modified_base 1..8787: mod_base = OTHER; note = Each t is m1f
  source 1..8787: mol_type = other RNA

SEQ ID NO: 11392 - RNA, 8787 nt, synthetic construct; identical to SEQ ID NO: 9795
  modified_base 1..8787: mod_base = OTHER; note = Each t is m1f
  source 1..8787: mol_type = other RNA

SEQ ID NO: 11393 - RNA, 8787 nt, synthetic construct; identical to SEQ ID NO: 9796
  modified_base 1..8787: mod_base = OTHER; note = Each t is m1f
  source 1..8787: mol_type = other RNA

SEQ ID NO: 11394 - RNA, 8787 nt, synthetic construct; identical to SEQ ID NO: 9797
  modified_base 1..8787: mod_base = OTHER; note = Each t is m1f
  source 1..8787: mol_type = other RNA

SEQ ID NO: 11395 - RNA, 8787 nt, synthetic construct; identical to SEQ ID NO: 9798
  modified_base 1..8787: mod_base = OTHER; note = Each t is m1f
  source 1..8787: mol_type = other RNA

SEQ ID NO: 11396 - RNA, 8787 nt, synthetic construct; identical to SEQ ID NO: 9799
  modified_base 1..8787: mod_base = OTHER; note = Each t is m1f
  source 1..8787: mol_type = other RNA

SEQ ID NO: 11397 - RNA, 8787 nt, synthetic construct; identical to SEQ ID NO: 9800
  modified_base 1..8787: mod_base = OTHER; note = Each t is m1f
  source 1..8787: mol_type = other RNA

SEQ ID NO: 11398 - RNA, 8787 nt, synthetic construct; identical to SEQ ID NO: 9801
  modified_base 1..8787: mod_base = OTHER; note = Each t is m1f
  source 1..8787: mol_type = other RNA

SEQ ID NO: 11399 - RNA, 8787 nt, synthetic construct; identical to SEQ ID NO: 9802
  modified_base 1..8787: mod_base = OTHER; note = Each t is m1f
  source 1..8787: mol_type = other RNA

SEQ ID NO: 11400 - RNA, 8787 nt, synthetic construct; identical to SEQ ID NO: 9803
  modified_base 1..8787: mod_base = OTHER; note = Each t is m1f
  source 1..8787: mol_type = other RNA

SEQ ID NO: 11401 - RNA, 8796 nt, synthetic construct; identical to SEQ ID NO: 9804
  modified_base 1..8796: mod_base = OTHER; note = Each t is m1f
  source 1..8796: mol_type = other RNA

SEQ ID NO: 11402 - RNA, 8787 nt, synthetic construct; identical to SEQ ID NO: 9805
  modified_base 1..8787: mod_base = OTHER; note = Each t is m1f
  source 1..8787: mol_type = other RNA

SEQ ID NO: 11403 - RNA, 8787 nt, synthetic construct; identical to SEQ ID NO: 9806
  modified_base 1..8787: mod_base = OTHER; note = Each t is m1f
  source 1..8787: mol_type = other RNA

SEQ ID NO: 11404 - RNA, 8787 nt, synthetic construct; identical to SEQ ID NO: 9807
  modified_base 1..8787: mod_base = OTHER; note = Each t is m1f
  source 1..8787: mol_type = other RNA

SEQ ID NO: 11405 - RNA, 8787 nt, synthetic construct; identical to SEQ ID NO: 9808
  modified_base 1..8787: mod_base = OTHER; note = Each t is m1f
  source 1..8787: mol_type = other RNA

SEQ ID NO: 11406 - RNA, 8787 nt, synthetic construct; identical to SEQ ID NO: 9809
  modified_base 1..8787: mod_base = OTHER; note = Each t is m1f
  source 1..8787: mol_type = other RNA

SEQ ID NO: 11407 - RNA, 8787 nt, synthetic construct; identical to SEQ ID NO: 9810
  modified_base 1..8787: mod_base = OTHER; note = Each t is m1f
  source 1..8787: mol_type = other RNA

SEQ ID NO: 11408 - RNA, 8787 nt, synthetic construct; identical to SEQ ID NO: 9811
  modified_base 1..8787: mod_base = OTHER; note = Each t is m1f
  source 1..8787: mol_type = other RNA

SEQ ID NO: 11409 - RNA, 8787 nt, synthetic construct; identical to SEQ ID NO: 9812
  modified_base 1..8787: mod_base = OTHER; note = Each t is m1f
  source 1..8787: mol_type = other RNA

SEQ ID NO: 11410 - RNA, 8787 nt, synthetic construct; identical to SEQ ID NO: 9813
  modified_base 1..8787: mod_base = OTHER; note = Each t is m1f
  source 1..8787: mol_type = other RNA

SEQ ID NO: 11411 - RNA, 8787 nt, synthetic construct; identical to SEQ ID NO: 9814
  modified_base 1..8787: mod_base = OTHER; note = Each t is m1f
  source 1..8787: mol_type = other RNA

SEQ ID NO: 11412 - RNA, 8787 nt, synthetic construct; identical to SEQ ID NO: 9815
  modified_base 1..8787: mod_base = OTHER; note = Each t is m1f
  source 1..8787: mol_type = other RNA

SEQ ID NO: 11413 - RNA, 8787 nt, synthetic construct; identical to SEQ ID NO: 9816
  modified_base 1..8787: mod_base = OTHER; note = Each t is m1f
  source 1..8787: mol_type = other RNA

SEQ ID NO: 11414 - RNA, 8787 nt, synthetic construct; identical to SEQ ID NO: 9817
  modified_base 1..8787: mod_base = OTHER; note = Each t is m1f
  source 1..8787: mol_type = other RNA

SEQ ID NO: 11415 - RNA, 8787 nt, synthetic construct; identical to SEQ ID NO: 9818
  modified_base 1..8787: mod_base = OTHER; note = Each t is m1f
  source 1..8787: mol_type = other RNA

SEQ ID NO: 11416 - RNA, 8784 nt, synthetic construct; identical to SEQ ID NO: 9819
  modified_base 1..8784: mod_base = OTHER; note = Each t is m1f
  source 1..8784: mol_type = other RNA

SEQ ID NO: 11417 - RNA, 8787 nt, synthetic construct; identical to SEQ ID NO: 9820
  modified_base 1..8787: mod_base = OTHER; note = Each t is m1f
  source 1..8787: mol_type = other RNA

SEQ ID NO: 11418 - RNA, 8787 nt, synthetic construct; identical to SEQ ID NO: 9821
  modified_base 1..8787: mod_base = OTHER; note = Each t is m1f
  source 1..8787: mol_type = other RNA

SEQ ID NO: 11419 - RNA, 8787 nt, synthetic construct; identical to SEQ ID NO: 9822
  modified_base 1..8787: mod_base = OTHER; note = Each t is m1f
  source 1..8787: mol_type = other RNA

SEQ ID NO: 11420 - RNA, 8787 nt, synthetic construct; identical to SEQ ID NO: 9823
  modified_base 1..8787: mod_base = OTHER; note = Each t is m1f
  source 1..8787: mol_type = other RNA

SEQ ID NO: 11421 - RNA, 8787 nt, synthetic construct; identical to SEQ ID NO: 9824
  modified_base 1..8787: mod_base = OTHER; note = Each t is m1f
  source 1..8787: mol_type = other RNA

SEQ ID NO: 11422 - RNA, 8787 nt, synthetic construct; identical to SEQ ID NO: 9825
  modified_base 1..8787: mod_base = OTHER; note = Each t is m1f
  source 1..8787: mol_type = other RNA

SEQ ID NO: 11423 - RNA, 8787 nt, synthetic construct; identical to SEQ ID NO: 9826
  modified_base 1..8787: mod_base = OTHER; note = Each t is m1f
  source 1..8787: mol_type = other RNA

SEQ ID NO: 11424 - RNA, 8787 nt, synthetic construct; identical to SEQ ID NO: 9827
  modified_base 1..8787: mod_base = OTHER; note = Each t is m1f
  source 1..8787: mol_type = other RNA

SEQ ID NO: 11425 - RNA, 8787 nt, synthetic construct; identical to SEQ ID NO: 9828
  modified_base 1..8787: mod_base = OTHER; note = Each t is m1f
  source 1..8787: mol_type = other RNA

SEQ ID NO: 11426 - RNA, 8787 nt, synthetic construct; identical to SEQ ID NO: 9829
  modified_base 1..8787: mod_base = OTHER; note = Each t is m1f
  source 1..8787: mol_type = other RNA

SEQ ID NO: 11427 - RNA, 8787 nt, synthetic construct; identical to SEQ ID NO: 9830
  modified_base 1..8787: mod_base = OTHER; note = Each t is m1f
  source 1..8787: mol_type = other RNA

SEQ ID NO: 11428 - RNA, 8787 nt, synthetic construct; identical to SEQ ID NO: 9831
  modified_base 1..8787: mod_base = OTHER; note = Each t is m1f
  source 1..8787: mol_type = other RNA

SEQ ID NO: 11429 - RNA, 8823 nt, synthetic construct; identical to SEQ ID NO: 9832
  modified_base 1..8823: mod_base = OTHER; note = Each t is m1f
  source 1..8823: mol_type = other RNA

SEQ ID NO: 11430 - RNA, 8787 nt, synthetic construct; identical to SEQ ID NO: 9833
  modified_base 1..8787: mod_base = OTHER; note = Each t is m1f
  source 1..8787: mol_type = other RNA

SEQ ID NO: 11431 - RNA, 8787 nt, synthetic construct; identical to SEQ ID NO: 9834
  modified_base 1..8787: mod_base = OTHER; note = Each t is m1f
  source 1..8787: mol_type = other RNA

SEQ ID NO: 11432 - RNA, 8787 nt, synthetic construct; identical to SEQ ID NO: 9835
  modified_base 1..8787: mod_base = OTHER; note = Each t is m1f
  source 1..8787: mol_type = other RNA

SEQ ID NO: 11433 - RNA, 8787 nt, synthetic construct; identical to SEQ ID NO: 9836
  modified_base 1..8787: mod_base = OTHER; note = Each t is m1f
  source 1..8787: mol_type = other RNA

SEQ ID NO: 11434 - RNA, 8787 nt, synthetic construct; identical to SEQ ID NO: 9837
  modified_base 1..8787: mod_base = OTHER; note = Each t is m1f
  source 1..8787: mol_type = other RNA

SEQ ID NO: 11435 - RNA, 8787 nt, synthetic construct; identical to SEQ ID NO: 9838
  modified_base 1..8787: mod_base = OTHER; note = Each t is m1f
  source 1..8787: mol_type = other RNA

SEQ ID NO: 11436 - RNA, 8787 nt, synthetic construct; identical to SEQ ID NO: 9839
  modified_base 1..8787: mod_base = OTHER; note = Each t is m1f
  source 1..8787: mol_type = other RNA

SEQ ID NO: 11437 - RNA, 8787 nt, synthetic construct; identical to SEQ ID NO: 9840
  modified_base 1..8787: mod_base = OTHER; note = Each t is m1f
  source 1..8787: mol_type = other RNA

SEQ ID NO: 11438 - RNA, 8787 nt, synthetic construct; identical to SEQ ID NO: 9841
  modified_base 1..8787: mod_base = OTHER; note = Each t is m1f
  source 1..8787: mol_type = other RNA

SEQ ID NO: 11439 - RNA, 8787 nt, synthetic construct; identical to SEQ ID NO: 9842
  modified_base 1..8787: mod_base = OTHER; note = Each t is m1f
  source 1..8787: mol_type = other RNA

SEQ ID NO: 11440 - RNA, 8787 nt, synthetic construct; identical to SEQ ID NO: 9843
  modified_base 1..8787: mod_base = OTHER; note = Each t is m1f
  source 1..8787: mol_type = other RNA

SEQ ID NO: 11441 - RNA, 8787 nt, synthetic construct; identical to SEQ ID NO: 9844
  modified_base 1..8787: mod_base = OTHER; note = Each t is m1f
  source 1..8787: mol_type = other RNA

SEQ ID NO: 11442 - RNA, 8787 nt, synthetic construct; identical to SEQ ID NO: 9845
  modified_base 1..8787: mod_base = OTHER; note = Each t is m1f
  source 1..8787: mol_type = other RNA

SEQ ID NO: 11443 - RNA, 8787 nt, synthetic construct; identical to SEQ ID NO: 9846
  modified_base 1..8787: mod_base = OTHER; note = Each t is m1f
  source 1..8787: mol_type = other RNA

SEQ ID NO: 11444 - RNA, 8787 nt, synthetic construct; identical to SEQ ID NO: 9847
  modified_base 1..8787: mod_base = OTHER; note = Each t is m1f
  source 1..8787: mol_type = other RNA

SEQ ID NO: 11445 - RNA, 8787 nt, synthetic construct; identical to SEQ ID NO: 9848
  modified_base 1..8787: mod_base = OTHER; note = Each t is m1f
  source 1..8787: mol_type = other RNA

SEQ ID NO: 11446 - RNA, 8787 nt, synthetic construct; identical to SEQ ID NO: 9849
  modified_base 1..8787: mod_base = OTHER; note = Each t is m1f
  source 1..8787: mol_type = other RNA

SEQ ID NO: 11447 - RNA, 8787 nt, synthetic construct; identical to SEQ ID NO: 9850
  modified_base 1..8787: mod_base = OTHER; note = Each t is m1f
  source 1..8787: mol_type = other RNA

SEQ ID NO: 11448 - RNA, 8787 nt, synthetic construct; identical to SEQ ID NO: 9851
  modified_base 1..8787: mod_base = OTHER; note = Each t is m1f
  source 1..8787: mol_type = other RNA

SEQ ID NO: 11449 - RNA, 8787 nt, synthetic construct; identical to SEQ ID NO: 9852
  modified_base 1..8787: mod_base = OTHER; note = Each t is m1f
  source 1..8787: mol_type = other RNA

SEQ ID NO: 11450 - RNA, 8787 nt, synthetic construct; identical to SEQ ID NO: 9853
  modified_base 1..8787: mod_base = OTHER; note = Each t is m1f
  source 1..8787: mol_type = other RNA

SEQ ID NO: 11451 - RNA, 8787 nt, synthetic construct; identical to SEQ ID NO: 9854
  modified_base 1..8787: mod_base = OTHER; note = Each t is m1f
  source 1..8787: mol_type = other RNA

SEQ ID NO: 11452 - RNA, 8787 nt, synthetic construct; identical to SEQ ID NO: 9855
  modified_base 1..8787: mod_base = OTHER; note = Each t is m1f
  source 1..8787: mol_type = other RNA

SEQ ID NO: 11453 - RNA, 8787 nt, synthetic construct; identical to SEQ ID NO: 9856
  modified_base 1..8787: mod_base = OTHER; note = Each t is m1f
  source 1..8787: mol_type = other RNA

SEQ ID NO: 11454 - RNA, 8787 nt, synthetic construct; identical to SEQ ID NO: 9857
  modified_base 1..8787: mod_base = OTHER; note = Each t is m1f
  source 1..8787: mol_type = other RNA

SEQ ID NO: 11455 - RNA, 8787 nt, synthetic construct; identical to SEQ ID NO: 9858
  modified_base 1..8787: mod_base = OTHER; note = Each t is m1f
  source 1..8787: mol_type = other RNA

SEQ ID NO: 11456 - RNA, 8787 nt, synthetic construct; identical to SEQ ID NO: 9859
  modified_base 1..8787: mod_base = OTHER; note = Each t is m1f
  source 1..8787: mol_type = other RNA

SEQ ID NO: 11457 - RNA, 8787 nt, synthetic construct; identical to SEQ ID NO: 9860
  modified_base 1..8787: mod_base = OTHER; note = Each t is m1f
  source 1..8787: mol_type = other RNA

SEQ ID NO: 11458 - RNA, 8787 nt, synthetic construct; identical to SEQ ID NO: 9861
  modified_base 1..8787: mod_base = OTHER; note = Each t is m1f
  source 1..8787: mol_type = other RNA

SEQ ID NO: 11459 - RNA, 8787 nt, synthetic construct; identical to SEQ ID NO: 9862
  modified_base 1..8787: mod_base = OTHER; note = Each t is m1f
  source 1..8787: mol_type = other RNA

SEQ ID NO: 11460 - RNA, 8787 nt, synthetic construct; identical to SEQ ID NO: 9863
  modified_base 1..8787: mod_base = OTHER; note = Each t is m1f
  source 1..8787: mol_type = other RNA

SEQ ID NO: 11461 - RNA, 8787 nt, synthetic construct; identical to SEQ ID NO: 9864
  modified_base 1..8787: mod_base = OTHER; note = Each t is m1f
  source 1..8787: mol_type = other RNA

SEQ ID NO: 11462 - RNA, 8787 nt, synthetic construct; identical to SEQ ID NO: 9865
  modified_base 1..8787: mod_base = OTHER; note = Each t is m1f
  source 1..8787: mol_type = other RNA

SEQ ID NO: 11463 - RNA, 8787 nt, synthetic construct; identical to SEQ ID NO: 9866
  modified_base 1..8787: mod_base = OTHER; note = Each t is m1f
  source 1..8787: mol_type = other RNA

SEQ ID NO: 11464 - RNA, 8787 nt, synthetic construct; identical to SEQ ID NO: 9867
  modified_base 1..8787: mod_base = OTHER; note = Each t is m1f
  source 1..8787: mol_type = other RNA

SEQ ID NO: 11465 - RNA, 8787 nt, synthetic construct; identical to SEQ ID NO: 9868
  modified_base 1..8787: mod_base = OTHER; note = Each t is m1f
  source 1..8787: mol_type = other RNA

SEQ ID NO: 11466 - RNA, 8787 nt, synthetic construct; identical to SEQ ID NO: 9869
  modified_base 1..8787: mod_base = OTHER; note = Each t is m1f
  source 1..8787: mol_type = other RNA

SEQ ID NO: 11467 - RNA, 8787 nt, synthetic construct; identical to SEQ ID NO: 9870
  modified_base 1..8787: mod_base = OTHER; note = Each t is m1f
  source 1..8787: mol_type = other RNA

SEQ ID NO: 11468 - RNA, 8787 nt, synthetic construct; identical to SEQ ID NO: 9871
  modified_base 1..8787: mod_base = OTHER; note = Each t is m1f
  source 1..8787: mol_type = other RNA

SEQ ID NO: 11469 - RNA, 8787 nt, synthetic construct; identical to SEQ ID NO: 9872
  modified_base 1..8787: mod_base = OTHER; note = Each t is m1f
  source 1..8787: mol_type = other RNA

SEQ ID NO: 11470 - RNA, 8787 nt, synthetic construct; identical to SEQ ID NO: 9873
  modified_base 1..8787: mod_base = OTHER; note = Each t is m1f
  source 1..8787: mol_type = other RNA

SEQ ID NO: 11471 - RNA, 8787 nt, synthetic construct; identical to SEQ ID NO: 9874
  modified_base 1..8787: mod_base = OTHER; note = Each t is m1f
  source 1..8787: mol_type = other RNA

SEQ ID NO: 11472 - RNA, 8787 nt, synthetic construct; identical to SEQ ID NO: 9875
  modified_base 1..8787: mod_base = OTHER; note = Each t is m1f
  source 1..8787: mol_type = other RNA

SEQ ID NO: 11473 - RNA, 8787 nt, synthetic construct; identical to SEQ ID NO: 9876
  modified_base 1..8787: mod_base = OTHER; note = Each t is m1f
  source 1..8787: mol_type = other RNA

SEQ ID NO: 11474 - RNA, 8787 nt, synthetic construct; identical to SEQ ID NO: 9877
  modified_base 1..8787: mod_base = OTHER; note = Each t is m1f
  source 1..8787: mol_type = other RNA

SEQ ID NO: 11475 - RNA, 8787 nt, synthetic construct; identical to SEQ ID NO: 9878
  modified_base 1..8787: mod_base = OTHER; note = Each t is m1f
  source 1..8787: mol_type = other RNA

SEQ ID NO: 11476 - RNA, 8787 nt, synthetic construct; identical to SEQ ID NO: 9879
  modified_base 1..8787: mod_base = OTHER; note = Each t is m1f
  source 1..8787: mol_type = other RNA

SEQ ID NO: 11477 - RNA, 8787 nt, synthetic construct; identical to SEQ ID NO: 9880
  modified_base 1..8787: mod_base = OTHER; note = Each t is m1f
  source 1..8787: mol_type = other RNA

SEQ ID NO: 11478 - RNA, 8787 nt, synthetic construct; identical to SEQ ID NO: 9881
  modified_base 1..8787: mod_base = OTHER; note = Each t is m1f
  source 1..8787: mol_type = other RNA

SEQ ID NO: 11479 - RNA, 8787 nt, synthetic construct; identical to SEQ ID NO: 9882
  modified_base 1..8787: mod_base = OTHER; note = Each t is m1f
  source 1..8787: mol_type = other RNA

SEQ ID NO: 11480 - RNA, 8787 nt, synthetic construct; identical to SEQ ID NO: 9883
  modified_base 1..8787: mod_base = OTHER; note = Each t is m1f
  source 1..8787: mol_type = other RNA

SEQ ID NO: 11481 - RNA, 8787 nt, synthetic construct; identical to SEQ ID NO: 9884
  modified_base 1..8787: mod_base = OTHER; note = Each t is m1f
  source 1..8787: mol_type = other RNA

SEQ ID NO: 11482 - RNA, 8787 nt, synthetic construct; identical to SEQ ID NO: 9885
  modified_base 1..8787: mod_base = OTHER; note = Each t is m1f
  source 1..8787: mol_type = other RNA

SEQ ID NO: 11483 - RNA, 8787 nt, synthetic construct; identical to SEQ ID NO: 9886
  modified_base 1..8787: mod_base = OTHER; note = Each t is m1f
  source 1..8787: mol_type = other RNA

SEQ ID NO: 11484 - RNA, 8787 nt, synthetic construct; identical to SEQ ID NO: 9887
  modified_base 1..8787: mod_base = OTHER; note = Each t is m1f
  source 1..8787: mol_type = other RNA

SEQ ID NO: 11485 - RNA, 8787 nt, synthetic construct; identical to SEQ ID NO: 9888
  modified_base 1..8787: mod_base = OTHER; note = Each t is m1f
  source 1..8787: mol_type = other RNA

SEQ ID NO: 11486 - RNA, 8787 nt, synthetic construct; identical to SEQ ID NO: 9889
  modified_base 1..8787: mod_base = OTHER; note = Each t is m1f
  source 1..8787: mol_type = other RNA

SEQ ID NO: 11487 - RNA, 8787 nt, synthetic construct; identical to SEQ ID NO: 9890
  modified_base 1..8787: mod_base = OTHER; note = Each t is m1f
  source 1..8787: mol_type = other RNA

SEQ ID NO: 11488 - RNA, 8787 nt, synthetic construct; identical to SEQ ID NO: 9891
  modified_base 1..8787: mod_base = OTHER; note = Each t is m1f
  source 1..8787: mol_type = other RNA

SEQ ID NO: 11489 - RNA, 8787 nt, synthetic construct; identical to SEQ ID NO: 9892
  modified_base 1..8787: mod_base = OTHER; note = Each t is m1f
  source 1..8787: mol_type = other RNA

SEQ ID NO: 11490 - RNA, 8787 nt, synthetic construct; identical to SEQ ID NO: 9893
  modified_base 1..8787: mod_base = OTHER; note = Each t is m1f
  source 1..8787: mol_type = other RNA

SEQ ID NO: 11491 - RNA, 8787 nt, synthetic construct; identical to SEQ ID NO: 9894
  modified_base 1..8787: mod_base = OTHER; note = Each t is m1f
  source 1..8787: mol_type = other RNA

SEQ ID NO: 11492 - RNA, 8787 nt, synthetic construct; identical to SEQ ID NO: 9895
  modified_base 1..8787: mod_base = OTHER; note = Each t is m1f
  source 1..8787: mol_type = other RNA

SEQ ID NO: 11493 - RNA, 8787 nt, synthetic construct; identical to SEQ ID NO: 9896
  modified_base 1..8787: mod_base = OTHER; note = Each t is m1f
  source 1..8787: mol_type = other RNA

SEQ ID NO: 11494 - RNA, 8787 nt, synthetic construct; identical to SEQ ID NO: 9897
  modified_base 1..8787: mod_base = OTHER; note = Each t is m1f
  source 1..8787: mol_type = other RNA

SEQ ID NO: 11495 - RNA, 8787 nt, synthetic construct; identical to SEQ ID NO: 9898
  modified_base 1..8787: mod_base = OTHER; note = Each t is m1f
  source 1..8787: mol_type = other RNA

SEQ ID NO: 11496 - RNA, 8787 nt, synthetic construct; identical to SEQ ID NO: 9899
  modified_base 1..8787: mod_base = OTHER; note = Each t is m1f
  source 1..8787: mol_type = other RNA

SEQ ID NO: 11497 - RNA, 8787 nt, synthetic construct; identical to SEQ ID NO: 9900
  modified_base 1..8787: mod_base = OTHER; note = Each t is m1f
  source 1..8787: mol_type = other RNA

SEQ ID NO: 11498 - RNA, 8787 nt, synthetic construct; identical to SEQ ID NO: 9901
  modified_base 1..8787: mod_base = OTHER; note = Each t is m1f
  source 1..8787: mol_type = other RNA

SEQ ID NO: 11499 - RNA, 8787 nt, synthetic construct; identical to SEQ ID NO: 9902
  modified_base 1..8787: mod_base = OTHER; note = Each t is m1f
  source 1..8787: mol_type = other RNA

SEQ ID NO: 11500 - RNA, 8787 nt, synthetic construct; identical to SEQ ID NO: 9903
  modified_base 1..8787: mod_base = OTHER; note = Each t is m1f
  source 1..8787: mol_type = other RNA

SEQ ID NO: 11501 - RNA, 8787 nt, synthetic construct; identical to SEQ ID NO: 9904
  modified_base 1..8787: mod_base = OTHER; note = Each t is m1f
  source 1..8787: mol_type = other RNA

SEQ ID NO: 11502 - RNA, 8787 nt, synthetic construct; identical to SEQ ID NO: 9905
  modified_base 1..8787: mod_base = OTHER; note = Each t is m1f
  source 1..8787: mol_type = other RNA

SEQ ID NO: 11503 - RNA, 8787 nt, synthetic construct; identical to SEQ ID NO: 9906
  modified_base 1..8787: mod_base = OTHER; note = Each t is m1f
  source 1..8787: mol_type = other RNA

SEQ ID NO: 11504 - RNA, 8787 nt, synthetic construct; identical to SEQ ID NO: 9907
  modified_base 1..8787: mod_base = OTHER; note = Each t is m1f
  source 1..8787: mol_type = other RNA

SEQ ID NO: 11505 - RNA, 8787 nt, synthetic construct; identical to SEQ ID NO: 9908
  modified_base 1..8787: mod_base = OTHER; note = Each t is m1f
  source 1..8787: mol_type = other RNA

SEQ ID NO: 11506 - RNA, 8787 nt, synthetic construct; identical to SEQ ID NO: 9909
  modified_base 1..8787: mod_base = OTHER; note = Each t is m1f
  source 1..8787: mol_type = other RNA

SEQ ID NO: 11507 - RNA, 8787 nt, synthetic construct; identical to SEQ ID NO: 9910
  modified_base 1..8787: mod_base = OTHER; note = Each t is m1f
  source 1..8787: mol_type = other RNA

SEQ ID NO: 11508 - RNA, 8787 nt, synthetic construct; identical to SEQ ID NO: 9911
  modified_base 1..8787: mod_base = OTHER; note = Each t is m1f
  source 1..8787: mol_type = other RNA

SEQ ID NO: 11509 - RNA, 8787 nt, synthetic construct; identical to SEQ ID NO: 9912
  modified_base 1..8787: mod_base = OTHER; note = Each t is m1f
  source 1..8787: mol_type = other RNA

SEQ ID NO: 11510 - RNA, 8787 nt, synthetic construct; identical to SEQ ID NO: 9913
  modified_base 1..8787: mod_base = OTHER; note = Each t is m1f
  source 1..8787: mol_type = other RNA

SEQ ID NO: 11511 - RNA, 8787 nt, synthetic construct; identical to SEQ ID NO: 9914
  modified_base 1..8787: mod_base = OTHER; note = Each t is m1f
  source 1..8787: mol_type = other RNA

SEQ ID NO: 11512 - RNA, 8787 nt, synthetic construct; identical to SEQ ID NO: 9915
  modified_base 1..8787: mod_base = OTHER; note = Each t is m1f
  source 1..8787: mol_type = other RNA

SEQ ID NO: 11513 - RNA, 8787 nt, synthetic construct; identical to SEQ ID NO: 9916
  modified_base 1..8787: mod_base = OTHER; note = Each t is m1f
  source 1..8787: mol_type = other RNA

SEQ ID NO: 11514 - RNA, 8787 nt, synthetic construct; identical to SEQ ID NO: 9917
  modified_base 1..8787: mod_base = OTHER; note = Each t is m1f
  source 1..8787: mol_type = other RNA

SEQ ID NO: 11515 - RNA, 8787 nt, synthetic construct; identical to SEQ ID NO: 9918
  modified_base 1..8787: mod_base = OTHER; note = Each t is m1f
  source 1..8787: mol_type = other RNA

SEQ ID NO: 11516 - RNA, 8787 nt, synthetic construct; identical to SEQ ID NO: 9919
  modified_base 1..8787: mod_base = OTHER; note = Each t is m1f
  source 1..8787: mol_type = other RNA

SEQ ID NO: 11517 - RNA, 8787 nt, synthetic construct; identical to SEQ ID NO: 9920
  modified_base 1..8787: mod_base = OTHER; note = Each t is m1f
  source 1..8787: mol_type = other RNA

SEQ ID NO: 11518 - RNA, 8787 nt, synthetic construct; identical to SEQ ID NO: 9921
  modified_base 1..8787: mod_base = OTHER; note = Each t is m1f
  source 1..8787: mol_type = other RNA

SEQ ID NO: 11519 - RNA, 8787 nt, synthetic construct; identical to SEQ ID NO: 9922
  modified_base 1..8787: mod_base = OTHER; note = Each t is m1f
  source 1..8787: mol_type = other RNA

SEQ ID NO: 11520 - RNA, 8787 nt, synthetic construct; identical to SEQ ID NO: 9923
  modified_base 1..8787: mod_base = OTHER; note = Each t is m1f
  source 1..8787: mol_type = other RNA

SEQ ID NO: 11521 - RNA, 8787 nt, synthetic construct; identical to SEQ ID NO: 9924
  modified_base 1..8787: mod_base = OTHER; note = Each t is m1f
  source 1..8787: mol_type = other RNA

SEQ ID NO: 11522 - RNA, 8787 nt, synthetic construct; identical to SEQ ID NO: 9925
  modified_base 1..8787: mod_base = OTHER; note = Each t is m1f
  source 1..8787: mol_type = other RNA

SEQ ID NO: 11523 - RNA, 8787 nt, synthetic construct; identical to SEQ ID NO: 9926
  modified_base 1..8787: mod_base = OTHER; note = Each t is m1f
  source 1..8787: mol_type = other RNA

SEQ ID NO: 11524 - RNA, 8787 nt, synthetic construct; identical to SEQ ID NO: 9927
  modified_base 1..8787: mod_base = OTHER; note = Each t is m1f
  source 1..8787: mol_type = other RNA

SEQ ID NO: 11525 - RNA, 8793 nt, synthetic construct; identical to SEQ ID NO: 9928
  modified_base 1..8793: mod_base = OTHER; note = Each t is m1f
  source 1..8793: mol_type = other RNA

SEQ ID NO: 11526 - RNA, 8787 nt, synthetic construct; identical to SEQ ID NO: 9929
  modified_base 1..8787: mod_base = OTHER; note = Each t is m1f
  source 1..8787: mol_type = other RNA

SEQ ID NO: 11527 - RNA, 8787 nt, synthetic construct; identical to SEQ ID NO: 9930
  modified_base 1..8787: mod_base = OTHER; note = Each t is m1f
  source 1..8787: mol_type = other RNA

SEQ ID NO: 11528 - RNA, 8787 nt, synthetic construct; identical to SEQ ID NO: 9931
  modified_base 1..8787: mod_base = OTHER; note = Each t is m1f
  source 1..8787: mol_type = other RNA

SEQ ID NO: 11529 - RNA, 8787 nt, synthetic construct; identical to SEQ ID NO: 9932
  modified_base 1..8787: mod_base = OTHER; note = Each t is m1f
  source 1..8787: mol_type = other RNA

SEQ ID NO: 11530 - RNA, 8787 nt, synthetic construct; identical to SEQ ID NO: 9933
  modified_base 1..8787: mod_base = OTHER; note = Each t is m1f
  source 1..8787: mol_type = other RNA

SEQ ID NO: 11531 - RNA, 8787 nt, synthetic construct; identical to SEQ ID NO: 9934
  modified_base 1..8787: mod_base = OTHER; note = Each t is m1f
  source 1..8787: mol_type = other RNA

SEQ ID NO: 11532 - RNA, 8787 nt, synthetic construct; identical to SEQ ID NO: 9935
  modified_base 1..8787: mod_base = OTHER; note = Each t is m1f
  source 1..8787: mol_type = other RNA

SEQ ID NO: 11533 - RNA, 8787 nt, synthetic construct; identical to SEQ ID NO: 9936
  modified_base 1..8787: mod_base = OTHER; note = Each t is m1f
  source 1..8787: mol_type = other RNA

SEQ ID NO: 11534 - RNA, 8787 nt, synthetic construct; identical to SEQ ID NO: 9937
  modified_base 1..8787: mod_base = OTHER; note = Each t is m1f
  source 1..8787: mol_type = other RNA

SEQ ID NO: 11535 - RNA, 8787 nt, synthetic construct; identical to SEQ ID NO: 9938
  modified_base 1..8787: mod_base = OTHER; note = Each t is m1f
  source 1..8787: mol_type = other RNA

SEQ ID NO: 11536 - RNA, 8787 nt, synthetic construct; identical to SEQ ID NO: 9939
  modified_base 1..8787: mod_base = OTHER; note = Each t is m1f
  source 1..8787: mol_type = other RNA

SEQ ID NO: 11537 - RNA, 8787 nt, synthetic construct; identical to SEQ ID NO: 9940
  modified_base 1..8787: mod_base = OTHER; note = Each t is m1f
  source 1..8787: mol_type = other RNA

SEQ ID NO: 11538 - RNA, 8787 nt, synthetic construct; identical to SEQ ID NO: 9941
  modified_base 1..8787: mod_base = OTHER; note = Each t is m1f
  source 1..8787: mol_type = other RNA

SEQ ID NO: 11539 - RNA, 8787 nt, synthetic construct; identical to SEQ ID NO: 9942
  modified_base 1..8787: mod_base = OTHER; note = Each t is m1f
  source 1..8787: mol_type = other RNA

SEQ ID NO: 11540 - RNA, 8787 nt, synthetic construct; identical to SEQ ID NO: 9943
  modified_base 1..8787: mod_base = OTHER; note = Each t is m1f
  source 1..8787: mol_type = other RNA

SEQ ID NO: 11541 - RNA, 8787 nt, synthetic construct; identical to SEQ ID NO: 9944
  modified_base 1..8787: mod_base = OTHER; note = Each t is m1f
  source 1..8787: mol_type = other RNA

SEQ ID NO: 11542 - RNA, 8787 nt, synthetic construct; identical to SEQ ID NO: 9945
  modified_base 1..8787: mod_base = OTHER; note = Each t is m1f
  source 1..8787: mol_type = other RNA

SEQ ID NO: 11543 - RNA, 8787 nt, synthetic construct; identical to SEQ ID NO: 9946
  modified_base 1..8787: mod_base = OTHER; note = Each t is m1f
  source 1..8787: mol_type = other RNA

SEQ ID NO: 11544 - RNA, 8787 nt, synthetic construct; identical to SEQ ID NO: 9947
  modified_base 1..8787: mod_base = OTHER; note = Each t is m1f
  source 1..8787: mol_type = other RNA

SEQ ID NO: 11545 - RNA, 8787 nt, synthetic construct; identical to SEQ ID NO: 9948
  modified_base 1..8787: mod_base = OTHER; note = Each t is m1f
  source 1..8787: mol_type = other RNA

SEQ ID NO: 11546 - RNA, 8787 nt, synthetic construct; identical to SEQ ID NO: 9949
  modified_base 1..8787: mod_base = OTHER; note = Each t is m1f
  source 1..8787: mol_type = other RNA

SEQ ID NO: 11547 - RNA, 8787 nt, synthetic construct; identical to SEQ ID NO: 9950
  modified_base 1..8787: mod_base = OTHER; note = Each t is m1f
  source 1..8787: mol_type = other RNA

SEQ ID NO: 11548 - RNA, 8787 nt, synthetic construct; identical to SEQ ID NO: 9951
  modified_base 1..8787: mod_base = OTHER; note = Each t is m1f
  source 1..8787: mol_type = other RNA

SEQ ID NO: 11549 - RNA, 8787 nt, synthetic construct; identical to SEQ ID NO: 9952
  modified_base 1..8787: mod_base = OTHER; note = Each t is m1f
  source 1..8787: mol_type = other RNA

SEQ ID NO: 11550 - RNA, 8787 nt, synthetic construct; identical to SEQ ID NO: 9953
  modified_base 1..8787: mod_base = OTHER; note = Each t is m1f
  source 1..8787: mol_type = other RNA

SEQ ID NO: 11551 - RNA, 8811 nt, synthetic construct; identical to SEQ ID NO: 9954
  modified_base 1..8811: mod_base = OTHER; note = Each t is m1f
  source 1..8811: mol_type = other RNA

SEQ ID NO: 11552 - RNA, 8787 nt, synthetic construct; identical to SEQ ID NO: 9955
  modified_base 1..8787: mod_base = OTHER; note = Each t is m1f
  source 1..8787: mol_type = other RNA

SEQ ID NO: 11553 - RNA, 8787 nt, synthetic construct; identical to SEQ ID NO: 9956
  modified_base 1..8787: mod_base = OTHER; note = Each t is m1f
  source 1..8787: mol_type = other RNA

SEQ ID NO: 11554 - RNA, 8787 nt, synthetic construct; identical to SEQ ID NO: 9957
  modified_base 1..8787: mod_base = OTHER; note = Each t is m1f
  source 1..8787: mol_type = other RNA

SEQ ID NO: 11555 - RNA, 8787 nt, synthetic construct; identical to SEQ ID NO: 9958
  modified_base 1..8787: mod_base = OTHER; note = Each t is m1f
  source 1..8787: mol_type = other RNA

SEQ ID NO: 11556 - RNA, 8784 nt, synthetic construct; identical to SEQ ID NO: 9959
  modified_base 1..8784: mod_base = OTHER; note = Each t is m1f
  source 1..8784: mol_type = other RNA

SEQ ID NO: 11557 - RNA, 8787 nt, synthetic construct; identical to SEQ ID NO: 9960
  modified_base 1..8787: mod_base = OTHER; note = Each t is m1f
  source 1..8787: mol_type = other RNA

SEQ ID NO: 11558 - RNA, 8787 nt, synthetic construct; identical to SEQ ID NO: 9961
  modified_base 1..8787: mod_base = OTHER; note = Each t is m1f
  source 1..8787: mol_type = other RNA

SEQ ID NO: 11559 - RNA, 8787 nt, synthetic construct; identical to SEQ ID NO: 9962
  modified_base 1..8787: mod_base = OTHER; note = Each t is m1f
  source 1..8787: mol_type = other RNA

SEQ ID NO: 11560 - RNA, 8787 nt, synthetic construct; identical to SEQ ID NO: 9963
  modified_base 1..8787: mod_base = OTHER; note = Each t is m1f
  source 1..8787: mol_type = other RNA

SEQ ID NO: 11561 - RNA, 8787 nt, synthetic construct; identical to SEQ ID NO: 9964
  modified_base 1..8787: mod_base = OTHER; note = Each t is m1f
  source 1..8787: mol_type = other RNA

SEQ ID NO: 11562 - RNA, 8787 nt, synthetic construct; identical to SEQ ID NO: 9965
  modified_base 1..8787: mod_base = OTHER; note = Each t is m1f
  source 1..8787: mol_type = other RNA

SEQ ID NO: 11563 - RNA, 8787 nt, synthetic construct; identical to SEQ ID NO: 9966
  modified_base 1..8787: mod_base = OTHER; note = Each t is m1f
  source 1..8787: mol_type = other RNA

SEQ ID NO: 11564 - RNA, 8787 nt, synthetic construct; identical to SEQ ID NO: 9967
  modified_base 1..8787: mod_base = OTHER; note = Each t is m1f
  source 1..8787: mol_type = other RNA

SEQ ID NO: 11565 - RNA, 8787 nt, synthetic construct; identical to SEQ ID NO: 9968
  modified_base 1..8787: mod_base = OTHER; note = Each t is m1f
  source 1..8787: mol_type = other RNA

SEQ ID NO: 11566 - RNA, 8787 nt, synthetic construct; identical to SEQ ID NO: 9969
  modified_base 1..8787: mod_base = OTHER; note = Each t is m1f
  source 1..8787: mol_type = other RNA

SEQ ID NO: 11567 - RNA, 8787 nt, synthetic construct; identical to SEQ ID NO: 9970
  modified_base 1..8787: mod_base = OTHER; note = Each t is m1f
  source 1..8787: mol_type = other RNA

SEQ ID NO: 11568 - RNA, 8787 nt, synthetic construct; identical to SEQ ID NO: 9971
  modified_base 1..8787: mod_base = OTHER; note = Each t is m1f
  source 1..8787: mol_type = other RNA

SEQ ID NO: 11569 - RNA, 8787 nt, synthetic construct; identical to SEQ ID NO: 9972
  modified_base 1..8787: mod_base = OTHER; note = Each t is m1f
  source 1..8787: mol_type = other RNA

SEQ ID NO: 11570 - RNA, 8787 nt, synthetic construct; identical to SEQ ID NO: 9973
  modified_base 1..8787: mod_base = OTHER; note = Each t is m1f
  source 1..8787: mol_type = other RNA

SEQ ID NO: 11571 - RNA, 8787 nt, synthetic construct; identical to SEQ ID NO: 9974
  modified_base 1..8787: mod_base = OTHER; note = Each t is m1f
  source 1..8787: mol_type = other RNA

SEQ ID NO: 11572 - RNA, 8787 nt, synthetic construct; identical to SEQ ID NO: 9975
  modified_base 1..8787: mod_base = OTHER; note = Each t is m1f
  source 1..8787: mol_type = other RNA

SEQ ID NO: 11573 - RNA, 8787 nt, synthetic construct; identical to SEQ ID NO: 9976
  modified_base 1..8787: mod_base = OTHER; note = Each t is m1f
  source 1..8787: mol_type = other RNA

SEQ ID NO: 11574 - RNA, 8787 nt, synthetic construct; identical to SEQ ID NO: 9977
  modified_base 1..8787: mod_base = OTHER; note = Each t is m1f
  source 1..8787: mol_type = other RNA

SEQ ID NO: 11575 - RNA, 8787 nt, synthetic construct; identical to SEQ ID NO: 9978
  modified_base 1..8787: mod_base = OTHER; note = Each t is m1f
  source 1..8787: mol_type = other RNA

SEQ ID NO: 11576 - RNA, 8787 nt, synthetic construct; identical to SEQ ID NO: 9979
  modified_base 1..8787: mod_base = OTHER; note = Each t is m1f
  source 1..8787: mol_type = other RNA

SEQ ID NO: 11577 - RNA, 8787 nt, synthetic construct; identical to SEQ ID NO: 9980
  modified_base 1..8787: mod_base = OTHER; note = Each t is m1f
  source 1..8787: mol_type = other RNA

SEQ ID NO: 11578 - RNA, 8787 nt, synthetic construct; identical to SEQ ID NO: 9981
  modified_base 1..8787: mod_base = OTHER; note = Each t is m1f
  source 1..8787: mol_type = other RNA

SEQ ID NO: 11579 - RNA, 8787 nt, synthetic construct; identical to SEQ ID NO: 9982
  modified_base 1..8787: mod_base = OTHER; note = Each t is m1f
  source 1..8787: mol_type = other RNA

SEQ ID NO: 11580 - RNA, 8787 nt, synthetic construct; identical to SEQ ID NO: 9983
  modified_base 1..8787: mod_base = OTHER; note = Each t is m1f
  source 1..8787: mol_type = other RNA

SEQ ID NO: 11581 - RNA, 8787 nt, synthetic construct; identical to SEQ ID NO: 9984
  modified_base 1..8787: mod_base = OTHER; note = Each t is m1f
  source 1..8787: mol_type = other RNA

SEQ ID NO: 11582 - RNA, 8787 nt, synthetic construct; identical to SEQ ID NO: 9985
  modified_base 1..8787: mod_base = OTHER; note = Each t is m1f
  source 1..8787: mol_type = other RNA

SEQ ID NO: 11583 - RNA, 8787 nt, synthetic construct; identical to SEQ ID NO: 9986
  modified_base 1..8787: mod_base = OTHER; note = Each t is m1f
  source 1..8787: mol_type = other RNA

SEQ ID NO: 11584 - RNA, 8787 nt, synthetic construct; identical to SEQ ID NO: 9987
  modified_base 1..8787: mod_base = OTHER; note = Each t is m1f
  source 1..8787: mol_type = other RNA

SEQ ID NO: 11585 - RNA, 8787 nt, synthetic construct; identical to SEQ ID NO: 9988
  modified_base 1..8787: mod_base = OTHER; note = Each t is m1f
  source 1..8787: mol_type = other RNA

SEQ ID NO: 11586 - RNA, 8787 nt, synthetic construct; identical to SEQ ID NO: 9989
  modified_base 1..8787: mod_base = OTHER; note = Each t is m1f
  source 1..8787: mol_type = other RNA

SEQ ID NO: 11587 - RNA, 8787 nt, synthetic construct; identical to SEQ ID NO: 9990
  modified_base 1..8787: mod_base = OTHER; note = Each t is m1f
  source 1..8787: mol_type = other RNA

SEQ ID NO: 11588 - RNA, 8787 nt, synthetic construct; identical to SEQ ID NO: 9991
  modified_base 1..8787: mod_base = OTHER; note = Each t is m1f
  source 1..8787: mol_type = other RNA

SEQ ID NO: 11589 - RNA, 8787 nt, synthetic construct; identical to SEQ ID NO: 9992
  modified_base 1..8787: mod_base = OTHER; note = Each t is m1f
  source 1..8787: mol_type = other RNA

SEQ ID NO: 11590 - RNA, 8787 nt, synthetic construct; identical to SEQ ID NO: 9993
  modified_base 1..8787: mod_base = OTHER; note = Each t is m1f
  source 1..8787: mol_type = other RNA

SEQ ID NO: 11591 - RNA, 8787 nt, synthetic construct; identical to SEQ ID NO: 9994
  modified_base 1..8787: mod_base = OTHER; note = Each t is m1f
  source 1..8787: mol_type = other RNA

SEQ ID NO: 11592 - RNA, 8787 nt, synthetic construct; identical to SEQ ID NO: 9995
  modified_base 1..8787: mod_base = OTHER; note = Each t is m1f
  source 1..8787: mol_type = other RNA

SEQ ID NO: 11593 - RNA, 8787 nt, synthetic construct; identical to SEQ ID NO: 9996
  modified_base 1..8787: mod_base = OTHER; note = Each t is m1f
  source 1..8787: mol_type = other RNA

SEQ ID NO: 11594 - RNA, 8787 nt, synthetic construct; identical to SEQ ID NO: 9997
  modified_base 1..8787: mod_base = OTHER; note = Each t is m1f
  source 1..8787: mol_type = other RNA

SEQ ID NO: 11595 - RNA, 8787 nt, synthetic construct; identical to SEQ ID NO: 9998
  modified_base 1..8787: mod_base = OTHER; note = Each t is m1f
  source 1..8787: mol_type = other RNA

SEQ ID NO: 11596 - RNA, 8787 nt, synthetic construct; identical to SEQ ID NO: 9999
  modified_base 1..8787: mod_base = OTHER; note = Each t is m1f
  source 1..8787: mol_type = other RNA

SEQ ID NO: 11597 - RNA, 8787 nt, synthetic construct; identical to SEQ ID NO: 10000
  modified_base 1..8787: mod_base = OTHER; note = Each t is m1f
  source 1..8787: mol_type = other RNA

SEQ ID NO: 11598 - RNA, 8787 nt, synthetic construct; identical to SEQ ID NO: 10001
  modified_base 1..8787: mod_base = OTHER; note = Each t is m1f
  source 1..8787: mol_type = other RNA

SEQ ID NO: 11599 - RNA, 8787 nt, synthetic construct; identical to SEQ ID NO: 10002
  modified_base 1..8787: mod_base = OTHER; note = Each t is m1f
  source 1..8787: mol_type = other RNA

SEQ ID NO: 11600 - RNA, 8787 nt, synthetic construct; identical to SEQ ID NO: 10003
  modified_base 1..8787: mod_base = OTHER; note = Each t is m1f
  source 1..8787: mol_type = other RNA

SEQ ID NO: 11601 - RNA, 8787 nt, synthetic construct; identical to SEQ ID NO: 10004
  modified_base 1..8787: mod_base = OTHER; note = Each t is m1f
  source 1..8787: mol_type = other RNA

SEQ ID NO: 11602 - RNA, 8787 nt, synthetic construct; identical to SEQ ID NO: 10005
  modified_base 1..8787: mod_base = OTHER; note = Each t is m1f
  source 1..8787: mol_type = other RNA

SEQ ID NO: 11603 - RNA, 8787 nt, synthetic construct; identical to SEQ ID NO: 10006
  modified_base 1..8787: mod_base = OTHER; note = Each t is m1f
  source 1..8787: mol_type = other RNA

SEQ ID NO: 11604 - RNA, 8787 nt, synthetic construct; identical to SEQ ID NO: 10007
  modified_base 1..8787: mod_base = OTHER; note = Each t is m1f
  source 1..8787: mol_type = other RNA

SEQ ID NO: 11605 - RNA, 8787 nt, synthetic construct; identical to SEQ ID NO: 10008
  modified_base 1..8787: mod_base = OTHER; note = Each t is m1f
  source 1..8787: mol_type = other RNA

SEQ ID NO: 11606 - RNA, 8787 nt, synthetic construct; identical to SEQ ID NO: 10009
  modified_base 1..8787: mod_base = OTHER; note = Each t is m1f
  source 1..8787: mol_type = other RNA

SEQ ID NO: 11607 - RNA, 8787 nt, synthetic construct; identical to SEQ ID NO: 10010
  modified_base 1..8787: mod_base = OTHER; note = Each t is m1f
  source 1..8787: mol_type = other RNA

SEQ ID NO: 11608 - RNA, 8787 nt, synthetic construct; identical to SEQ ID NO: 10011
  modified_base 1..8787: mod_base = OTHER; note = Each t is m1f
  source 1..8787: mol_type = other RNA

SEQ ID NO: 11609 - RNA, 8787 nt, synthetic construct; identical to SEQ ID NO: 10012
  modified_base 1..8787: mod_base = OTHER; note = Each t is m1f
  source 1..8787: mol_type = other RNA

SEQ ID NO: 11610 - RNA, 8787 nt, synthetic construct; identical to SEQ ID NO: 10013
  modified_base 1..8787: mod_base = OTHER; note = Each t is m1f
  source 1..8787: mol_type = other RNA

SEQ ID NO: 11611 - RNA, 8787 nt, synthetic construct; identical to SEQ ID NO: 10014
  modified_base 1..8787: mod_base = OTHER; note = Each t is m1f
  source 1..8787: mol_type = other RNA

SEQ ID NO: 11612 - RNA, 8787 nt, synthetic construct; identical to SEQ ID NO: 10015
  modified_base 1..8787: mod_base = OTHER; note = Each t is m1f
  source 1..8787: mol_type = other RNA

SEQ ID NO: 11613 - RNA, 8787 nt, synthetic construct; identical to SEQ ID NO: 10016
  modified_base 1..8787: mod_base = OTHER; note = Each t is m1f
  source 1..8787: mol_type = other RNA

SEQ ID NO: 11614 - RNA, 8787 nt, synthetic construct; identical to SEQ ID NO: 10017
  modified_base 1..8787: mod_base = OTHER; note = Each t is m1f
  source 1..8787: mol_type = other RNA

SEQ ID NO: 11615 - RNA, 8787 nt, synthetic construct; identical to SEQ ID NO: 10018
  modified_base 1..8787: mod_base = OTHER; note = Each t is m1f
  source 1..8787: mol_type = other RNA

SEQ ID NO: 11616 - RNA, 8787 nt, synthetic construct; identical to SEQ ID NO: 10019
  modified_base 1..8787: mod_base = OTHER; note = Each t is m1f
  source 1..8787: mol_type = other RNA

SEQ ID NO: 11617 - RNA, 8787 nt, synthetic construct; identical to SEQ ID NO: 10020
  modified_base 1..8787: mod_base = OTHER; note = Each t is m1f
  source 1..8787: mol_type = other RNA

SEQ ID NO: 11618 - RNA, 8787 nt, synthetic construct; identical to SEQ ID NO: 10021
  modified_base 1..8787: mod_base = OTHER; note = Each t is m1f
  source 1..8787: mol_type = other RNA

SEQ ID NO: 11619 - RNA, 8787 nt, synthetic construct; identical to SEQ ID NO: 10022
  modified_base 1..8787: mod_base = OTHER; note = Each t is m1f
  source 1..8787: mol_type = other RNA

SEQ ID NO: 11620 - RNA, 8787 nt, synthetic construct; identical to SEQ ID NO: 10023
  modified_base 1..8787: mod_base = OTHER; note = Each t is m1f
  source 1..8787: mol_type = other RNA

SEQ ID NO: 11621 - RNA, 8787 nt, synthetic construct; identical to SEQ ID NO: 10024
  modified_base 1..8787: mod_base = OTHER; note = Each t is m1f
  source 1..8787: mol_type = other RNA

SEQ ID NO: 11622 - RNA, 8787 nt, synthetic construct; identical to SEQ ID NO: 10025
  modified_base 1..8787: mod_base = OTHER; note = Each t is m1f
  source 1..8787: mol_type = other RNA

SEQ ID NO: 11623 - RNA, 8787 nt, synthetic construct; identical to SEQ ID NO: 10026
  modified_base 1..8787: mod_base = OTHER; note = Each t is m1f
  source 1..8787: mol_type = other RNA

SEQ ID NO: 11624 - RNA, 8787 nt, synthetic construct; identical to SEQ ID NO: 10027
  modified_base 1..8787: mod_base = OTHER; note = Each t is m1f
  source 1..8787: mol_type = other RNA

SEQ ID NO: 11625 - RNA, 8787 nt, synthetic construct; identical to SEQ ID NO: 10028
  modified_base 1..8787: mod_base = OTHER; note = Each t is m1f
  source 1..8787: mol_type = other RNA

SEQ ID NO: 11626 - RNA, 8787 nt, synthetic construct; identical to SEQ ID NO: 10029
  modified_base 1..8787: mod_base = OTHER; note = Each t is m1f
  source 1..8787: mol_type = other RNA

SEQ ID NO: 11627 - RNA, 8787 nt, synthetic construct; identical to SEQ ID NO: 10030
  modified_base 1..8787: mod_base = OTHER; note = Each t is m1f
  source 1..8787: mol_type = other RNA

SEQ ID NO: 11628 - RNA, 8787 nt, synthetic construct; identical to SEQ ID NO: 10031
  modified_base 1..8787: mod_base = OTHER; note = Each t is m1f
  source 1..8787: mol_type = other RNA

SEQ ID NO: 11629 - RNA, 8787 nt, synthetic construct; identical to SEQ ID NO: 10032
  modified_base 1..8787: mod_base = OTHER; note = Each t is m1f
  source 1..8787: mol_type = other RNA

SEQ ID NO: 11630 - RNA, 8787 nt, synthetic construct; identical to SEQ ID NO: 10033
  modified_base 1..8787: mod_base = OTHER; note = Each t is m1f
  source 1..8787: mol_type = other RNA

SEQ ID NO: 11631 - RNA, 8787 nt, synthetic construct; identical to SEQ ID NO: 10034
  modified_base 1..8787: mod_base = OTHER; note = Each t is m1f
  source 1..8787: mol_type = other RNA

SEQ ID NO: 11632 - RNA, 8787 nt, synthetic construct; identical to SEQ ID NO: 10035
  modified_base 1..8787: mod_base = OTHER; note = Each t is m1f
  source 1..8787: mol_type = other RNA

SEQ ID NO: 11633 - RNA, 8787 nt, synthetic construct; identical to SEQ ID NO: 10036
  modified_base 1..8787: mod_base = OTHER; note = Each t is m1f
  source 1..8787: mol_type = other RNA

SEQ ID NO: 11634 - RNA, 8787 nt, synthetic construct; identical to SEQ ID NO: 10037
  modified_base 1..8787: mod_base = OTHER; note = Each t is m1f
  source 1..8787: mol_type = other RNA

SEQ ID NO: 11635 - RNA, 8787 nt, synthetic construct; identical to SEQ ID NO: 10038
  modified_base 1..8787: mod_base = OTHER; note = Each t is m1f
  source 1..8787: mol_type = other RNA

SEQ ID NO: 11636 - RNA, 8787 nt, synthetic construct; identical to SEQ ID NO: 10039
  modified_base 1..8787: mod_base = OTHER; note = Each t is m1f
  source 1..8787: mol_type = other RNA

SEQ ID NO: 11637 - RNA, 8787 nt, synthetic construct; identical to SEQ ID NO: 10040
  modified_base 1..8787: mod_base = OTHER; note = Each t is m1f
  source 1..8787: mol_type = other RNA

SEQ ID NO: 11638 - RNA, 8787 nt, synthetic construct; identical to SEQ ID NO: 10041
  modified_base 1..8787: mod_base = OTHER; note = Each t is m1f
  source 1..8787: mol_type = other RNA

SEQ ID NO: 11639 - RNA, 8787 nt, synthetic construct; identical to SEQ ID NO: 10042
  modified_base 1..8787: mod_base = OTHER; note = Each t is m1f
  source 1..8787: mol_type = other RNA

SEQ ID NO: 11640 - RNA, 8787 nt, synthetic construct; identical to SEQ ID NO: 10043
  modified_base 1..8787: mod_base = OTHER; note = Each t is m1f
  source 1..8787: mol_type = other RNA

SEQ ID NO: 11641 - RNA, 8787 nt, synthetic construct; identical to SEQ ID NO: 10044
  modified_base 1..8787: mod_base = OTHER; note = Each t is m1f
  source 1..8787: mol_type = other RNA

SEQ ID NO: 11642 - RNA, 8787 nt, synthetic construct; identical to SEQ ID NO: 10045
  modified_base 1..8787: mod_base = OTHER; note = Each t is m1f
  source 1..8787: mol_type = other RNA

SEQ ID NO: 11643 - RNA, 8787 nt, synthetic construct; identical to SEQ ID NO: 10046
  modified_base 1..8787: mod_base = OTHER; note = Each t is m1f
  source 1..8787: mol_type = other RNA

SEQ ID NO: 11644 - RNA, 8787 nt, synthetic construct; identical to SEQ ID NO: 10047
  modified_base 1..8787: mod_base = OTHER; note = Each t is m1f
  source 1..8787: mol_type = other RNA

SEQ ID NO: 11645 - RNA, 8787 nt, synthetic construct; identical to SEQ ID NO: 10048
  modified_base 1..8787: mod_base = OTHER; note = Each t is m1f
  source 1..8787: mol_type = other RNA

SEQ ID NO: 11646 - RNA, 8787 nt, synthetic construct; identical to SEQ ID NO: 10049
  modified_base 1..8787: mod_base = OTHER; note = Each t is m1f
  source 1..8787: mol_type = other RNA

SEQ ID NO: 11647 - RNA, 8787 nt, synthetic construct; identical to SEQ ID NO: 10050
  modified_base 1..8787: mod_base = OTHER; note = Each t is m1f
  source 1..8787: mol_type = other RNA

SEQ ID NO: 11648 - RNA, 8787 nt, synthetic construct; identical to SEQ ID NO: 10051
  modified_base 1..8787: mod_base = OTHER; note = Each t is m1f
  source 1..8787: mol_type = other RNA

SEQ ID NO: 11649 - RNA, 8787 nt, synthetic construct; identical to SEQ ID NO: 10052
  modified_base 1..8787: mod_base = OTHER; note = Each t is m1f
  source 1..8787: mol_type = other RNA

SEQ ID NO: 11650 - RNA, 8787 nt, synthetic construct; identical to SEQ ID NO: 10053
  modified_base 1..8787: mod_base = OTHER; note = Each t is m1f
  source 1..8787: mol_type = other RNA

SEQ ID NO: 11651 - RNA, 8787 nt, synthetic construct; identical to SEQ ID NO: 10054
  modified_base 1..8787: mod_base = OTHER; note = Each t is m1f
  source 1..8787: mol_type = other RNA

SEQ ID NO: 11652 - RNA, 8787 nt, synthetic construct; identical to SEQ ID NO: 10055
  modified_base 1..8787: mod_base = OTHER; note = Each t is m1f
  source 1..8787: mol_type = other RNA

SEQ ID NO: 11653 - RNA, 8787 nt, synthetic construct; identical to SEQ ID NO: 10056
  modified_base 1..8787: mod_base = OTHER; note = Each t is m1f
  source 1..8787: mol_type = other RNA

SEQ ID NO: 11654 - RNA, 8787 nt, synthetic construct; identical to SEQ ID NO: 10057
  modified_base 1..8787: mod_base = OTHER; note = Each t is m1f
  source 1..8787: mol_type = other RNA

SEQ ID NO: 11655 - RNA, 8787 nt, synthetic construct; identical to SEQ ID NO: 10058
  modified_base 1..8787: mod_base = OTHER; note = Each t is m1f
  source 1..8787: mol_type = other RNA

SEQ ID NO: 11656 - RNA, 8787 nt, synthetic construct; identical to SEQ ID NO: 10059
  modified_base 1..8787: mod_base = OTHER; note = Each t is m1f
  source 1..8787: mol_type = other RNA

SEQ ID NO: 11657 - RNA, 8787 nt, synthetic construct; identical to SEQ ID NO: 10060
  modified_base 1..8787: mod_base = OTHER; note = Each t is m1f
  source 1..8787: mol_type = other RNA

SEQ ID NO: 11658 - RNA, 8787 nt, synthetic construct; identical to SEQ ID NO: 10061
  modified_base 1..8787: mod_base = OTHER; note = Each t is m1f
  source 1..8787: mol_type = other RNA

SEQ ID NO: 11659 - RNA, 8787 nt, synthetic construct; identical to SEQ ID NO: 10062
  modified_base 1..8787: mod_base = OTHER; note = Each t is m1f
  source 1..8787: mol_type = other RNA

SEQ ID NO: 11660 - RNA, 8787 nt, synthetic construct; identical to SEQ ID NO: 10063
  modified_base 1..8787: mod_base = OTHER; note = Each t is m1f
  source 1..8787: mol_type = other RNA

SEQ ID NO: 11661 - RNA, 8787 nt, synthetic construct; identical to SEQ ID NO: 10064
  modified_base 1..8787: mod_base = OTHER; note = Each t is m1f
  source 1..8787: mol_type = other RNA

SEQ ID NO: 11662 - RNA, 8787 nt, synthetic construct; identical to SEQ ID NO: 10065
  modified_base 1..8787: mod_base = OTHER; note = Each t is m1f
  source 1..8787: mol_type = other RNA

SEQ ID NO: 11663 - RNA, 8820 nt, synthetic construct; identical to SEQ ID NO: 10066
  modified_base 1..8820: mod_base = OTHER; note = Each t is m1f
  source 1..8820: mol_type = other RNA

SEQ ID NO: 11664 - RNA, 8787 nt, synthetic construct; identical to SEQ ID NO: 10067
  modified_base 1..8787: mod_base = OTHER; note = Each t is m1f
  source 1..8787: mol_type = other RNA

SEQ ID NO: 11665 - RNA, 8784 nt, synthetic construct; identical to SEQ ID NO: 10068
  modified_base 1..8784: mod_base = OTHER; note = Each t is m1f
  source 1..8784: mol_type = other RNA

SEQ ID NO: 11666 - RNA, 8787 nt, synthetic construct; identical to SEQ ID NO: 10069
  modified_base 1..8787: mod_base = OTHER; note = Each t is m1f
  source 1..8787: mol_type = other RNA

SEQ ID NO: 11667 - RNA, 8787 nt, synthetic construct; identical to SEQ ID NO: 10070
  modified_base 1..8787: mod_base = OTHER; note = Each t is m1f
  source 1..8787: mol_type = other RNA

SEQ ID NO: 11668 - RNA, 8787 nt, synthetic construct; identical to SEQ ID NO: 10071
  modified_base 1..8787: mod_base = OTHER; note = Each t is m1f
  source 1..8787: mol_type = other RNA

SEQ ID NO: 11669 - RNA, 8787 nt, synthetic construct; identical to SEQ ID NO: 10072
  modified_base 1..8787: mod_base = OTHER; note = Each t is m1f
  source 1..8787: mol_type = other RNA

SEQ ID NO: 11670 - RNA, 8787 nt, synthetic construct; identical to SEQ ID NO: 10073
  modified_base 1..8787: mod_base = OTHER; note = Each t is m1f
  source 1..8787: mol_type = other RNA

SEQ ID NO: 11671 - RNA, 8787 nt, synthetic construct; identical to SEQ ID NO: 10074
  modified_base 1..8787: mod_base = OTHER; note = Each t is m1f
  source 1..8787: mol_type = other RNA

SEQ ID NO: 11672 - RNA, 8787 nt, synthetic construct; identical to SEQ ID NO: 10075
  modified_base 1..8787: mod_base = OTHER; note = Each t is m1f
  source 1..8787: mol_type = other RNA

SEQ ID NO: 11673 - RNA, 8787 nt, synthetic construct; identical to SEQ ID NO: 10076
  modified_base 1..8787: mod_base = OTHER; note = Each t is m1f
  source 1..8787: mol_type = other RNA

SEQ ID NO: 11674 - RNA, 8787 nt, synthetic construct; identical to SEQ ID NO: 10077
  modified_base 1..8787: mod_base = OTHER; note = Each t is m1f
  source 1..8787: mol_type = other RNA

SEQ ID NO: 11675 - RNA, 8787 nt, synthetic construct; identical to SEQ ID NO: 10078
  modified_base 1..8787: mod_base = OTHER; note = Each t is m1f
  source 1..8787: mol_type = other RNA

SEQ ID NO: 11676 - RNA, 8787 nt, synthetic construct; identical to SEQ ID NO: 10079
  modified_base 1..8787: mod_base = OTHER; note = Each t is m1f
  source 1..8787: mol_type = other RNA

SEQ ID NO: 11677 - RNA, 8787 nt, synthetic construct; identical to SEQ ID NO: 10080
  modified_base 1..8787: mod_base = OTHER; note = Each t is m1f
  source 1..8787: mol_type = other RNA

SEQ ID NO: 11678 - RNA, 8787 nt, synthetic construct; identical to SEQ ID NO: 10081
  modified_base 1..8787: mod_base = OTHER; note = Each t is m1f
  source 1..8787: mol_type = other RNA

SEQ ID NO: 11679 - RNA, 8787 nt, synthetic construct; identical to SEQ ID NO: 10082
  modified_base 1..8787: mod_base = OTHER; note = Each t is m1f
  source 1..8787: mol_type = other RNA

SEQ ID NO: 11680 - RNA, 8787 nt, synthetic construct; identical to SEQ ID NO: 10083
  modified_base 1..8787: mod_base = OTHER; note = Each t is m1f
  source 1..8787: mol_type = other RNA

SEQ ID NO: 11681 - RNA, 8790 nt, synthetic construct; identical to SEQ ID NO: 10084
  modified_base 1..8790: mod_base = OTHER; note = Each t is m1f
  source 1..8790: mol_type = other RNA

SEQ ID NO: 11682 - RNA, 8787 nt, synthetic construct; identical to SEQ ID NO: 10085
  modified_base 1..8787: mod_base = OTHER; note = Each t is m1f
  source 1..8787: mol_type = other RNA

SEQ ID NO: 11683 - RNA, 8787 nt, synthetic construct; identical to SEQ ID NO: 10086
  modified_base 1..8787: mod_base = OTHER; note = Each t is m1f
  source 1..8787: mol_type = other RNA

SEQ ID NO: 11684 - RNA, 8787 nt, synthetic construct; identical to SEQ ID NO: 10087
  modified_base 1..8787: mod_base = OTHER; note = Each t is m1f
  source 1..8787: mol_type = other RNA

SEQ ID NO: 11685 - RNA, 8787 nt, synthetic construct; identical to SEQ ID NO: 10088
  modified_base 1..8787: mod_base = OTHER; note = Each t is m1f
  source 1..8787: mol_type = other RNA

SEQ ID NO: 11686 - RNA, 8787 nt, synthetic construct; identical to SEQ ID NO: 10089
  modified_base 1..8787: mod_base = OTHER; note = Each t is m1f
  source 1..8787: mol_type = other RNA

SEQ ID NO: 11687 - RNA, 8787 nt, synthetic construct; identical to SEQ ID NO: 10090
  modified_base 1..8787: mod_base = OTHER; note = Each t is m1f
  source 1..8787: mol_type = other RNA

SEQ ID NO: 11688 - RNA, 8787 nt, synthetic construct; identical to SEQ ID NO: 10091
  modified_base 1..8787: mod_base = OTHER; note = Each t is m1f
  source 1..8787: mol_type = other RNA

SEQ ID NO: 11689 - RNA, 8787 nt, synthetic construct; identical to SEQ ID NO: 10092
  modified_base 1..8787: mod_base = OTHER; note = Each t is m1f
  source 1..8787: mol_type = other RNA

SEQ ID NO: 11690 - RNA, 8787 nt, synthetic construct; identical to SEQ ID NO: 10093
  modified_base 1..8787: mod_base = OTHER; note = Each t is m1f
  source 1..8787: mol_type = other RNA

SEQ ID NO: 11691 - RNA, 8787 nt, synthetic construct; identical to SEQ ID NO: 10094
  modified_base 1..8787: mod_base = OTHER; note = Each t is m1f
  source 1..8787: mol_type = other RNA

SEQ ID NO: 11692 - RNA, 8787 nt, synthetic construct; identical to SEQ ID NO: 10095
  modified_base 1..8787: mod_base = OTHER; note = Each t is m1f
  source 1..8787: mol_type = other RNA

SEQ ID NO: 11693 - RNA, 8787 nt, synthetic construct; identical to SEQ ID NO: 10096
  modified_base 1..8787: mod_base = OTHER; note = Each t is m1f
  source 1..8787: mol_type = other RNA

SEQ ID NO: 11694 - RNA, 8787 nt, synthetic construct; identical to SEQ ID NO: 10097
  modified_base 1..8787: mod_base = OTHER; note = Each t is m1f
  source 1..8787: mol_type = other RNA

SEQ ID NO: 11695 - RNA, 8787 nt, synthetic construct; identical to SEQ ID NO: 10098
  modified_base 1..8787: mod_base = OTHER; note = Each t is m1f
  source 1..8787: mol_type = other RNA

SEQ ID NO: 11696 - RNA, 8787 nt, synthetic construct; identical to SEQ ID NO: 10099
  modified_base 1..8787: mod_base = OTHER; note = Each t is m1f
  source 1..8787: mol_type = other RNA

SEQ ID NO: 11697 - RNA, 8787 nt, synthetic construct; identical to SEQ ID NO: 10100
  modified_base 1..8787: mod_base = OTHER; note = Each t is m1f
  source 1..8787: mol_type = other RNA

SEQ ID NO: 11698 - RNA, 8787 nt, synthetic construct; identical to SEQ ID NO: 10101
  modified_base 1..8787: mod_base = OTHER; note = Each t is m1f
  source 1..8787: mol_type = other RNA

SEQ ID NO: 11699 - RNA, 8787 nt, synthetic construct; identical to SEQ ID NO: 10102
  modified_base 1..8787: mod_base = OTHER; note = Each t is m1f
  source 1..8787: mol_type = other RNA

SEQ ID NO: 11700 - RNA, 8787 nt, synthetic construct; identical to SEQ ID NO: 10103
  modified_base 1..8787: mod_base = OTHER; note = Each t is m1f
  source 1..8787: mol_type = other RNA

SEQ ID NO: 11701 - RNA, 8787 nt, synthetic construct; identical to SEQ ID NO: 10104
  modified_base 1..8787: mod_base = OTHER; note = Each t is m1f
  source 1..8787: mol_type = other RNA

SEQ ID NO: 11702 - RNA, 8787 nt, synthetic construct; identical to SEQ ID NO: 10105
  modified_base 1..8787: mod_base = OTHER; note = Each t is m1f
  source 1..8787: mol_type = other RNA

SEQ ID NO: 11703 - RNA, 8787 nt, synthetic construct; identical to SEQ ID NO: 10106
  modified_base 1..8787: mod_base = OTHER; note = Each t is m1f
  source 1..8787: mol_type = other RNA

SEQ ID NO: 11704 - RNA, 8787 nt, synthetic construct; identical to SEQ ID NO: 10107
  modified_base 1..8787: mod_base = OTHER; note = Each t is m1f
  source 1..8787: mol_type = other RNA

SEQ ID NO: 11705 - RNA, 8787 nt, synthetic construct; identical to SEQ ID NO: 10108
  modified_base 1..8787: mod_base = OTHER; note = Each t is m1f
  source 1..8787: mol_type = other RNA

SEQ ID NO: 11706 - RNA, 8787 nt, synthetic construct; identical to SEQ ID NO: 10109
  modified_base 1..8787: mod_base = OTHER; note = Each t is m1f
  source 1..8787: mol_type = other RNA

SEQ ID NO: 11707 - RNA, 8787 nt, synthetic construct; identical to SEQ ID NO: 10110
  modified_base 1..8787: mod_base = OTHER; note = Each t is m1f
  source 1..8787: mol_type = other RNA

SEQ ID NO: 11708 - RNA, 8787 nt, synthetic construct; identical to SEQ ID NO: 10111
  modified_base 1..8787: mod_base = OTHER; note = Each t is m1f
  source 1..8787: mol_type = other RNA

SEQ ID NO: 11709 - RNA, 8787 nt, synthetic construct; identical to SEQ ID NO: 10112
  modified_base 1..8787: mod_base = OTHER; note = Each t is m1f
  source 1..8787: mol_type = other RNA

SEQ ID NO: 11710 - RNA, 8787 nt, synthetic construct; identical to SEQ ID NO: 10113
  modified_base 1..8787: mod_base = OTHER; note = Each t is m1f
  source 1..8787: mol_type = other RNA

SEQ ID NO: 11711 - RNA, 8787 nt, synthetic construct; identical to SEQ ID NO: 10114
  modified_base 1..8787: mod_base = OTHER; note = Each t is m1f
  source 1..8787: mol_type = other RNA

SEQ ID NO: 11712 - RNA, 8787 nt, synthetic construct; identical to SEQ ID NO: 10115
  modified_base 1..8787: mod_base = OTHER; note = Each t is m1f
  source 1..8787: mol_type = other RNA

SEQ ID NO: 11713 - RNA, 8787 nt, synthetic construct; identical to SEQ ID NO: 10116
  modified_base 1..8787: mod_base = OTHER; note = Each t is m1f
  source 1..8787: mol_type = other RNA

SEQ ID NO: 11714 - RNA, 8787 nt, synthetic construct; identical to SEQ ID NO: 10117
  modified_base 1..8787: mod_base = OTHER; note = Each t is m1f
  source 1..8787: mol_type = other RNA

SEQ ID NO: 11715 - RNA, 8787 nt, synthetic construct; identical to SEQ ID NO: 10118
  modified_base 1..8787: mod_base = OTHER; note = Each t is m1f
  source 1..8787: mol_type = other RNA

SEQ ID NO: 11716 - RNA, 8787 nt, synthetic construct; identical to SEQ ID NO: 10119
  modified_base 1..8787: mod_base = OTHER; note = Each t is m1f
  source 1..8787: mol_type = other RNA

SEQ ID NO: 11717 - RNA, 8787 nt, synthetic construct; identical to SEQ ID NO: 10120
  modified_base 1..8787: mod_base = OTHER; note = Each t is m1f
  source 1..8787: mol_type = other RNA

SEQ ID NO: 11718 - RNA, 8787 nt, synthetic construct; identical to SEQ ID NO: 10121
  modified_base 1..8787: mod_base = OTHER; note = Each t is m1f
  source 1..8787: mol_type = other RNA

SEQ ID NO: 11719 - RNA, 8787 nt, synthetic construct; identical to SEQ ID NO: 10122
  modified_base 1..8787: mod_base = OTHER; note = Each t is m1f
  source 1..8787: mol_type = other RNA

SEQ ID NO: 11720 - RNA, 8787 nt, synthetic construct; identical to SEQ ID NO: 10123
  modified_base 1..8787: mod_base = OTHER; note = Each t is m1f
  source 1..8787: mol_type = other RNA

SEQ ID NO: 11721 - RNA, 8787 nt, synthetic construct; identical to SEQ ID NO: 10124
  modified_base 1..8787: mod_base = OTHER; note = Each t is m1f
  source 1..8787: mol_type = other RNA

SEQ ID NO: 11722 - RNA, 8787 nt, synthetic construct; identical to SEQ ID NO: 10125
  modified_base 1..8787: mod_base = OTHER; note = Each t is m1f
  source 1..8787: mol_type = other RNA

SEQ ID NO: 11723 - RNA, 8787 nt, synthetic construct; identical to SEQ ID NO: 10126
  modified_base 1..8787: mod_base = OTHER; note = Each t is m1f
  source 1..8787: mol_type = other RNA

SEQ ID NO: 11724 - RNA, 8787 nt, synthetic construct; identical to SEQ ID NO: 10127
  modified_base 1..8787: mod_base = OTHER; note = Each t is m1f
  source 1..8787: mol_type = other RNA

SEQ ID NO: 11725 - RNA, 8787 nt, synthetic construct; identical to SEQ ID NO: 10128
  modified_base 1..8787: mod_base = OTHER; note = Each t is m1f
  source 1..8787: mol_type = other RNA

SEQ ID NO: 11726 - RNA, 8787 nt, synthetic construct; identical to SEQ ID NO: 10129
  modified_base 1..8787: mod_base = OTHER; note = Each t is m1f
  source 1..8787: mol_type = other RNA

SEQ ID NO: 11727 - RNA, 8787 nt, synthetic construct; identical to SEQ ID NO: 10130
  modified_base 1..8787: mod_base = OTHER; note = Each t is m1f
  source 1..8787: mol_type = other RNA

SEQ ID NO: 11728 - RNA, 8787 nt, synthetic construct; identical to SEQ ID NO: 10131
  modified_base 1..8787: mod_base = OTHER; note = Each t is m1f
  source 1..8787: mol_type = other RNA

SEQ ID NO: 11729 - RNA, 8787 nt, synthetic construct; identical to SEQ ID NO: 10132
  modified_base 1..8787: mod_base = OTHER; note = Each t is m1f
  source 1..8787: mol_type = other RNA

SEQ ID NO: 11730 - RNA, 8787 nt, synthetic construct; identical to SEQ ID NO: 10133
  modified_base 1..8787: mod_base = OTHER; note = Each t is m1f
  source 1..8787: mol_type = other RNA

SEQ ID NO: 11731 - RNA, 8787 nt, synthetic construct; identical to SEQ ID NO: 10134
  modified_base 1..8787: mod_base = OTHER; note = Each t is m1f
  source 1..8787: mol_type = other RNA

SEQ ID NO: 11732 - RNA, 8784 nt, synthetic construct; identical to SEQ ID NO: 10135
  modified_base 1..8784: mod_base = OTHER; note = Each t is m1f
  source 1..8784: mol_type = other RNA

SEQ ID NO: 11733 - RNA, 8787 nt, synthetic construct; identical to SEQ ID NO: 10136
  modified_base 1..8787: mod_base = OTHER; note = Each t is m1f
  source 1..8787: mol_type = other RNA

SEQ ID NO: 11734 - RNA, 8787 nt, synthetic construct; identical to SEQ ID NO: 10137
  modified_base 1..8787: mod_base = OTHER; note = Each t is m1f
  source 1..8787: mol_type = other RNA

SEQ ID NO: 11735 - RNA, 8787 nt, synthetic construct; identical to SEQ ID NO: 10138
  modified_base 1..8787: mod_base = OTHER; note = Each t is m1f
  source 1..8787: mol_type = other RNA

SEQ ID NO: 11736 - RNA, 8787 nt, synthetic construct; identical to SEQ ID NO: 10139
  modified_base 1..8787: mod_base = OTHER; note = Each t is m1f
  source 1..8787: mol_type = other RNA

SEQ ID NO: 11737 - RNA, 8787 nt, synthetic construct; identical to SEQ ID NO: 10140
  modified_base 1..8787: mod_base = OTHER; note = Each t is m1f
  source 1..8787: mol_type = other RNA

SEQ ID NO: 11738 - RNA, 8787 nt, synthetic construct; identical to SEQ ID NO: 10141
  modified_base 1..8787: mod_base = OTHER; note = Each t is m1f
  source 1..8787: mol_type = other RNA

SEQ ID NO: 11739 - RNA, 8787 nt, synthetic construct; identical to SEQ ID NO: 10142
  modified_base 1..8787: mod_base = OTHER; note = Each t is m1f
  source 1..8787: mol_type = other RNA

SEQ ID NO: 11740 - RNA, 8787 nt, synthetic construct; identical to SEQ ID NO: 10143
  modified_base 1..8787: mod_base = OTHER; note = Each t is m1f
  source 1..8787: mol_type = other RNA

SEQ ID NO: 11741 - RNA, 8787 nt, synthetic construct; identical to SEQ ID NO: 10144
  modified_base 1..8787: mod_base = OTHER; note = Each t is m1f
  source 1..8787: mol_type = other RNA

SEQ ID NO: 11742 - RNA, 8787 nt, synthetic construct; identical to SEQ ID NO: 10145
  modified_base 1..8787: mod_base = OTHER; note = Each t is m1f
  source 1..8787: mol_type = other RNA

SEQ ID NO: 11743 - RNA, 8787 nt, synthetic construct; identical to SEQ ID NO: 10146
  modified_base 1..8787: mod_base = OTHER; note = Each t is m1f
  source 1..8787: mol_type = other RNA

SEQ ID NO: 11744 - RNA, 8787 nt, synthetic construct; identical to SEQ ID NO: 10147
  modified_base 1..8787: mod_base = OTHER; note = Each t is m1f
  source 1..8787: mol_type = other RNA

SEQ ID NO: 11745 - RNA, 8787 nt, synthetic construct; identical to SEQ ID NO: 10148
  modified_base 1..8787: mod_base = OTHER; note = Each t is m1f
  source 1..8787: mol_type = other RNA

SEQ ID NO: 11746 - RNA, 8787 nt, synthetic construct; identical to SEQ ID NO: 10149
  modified_base 1..8787: mod_base = OTHER; note = Each t is m1f
  source 1..8787: mol_type = other RNA

SEQ ID NO: 11747 - RNA, 8787 nt, synthetic construct; identical to SEQ ID NO: 10150
  modified_base 1..8787: mod_base = OTHER; note = Each t is m1f
  source 1..8787: mol_type = other RNA

SEQ ID NO: 11748 - RNA, 8787 nt, synthetic construct; identical to SEQ ID NO: 10151
  modified_base 1..8787: mod_base = OTHER; note = Each t is m1f
  source 1..8787: mol_type = other RNA

SEQ ID NO: 11749 - RNA, 8787 nt, synthetic construct; identical to SEQ ID NO: 10152
  modified_base 1..8787: mod_base = OTHER; note = Each t is m1f
  source 1..8787: mol_type = other RNA

SEQ ID NO: 11750 - RNA, 8787 nt, synthetic construct; identical to SEQ ID NO: 10153
  modified_base 1..8787: mod_base = OTHER; note = Each t is m1f
  source 1..8787: mol_type = other RNA

SEQ ID NO: 11751 - RNA, 8787 nt, synthetic construct; identical to SEQ ID NO: 10154
  modified_base 1..8787: mod_base = OTHER; note = Each t is m1f
  source 1..8787: mol_type = other RNA

SEQ ID NO: 11752 - RNA, 8787 nt, synthetic construct; identical to SEQ ID NO: 10155
  modified_base 1..8787: mod_base = OTHER; note = Each t is m1f
  source 1..8787: mol_type = other RNA

SEQ ID NO: 11753 - RNA, 8787 nt, synthetic construct; identical to SEQ ID NO: 10156
  modified_base 1..8787: mod_base = OTHER; note = Each t is m1f
  source 1..8787: mol_type = other RNA

SEQ ID NO: 11754 - RNA, 8787 nt, synthetic construct; identical to SEQ ID NO: 10157
  modified_base 1..8787: mod_base = OTHER; note = Each t is m1f
  source 1..8787: mol_type = other RNA

SEQ ID NO: 11755 - RNA, 8787 nt, synthetic construct; identical to SEQ ID NO: 10158
  modified_base 1..8787: mod_base = OTHER; note = Each t is m1f
  source 1..8787: mol_type = other RNA

SEQ ID NO: 11756 - RNA, 8787 nt, synthetic construct; identical to SEQ ID NO: 10159
  modified_base 1..8787: mod_base = OTHER; note = Each t is m1f
  source 1..8787: mol_type = other RNA

SEQ ID NO: 11757 - RNA, 8787 nt, synthetic construct; identical to SEQ ID NO: 10160
  modified_base 1..8787: mod_base = OTHER; note = Each t is m1f
  source 1..8787: mol_type = other RNA

SEQ ID NO: 11758 - RNA, 8787 nt, synthetic construct; identical to SEQ ID NO: 10161
  modified_base 1..8787: mod_base = OTHER; note = Each t is m1f
  source 1..8787: mol_type = other RNA

SEQ ID NO: 11759 - RNA, 8787 nt, synthetic construct; identical to SEQ ID NO: 10162
  modified_base 1..8787: mod_base = OTHER; note = Each t is m1f
  source 1..8787: mol_type = other RNA

SEQ ID NO: 11760 - RNA, 8787 nt, synthetic construct; identical to SEQ ID NO: 10163
  modified_base 1..8787: mod_base = OTHER; note = Each t is m1f
  source 1..8787: mol_type = other RNA

SEQ ID NO: 11761 - RNA, 8787 nt, synthetic construct; identical to SEQ ID NO: 10164
  modified_base 1..8787: mod_base = OTHER; note = Each t is m1f
  source 1..8787: mol_type = other RNA

SEQ ID NO: 11762 - RNA, 8787 nt, synthetic construct; identical to SEQ ID NO: 10165
  modified_base 1..8787: mod_base = OTHER; note = Each t is m1f
  source 1..8787: mol_type = other RNA

SEQ ID NO: 11763 - RNA, 8787 nt, synthetic construct; identical to SEQ ID NO: 10166
  modified_base 1..8787: mod_base = OTHER; note = Each t is m1f
  source 1..8787: mol_type = other RNA

SEQ ID NO: 11764 - RNA, 8787 nt, synthetic construct; identical to SEQ ID NO: 10167
  modified_base 1..8787: mod_base = OTHER; note = Each t is m1f
  source 1..8787: mol_type = other RNA

SEQ ID NO: 11765 - RNA, 8787 nt, synthetic construct; identical to SEQ ID NO: 10168
  modified_base 1..8787: mod_base = OTHER; note = Each t is m1f
  source 1..8787: mol_type = other RNA

SEQ ID NO: 11766 - RNA, 8787 nt, synthetic construct; identical to SEQ ID NO: 10169
  modified_base 1..8787: mod_base = OTHER; note = Each t is m1f
  source 1..8787: mol_type = other RNA

SEQ ID NO: 11767 - RNA, 8787 nt, synthetic construct; identical to SEQ ID NO: 10170
  modified_base 1..8787: mod_base = OTHER; note = Each t is m1f
  source 1..8787: mol_type = other RNA

SEQ ID NO: 11768 - RNA, 8787 nt, synthetic construct; identical to SEQ ID NO: 10171
  modified_base 1..8787: mod_base = OTHER; note = Each t is m1f
  source 1..8787: mol_type = other RNA

SEQ ID NO: 11769 - RNA, 8787 nt, synthetic construct; identical to SEQ ID NO: 10172
  modified_base 1..8787: mod_base = OTHER; note = Each t is m1f
  source 1..8787: mol_type = other RNA

SEQ ID NO: 11770 - RNA, 8787 nt, synthetic construct; identical to SEQ ID NO: 10173
  modified_base 1..8787: mod_base = OTHER; note = Each t is m1f
  source 1..8787: mol_type = other RNA

SEQ ID NO: 11771 - RNA, 8787 nt, synthetic construct; identical to SEQ ID NO: 10174
  modified_base 1..8787: mod_base = OTHER; note = Each t is m1f
  source 1..8787: mol_type = other RNA

SEQ ID NO: 11772 - RNA, 8787 nt, synthetic construct; identical to SEQ ID NO: 10175
  modified_base 1..8787: mod_base = OTHER; note = Each t is m1f
  source 1..8787: mol_type = other RNA

SEQ ID NO: 11773 - RNA, 8787 nt, synthetic construct; identical to SEQ ID NO: 10176
  modified_base 1..8787: mod_base = OTHER; note = Each t is m1f
  source 1..8787: mol_type = other RNA

SEQ ID NO: 11774 - RNA, 8787 nt, synthetic construct; identical to SEQ ID NO: 10177
  modified_base 1..8787: mod_base = OTHER; note = Each t is m1f
  source 1..8787: mol_type = other RNA

SEQ ID NO: 11775 - RNA, 8787 nt, synthetic construct; identical to SEQ ID NO: 10178
  modified_base 1..8787: mod_base = OTHER; note = Each t is m1f
  source 1..8787: mol_type = other RNA

SEQ ID NO: 11776 - RNA, 8787 nt, synthetic construct; identical to SEQ ID NO: 10179
  modified_base 1..8787: mod_base = OTHER; note = Each t is m1f
  source 1..8787: mol_type = other RNA

SEQ ID NO: 11777 - RNA, 8787 nt, synthetic construct; identical to SEQ ID NO: 10180
  modified_base 1..8787: mod_base = OTHER; note = Each t is m1f
  source 1..8787: mol_type = other RNA

SEQ ID NO: 11778 - RNA, 8787 nt, synthetic construct; identical to SEQ ID NO: 10181
  modified_base 1..8787: mod_base = OTHER; note = Each t is m1f
  source 1..8787: mol_type = other RNA

SEQ ID NO: 11779 - RNA, 8787 nt, synthetic construct; identical to SEQ ID NO: 10182
  modified_base 1..8787: mod_base = OTHER; note = Each t is m1f
  source 1..8787: mol_type = other RNA

SEQ ID NO: 11780 - RNA, 8787 nt, synthetic construct; identical to SEQ ID NO: 10183
  modified_base 1..8787: mod_base = OTHER; note = Each t is m1f
  source 1..8787: mol_type = other RNA

SEQ ID NO: 11781 - RNA, 8787 nt, synthetic construct; identical to SEQ ID NO: 10184
  modified_base 1..8787: mod_base = OTHER; note = Each t is m1f
  source 1..8787: mol_type = other RNA

SEQ ID NO: 11782 - RNA, 8787 nt, synthetic construct; identical to SEQ ID NO: 10185
  modified_base 1..8787: mod_base = OTHER; note = Each t is m1f
  source 1..8787: mol_type = other RNA

SEQ ID NO: 11783 - RNA, 8787 nt, synthetic construct; identical to SEQ ID NO: 10186
  modified_base 1..8787: mod_base = OTHER; note = Each t is m1f
  source 1..8787: mol_type = other RNA

SEQ ID NO: 11784 - RNA, 8784 nt, synthetic construct; identical to SEQ ID NO: 10187
  modified_base 1..8784: mod_base = OTHER; note = Each t is m1f
  source 1..8784: mol_type = other RNA

SEQ ID NO: 11785 - RNA, 8787 nt, synthetic construct; identical to SEQ ID NO: 10188
  modified_base 1..8787: mod_base = OTHER; note = Each t is m1f
  source 1..8787: mol_type = other RNA

SEQ ID NO: 11786 - RNA, 8787 nt, synthetic construct; identical to SEQ ID NO: 10189
  modified_base 1..8787: mod_base = OTHER; note = Each t is m1f
  source 1..8787: mol_type = other RNA

SEQ ID NO: 11787 - RNA, 8787 nt, synthetic construct; identical to SEQ ID NO: 10190
  modified_base 1..8787: mod_base = OTHER; note = Each t is m1f
  source 1..8787: mol_type = other RNA

SEQ ID NO: 11788 - RNA, 8787 nt, synthetic construct; identical to SEQ ID NO: 10191
  modified_base 1..8787: mod_base = OTHER; note = Each t is m1f
  source 1..8787: mol_type = other RNA

SEQ ID NO: 11789 - RNA, 8787 nt, synthetic construct; identical to SEQ ID NO: 10192
  modified_base 1..8787: mod_base = OTHER; note = Each t is m1f
  source 1..8787: mol_type = other RNA

SEQ ID NO: 11790 - RNA, 8787 nt, synthetic construct; identical to SEQ ID NO: 10193
  modified_base 1..8787: mod_base = OTHER; note = Each t is m1f
  source 1..8787: mol_type = other RNA

SEQ ID NO: 11791 - RNA, 8787 nt, synthetic construct; identical to SEQ ID NO: 10194
  modified_base 1..8787: mod_base = OTHER; note = Each t is m1f
  source 1..8787: mol_type = other RNA

SEQ ID NO: 11792 - RNA, 8787 nt, synthetic construct; identical to SEQ ID NO: 10195
  modified_base 1..8787: mod_base = OTHER; note = Each t is m1f
  source 1..8787: mol_type = other RNA

SEQ ID NO: 11793 - RNA, 8787 nt, synthetic construct; identical to SEQ ID NO: 10196
  modified_base 1..8787: mod_base = OTHER; note = Each t is m1f
  source 1..8787: mol_type = other RNA

SEQ ID NO: 11794 - RNA, 8787 nt, synthetic construct; identical to SEQ ID NO: 10197
  modified_base 1..8787: mod_base = OTHER; note = Each t is m1f
  source 1..8787: mol_type = other RNA

SEQ ID NO: 11795 - RNA, 8787 nt, synthetic construct; identical to SEQ ID NO: 10198
  modified_base 1..8787: mod_base = OTHER; note = Each t is m1f
  source 1..8787: mol_type = other RNA

SEQ ID NO: 11796 - RNA, 8787 nt, synthetic construct; identical to SEQ ID NO: 10199
  modified_base 1..8787: mod_base = OTHER; note = Each t is m1f
  source 1..8787: mol_type = other RNA

SEQ ID NO: 11797 - RNA, 8787 nt, synthetic construct; identical to SEQ ID NO: 10200
  modified_base 1..8787: mod_base = OTHER; note = Each t is m1f
  source 1..8787: mol_type = other RNA

SEQ ID NO: 11798 - RNA, 8787 nt, synthetic construct; identical to SEQ ID NO: 10201
  modified_base 1..8787: mod_base = OTHER; note = Each t is m1f
  source 1..8787: mol_type = other RNA

SEQ ID NO: 11799 - RNA, 8787 nt, synthetic construct; identical to SEQ ID NO: 10202
  modified_base 1..8787: mod_base = OTHER; note = Each t is m1f
  source 1..8787: mol_type = other RNA

SEQ ID NO: 11800 - RNA, 8787 nt, synthetic construct; identical to SEQ ID NO: 10203
  modified_base 1..8787: mod_base = OTHER; note = Each t is m1f
  source 1..8787: mol_type = other RNA

SEQ ID NO: 11801 - RNA, 8787 nt, synthetic construct; identical to SEQ ID NO: 10204
  modified_base 1..8787: mod_base = OTHER; note = Each t is m1f
  source 1..8787: mol_type = other RNA

SEQ ID NO: 11802 - RNA, 8787 nt, synthetic construct; identical to SEQ ID NO: 10205
  modified_base 1..8787: mod_base = OTHER; note = Each t is m1f
  source 1..8787: mol_type = other RNA

SEQ ID NO: 11803 - RNA, 8787 nt, synthetic construct; identical to SEQ ID NO: 10206
  modified_base 1..8787: mod_base = OTHER; note = Each t is m1f
  source 1..8787: mol_type = other RNA

SEQ ID NO: 11804 - RNA, 8787 nt, synthetic construct; identical to SEQ ID NO: 10207
  modified_base 1..8787: mod_base = OTHER; note = Each t is m1f
  source 1..8787: mol_type = other RNA

SEQ ID NO: 11805 - RNA, 8787 nt, synthetic construct; identical to SEQ ID NO: 10208
  modified_base 1..8787: mod_base = OTHER; note = Each t is m1f
  source 1..8787: mol_type = other RNA

SEQ ID NO: 11806 - RNA, 8787 nt, synthetic construct; identical to SEQ ID NO: 10209
  modified_base 1..8787: mod_base = OTHER; note = Each t is m1f
  source 1..8787: mol_type = other RNA

SEQ ID NO: 11807 - RNA, 8787 nt, synthetic construct; identical to SEQ ID NO: 10210
  modified_base 1..8787: mod_base = OTHER; note = Each t is m1f
  source 1..8787: mol_type = other RNA

SEQ ID NO: 11808 - RNA, 8787 nt, synthetic construct; identical to SEQ ID NO: 10211
  modified_base 1..8787: mod_base = OTHER; note = Each t is m1f
  source 1..8787: mol_type = other RNA

SEQ ID NO: 11809 - RNA, 8787 nt, synthetic construct; identical to SEQ ID NO: 10212
  modified_base 1..8787: mod_base = OTHER; note = Each t is m1f
  source 1..8787: mol_type = other RNA

SEQ ID NO: 11810 - RNA, 8787 nt, synthetic construct; identical to SEQ ID NO: 10213
  modified_base 1..8787: mod_base = OTHER; note = Each t is m1f
  source 1..8787: mol_type = other RNA

SEQ ID NO: 11811 - RNA, 8787 nt, synthetic construct; identical to SEQ ID NO: 10214
  modified_base 1..8787: mod_base = OTHER; note = Each t is m1f
  source 1..8787: mol_type = other RNA

SEQ ID NO: 11812 - RNA, 8787 nt, synthetic construct; identical to SEQ ID NO: 10215
  modified_base 1..8787: mod_base = OTHER; note = Each t is m1f
  source 1..8787: mol_type = other RNA

SEQ ID NO: 11813 - RNA, 8787 nt, synthetic construct; identical to SEQ ID NO: 10216
  modified_base 1..8787: mod_base = OTHER; note = Each t is m1f
  source 1..8787: mol_type = other RNA

SEQ ID NO: 11814 - RNA, 8787 nt, synthetic construct; identical to SEQ ID NO: 10217
  modified_base 1..8787: mod_base = OTHER; note = Each t is m1f
  source 1..8787: mol_type = other RNA

SEQ ID NO: 11815 - RNA, 8787 nt, synthetic construct; identical to SEQ ID NO: 10218
  modified_base 1..8787: mod_base = OTHER; note = Each t is m1f
  source 1..8787: mol_type = other RNA

SEQ ID NO: 11816 - RNA, 8787 nt, synthetic construct; identical to SEQ ID NO: 10219
  modified_base 1..8787: mod_base = OTHER; note = Each t is m1f
  source 1..8787: mol_type = other RNA

SEQ ID NO: 11817 - RNA, 8787 nt, synthetic construct; identical to SEQ ID NO: 10220
  modified_base 1..8787: mod_base = OTHER; note = Each t is m1f
  source 1..8787: mol_type = other RNA

SEQ ID NO: 11818 - RNA, 8787 nt, synthetic construct; identical to SEQ ID NO: 10221
  modified_base 1..8787: mod_base = OTHER; note = Each t is m1f
  source 1..8787: mol_type = other RNA

SEQ ID NO: 11819 - RNA, 8787 nt, synthetic construct; identical to SEQ ID NO: 10222
  modified_base 1..8787: mod_base = OTHER; note = Each t is m1f
  source 1..8787: mol_type = other RNA

SEQ ID NO: 11820 - RNA, 8787 nt, synthetic construct; identical to SEQ ID NO: 10223
  modified_base 1..8787: mod_base = OTHER; note = Each t is m1f
  source 1..8787: mol_type = other RNA

SEQ ID NO: 11821 - RNA, 8787 nt, synthetic construct; identical to SEQ ID NO: 10224
  modified_base 1..8787: mod_base = OTHER; note = Each t is m1f
  source 1..8787: mol_type = other RNA

SEQ ID NO: 11822 - RNA, 8787 nt, synthetic construct; identical to SEQ ID NO: 10225
  modified_base 1..8787: mod_base = OTHER; note = Each t is m1f
  source 1..8787: mol_type = other RNA

SEQ ID NO: 11823 - RNA, 8793 nt, synthetic construct; identical to SEQ ID NO: 10226
  modified_base 1..8793: mod_base = OTHER; note = Each t is m1f
  source 1..8793: mol_type = other RNA

SEQ ID NO: 11824 - RNA, 8787 nt, synthetic construct; identical to SEQ ID NO: 10227
  modified_base 1..8787: mod_base = OTHER; note = Each t is m1f
  source 1..8787: mol_type = other RNA

SEQ ID NO: 11825 - RNA, 8787 nt, synthetic construct; identical to SEQ ID NO: 10228
  modified_base 1..8787: mod_base = OTHER; note = Each t is m1f
  source 1..8787: mol_type = other RNA

SEQ ID NO: 11826 - RNA, 8787 nt, synthetic construct; identical to SEQ ID NO: 10229
  modified_base 1..8787: mod_base = OTHER; note = Each t is m1f
  source 1..8787: mol_type = other RNA

SEQ ID NO: 11827 - RNA, 8787 nt, synthetic construct; identical to SEQ ID NO: 10230
  modified_base 1..8787: mod_base = OTHER; note = Each t is m1f
  source 1..8787: mol_type = other RNA

SEQ ID NO: 11828 - RNA, 8787 nt, synthetic construct; identical to SEQ ID NO: 10231
  modified_base 1..8787: mod_base = OTHER; note = Each t is m1f
  source 1..8787: mol_type = other RNA

SEQ ID NO: 11829 - RNA, 8787 nt, synthetic construct; identical to SEQ ID NO: 10232
  modified_base 1..8787: mod_base = OTHER; note = Each t is m1f
  source 1..8787: mol_type = other RNA

SEQ ID NO: 11830 - RNA, 8787 nt, synthetic construct; identical to SEQ ID NO: 10233
  modified_base 1..8787: mod_base = OTHER; note = Each t is m1f
  source 1..8787: mol_type = other RNA

SEQ ID NO: 11831 - RNA, 8787 nt, synthetic construct; identical to SEQ ID NO: 10234
  modified_base 1..8787: mod_base = OTHER; note = Each t is m1f
  source 1..8787: mol_type = other RNA

SEQ ID NO: 11832 - RNA, 8787 nt, synthetic construct; identical to SEQ ID NO: 10235
  modified_base 1..8787: mod_base = OTHER; note = Each t is m1f
  source 1..8787: mol_type = other RNA

SEQ ID NO: 11833 - RNA, 8787 nt, synthetic construct; identical to SEQ ID NO: 10236
  modified_base 1..8787: mod_base = OTHER; note = Each t is m1f
  source 1..8787: mol_type = other RNA

SEQ ID NO: 11834 - RNA, 8787 nt, synthetic construct; identical to SEQ ID NO: 10237
  modified_base 1..8787: mod_base = OTHER; note = Each t is m1f
  source 1..8787: mol_type = other RNA

SEQ ID NO: 11835 - RNA, 8787 nt, synthetic construct; identical to SEQ ID NO: 10238
  modified_base 1..8787: mod_base = OTHER; note = Each t is m1f
  source 1..8787: mol_type = other RNA

SEQ ID NO: 11836 - RNA, 8787 nt, synthetic construct; identical to SEQ ID NO: 10239
  modified_base 1..8787: mod_base = OTHER; note = Each t is m1f
  source 1..8787: mol_type = other RNA

SEQ ID NO: 11837 - RNA, 8787 nt, synthetic construct; identical to SEQ ID NO: 10240
  modified_base 1..8787: mod_base = OTHER; note = Each t is m1f
  source 1..8787: mol_type = other RNA

SEQ ID NO: 11838 - RNA, 8787 nt, synthetic construct; identical to SEQ ID NO: 10241
  modified_base 1..8787: mod_base = OTHER; note = Each t is m1f
  source 1..8787: mol_type = other RNA

SEQ ID NO: 11839 - RNA, 8784 nt, synthetic construct; identical to SEQ ID NO: 10242
  modified_base 1..8784: mod_base = OTHER; note = Each t is m1f
  source 1..8784: mol_type = other RNA

SEQ ID NO: 11840 - RNA, 8787 nt, synthetic construct; identical to SEQ ID NO: 10243
  modified_base 1..8787: mod_base = OTHER; note = Each t is m1f
  source 1..8787: mol_type = other RNA

SEQ ID NO: 11841 - RNA, 8787 nt, synthetic construct; identical to SEQ ID NO: 10244
  modified_base 1..8787: mod_base = OTHER; note = Each t is m1f
  source 1..8787: mol_type = other RNA

SEQ ID NO: 11842 - RNA, 8787 nt, synthetic construct; identical to SEQ ID NO: 10245
  modified_base 1..8787: mod_base = OTHER; note = Each t is m1f
  source 1..8787: mol_type = other RNA

SEQ ID NO: 11843 - RNA, 8787 nt, synthetic construct; identical to SEQ ID NO: 10246
  modified_base 1..8787: mod_base = OTHER; note = Each t is m1f
  source 1..8787: mol_type = other RNA

SEQ ID NO: 11844 - RNA, 8787 nt, synthetic construct; identical to SEQ ID NO: 10247
  modified_base 1..8787: mod_base = OTHER; note = Each t is m1f
  source 1..8787: mol_type = other RNA

SEQ ID NO: 11845 - RNA, 8787 nt, synthetic construct; identical to SEQ ID NO: 10248
  modified_base 1..8787: mod_base = OTHER; note = Each t is m1f
  source 1..8787: mol_type = other RNA

SEQ ID NO: 11846 - RNA, 8787 nt, synthetic construct; identical to SEQ ID NO: 10249
  modified_base 1..8787: mod_base = OTHER; note = Each t is m1f
  source 1..8787: mol_type = other RNA

SEQ ID NO: 11847 - RNA, 8787 nt, synthetic construct; identical to SEQ ID NO: 10250
  modified_base 1..8787: mod_base = OTHER; note = Each t is m1f
  source 1..8787: mol_type = other RNA

SEQ ID NO: 11848 - RNA, 8823 nt, synthetic construct; identical to SEQ ID NO: 10251
  modified_base 1..8823: mod_base = OTHER; note = Each t is m1f
  source 1..8823: mol_type = other RNA

SEQ ID NO: 11849 - RNA, 8787 nt, synthetic construct; identical to SEQ ID NO: 10252
  modified_base 1..8787: mod_base = OTHER; note = Each t is m1f
  source 1..8787: mol_type = other RNA

SEQ ID NO: 11850 - RNA, 8787 nt, synthetic construct; identical to SEQ ID NO: 10253
  modified_base 1..8787: mod_base = OTHER; note = Each t is m1f
  source 1..8787: mol_type = other RNA

SEQ ID NO: 11851 - RNA, 8787 nt, synthetic construct; identical to SEQ ID NO: 10254
  modified_base 1..8787: mod_base = OTHER; note = Each t is m1f
  source 1..8787: mol_type = other RNA

SEQ ID NO: 11852 - RNA, 8787 nt, synthetic construct; identical to SEQ ID NO: 10255
  modified_base 1..8787: mod_base = OTHER; note = Each t is m1f
  source 1..8787: mol_type = other RNA

SEQ ID NO: 11853 - RNA, 8787 nt, synthetic construct; identical to SEQ ID NO: 10256
  modified_base 1..8787: mod_base = OTHER; note = Each t is m1f
  source 1..8787: mol_type = other RNA

SEQ ID NO: 11854 - RNA, 8787 nt, synthetic construct; identical to SEQ ID NO: 10257
  modified_base 1..8787: mod_base = OTHER; note = Each t is m1f
  source 1..8787: mol_type = other RNA

SEQ ID NO: 11855 - RNA, 8787 nt, synthetic construct; identical to SEQ ID NO: 10258
  modified_base 1..8787: mod_base = OTHER; note = Each t is m1f
  source 1..8787: mol_type = other RNA

SEQ ID NO: 11856 - RNA, 8787 nt, synthetic construct; identical to SEQ ID NO: 10259
  modified_base 1..8787: mod_base = OTHER; note = Each t is m1f
  source 1..8787: mol_type = other RNA

SEQ ID NO: 11857 - RNA, 8787 nt, synthetic construct; identical to SEQ ID NO: 10260
  modified_base 1..8787: mod_base = OTHER; note = Each t is m1f
  source 1..8787: mol_type = other RNA

SEQ ID NO: 11858 - RNA, 8787 nt, synthetic construct; identical to SEQ ID NO: 10261
  modified_base 1..8787: mod_base = OTHER; note = Each t is m1f
  source 1..8787: mol_type = other RNA

SEQ ID NO: 11859 - RNA, 8886 nt, synthetic construct; identical to SEQ ID NO: 10262
  modified_base 1..8886: mod_base = OTHER; note = Each t is m1f
  source 1..8886: mol_type = other RNA

SEQ ID NO: 11860 - RNA, 8787 nt, synthetic construct; identical to SEQ ID NO: 10263
  modified_base 1..8787: mod_base = OTHER; note = Each t is m1f
  source 1..8787: mol_type = other RNA

SEQ ID NO: 11861 - RNA, 8787 nt, synthetic construct; identical to SEQ ID NO: 10264
  modified_base 1..8787: mod_base = OTHER; note = Each t is m1f
  source 1..8787: mol_type = other RNA

SEQ ID NO: 11862 - RNA, 8787 nt, synthetic construct; identical to SEQ ID NO: 10265
  modified_base 1..8787: mod_base = OTHER; note = Each t is m1f
  source 1..8787: mol_type = other RNA

SEQ ID NO: 11863 - RNA, 8787 nt, synthetic construct; identical to SEQ ID NO: 10266
  modified_base 1..8787: mod_base = OTHER; note = Each t is m1f
  source 1..8787: mol_type = other RNA

SEQ ID NO: 11864 - RNA, 8787 nt, synthetic construct; identical to SEQ ID NO: 10267
  modified_base 1..8787: mod_base = OTHER; note = Each t is m1f
  source 1..8787: mol_type = other RNA

SEQ ID NO: 11865 - RNA, 8787 nt, synthetic construct; identical to SEQ ID NO: 10268
  modified_base 1..8787: mod_base = OTHER; note = Each t is m1f
  source 1..8787: mol_type = other RNA

SEQ ID NO: 11866 - RNA, 8787 nt, synthetic construct; identical to SEQ ID NO: 10269
  modified_base 1..8787: mod_base = OTHER; note = Each t is m1f
  source 1..8787: mol_type = other RNA

SEQ ID NO: 11867 - RNA, 8787 nt, synthetic construct; identical to SEQ ID NO: 10270
  modified_base 1..8787: mod_base = OTHER; note = Each t is m1f
  source 1..8787: mol_type = other RNA

SEQ ID NO: 11868 - RNA, 8787 nt, synthetic construct; identical to SEQ ID NO: 10271
  modified_base 1..8787: mod_base = OTHER; note = Each t is m1f
  source 1..8787: mol_type = other RNA

SEQ ID NO: 11869 - RNA, 8787 nt, synthetic construct; identical to SEQ ID NO: 10272
  modified_base 1..8787: mod_base = OTHER; note = Each t is m1f
  source 1..8787: mol_type = other RNA

SEQ ID NO: 11870 - RNA, 8787 nt, synthetic construct; identical to SEQ ID NO: 10273
  modified_base 1..8787: mod_base = OTHER; note = Each t is m1f
  source 1..8787: mol_type = other RNA

SEQ ID NO: 11871 - RNA, 8787 nt, synthetic construct; identical to SEQ ID NO: 10274
  modified_base 1..8787: mod_base = OTHER; note = Each t is m1f
  source 1..8787: mol_type = other RNA

SEQ ID NO: 11872 - RNA, 8787 nt, synthetic construct; identical to SEQ ID NO: 10275
  modified_base 1..8787: mod_base = OTHER; note = Each t is m1f
  source 1..8787: mol_type = other RNA

SEQ ID NO: 11873 - RNA, 8787 nt, synthetic construct; identical to SEQ ID NO: 10276
  modified_base 1..8787: mod_base = OTHER; note = Each t is m1f
  source 1..8787: mol_type = other RNA

SEQ ID NO: 11874 - RNA, 8787 nt, synthetic construct; identical to SEQ ID NO: 10277
  modified_base 1..8787: mod_base = OTHER; note = Each t is m1f
  source 1..8787: mol_type = other RNA

SEQ ID NO: 11875 - RNA, 8787 nt, synthetic construct; identical to SEQ ID NO: 10278
  modified_base 1..8787: mod_base = OTHER; note = Each t is m1f
  source 1..8787: mol_type = other RNA

SEQ ID NO: 11876 - RNA, 8784 nt, synthetic construct; identical to SEQ ID NO: 10279
  modified_base 1..8784: mod_base = OTHER; note = Each t is m1f
  source 1..8784: mol_type = other RNA

SEQ ID NO: 11877 - RNA, 8787 nt, synthetic construct; identical to SEQ ID NO: 10280
  modified_base 1..8787: mod_base = OTHER; note = Each t is m1f
  source 1..8787: mol_type = other RNA

SEQ ID NO: 11878 - RNA, 8787 nt, synthetic construct; identical to SEQ ID NO: 10281
  modified_base 1..8787: mod_base = OTHER; note = Each t is m1f
  source 1..8787: mol_type = other RNA

SEQ ID NO: 11879 - RNA, 8787 nt, synthetic construct; identical to SEQ ID NO: 10282
  modified_base 1..8787: mod_base = OTHER; note = Each t is m1f
  source 1..8787: mol_type = other RNA

SEQ ID NO: 11880 - RNA, 8787 nt, synthetic construct; identical to SEQ ID NO: 10283
  modified_base 1..8787: mod_base = OTHER; note = Each t is m1f
  source 1..8787: mol_type = other RNA

SEQ ID NO: 11881 - RNA, 8787 nt, synthetic construct; identical to SEQ ID NO: 10284
  modified_base 1..8787: mod_base = OTHER; note = Each t is m1f
  source 1..8787: mol_type = other RNA

SEQ ID NO: 11882 - RNA, 8787 nt, synthetic construct; identical to SEQ ID NO: 10285
  modified_base 1..8787: mod_base = OTHER; note = Each t is m1f
  source 1..8787: mol_type = other RNA

SEQ ID NO: 11883 - RNA, 8787 nt, synthetic construct; identical to SEQ ID NO: 10286
  modified_base 1..8787: mod_base = OTHER; note = Each t is m1f
  source 1..8787: mol_type = other RNA

SEQ ID NO: 11884 - RNA, 8787 nt, synthetic construct; identical to SEQ ID NO: 10287
  modified_base 1..8787: mod_base = OTHER; note = Each t is m1f
  source 1..8787: mol_type = other RNA

SEQ ID NO: 11885 - RNA, 8787 nt, synthetic construct; identical to SEQ ID NO: 10288
  modified_base 1..8787: mod_base = OTHER; note = Each t is m1f
  source 1..8787: mol_type = other RNA

SEQ ID NO: 11886 - RNA, 8787 nt, synthetic construct; identical to SEQ ID NO: 10289
  modified_base 1..8787: mod_base = OTHER; note = Each t is m1f
  source 1..8787: mol_type = other RNA

SEQ ID NO: 11887 - RNA, 8787 nt, synthetic construct; identical to SEQ ID NO: 10290
  modified_base 1..8787: mod_base = OTHER; note = Each t is m1f
  source 1..8787: mol_type = other RNA

SEQ ID NO: 11888 - RNA, 8787 nt, synthetic construct; identical to SEQ ID NO: 10291
  modified_base 1..8787: mod_base = OTHER; note = Each t is m1f
  source 1..8787: mol_type = other RNA

SEQ ID NO: 11889 - RNA, 8787 nt, synthetic construct; identical to SEQ ID NO: 10292
  modified_base 1..8787: mod_base = OTHER; note = Each t is m1f
  source 1..8787: mol_type = other RNA

SEQ ID NO: 11890 - RNA, 8787 nt, synthetic construct; identical to SEQ ID NO: 10293
  modified_base 1..8787: mod_base = OTHER; note = Each t is m1f
  source 1..8787: mol_type = other RNA

SEQ ID NO: 11891 - RNA, 8787 nt, synthetic construct; identical to SEQ ID NO: 10294
  modified_base 1..8787: mod_base = OTHER; note = Each t is m1f
  source 1..8787: mol_type = other RNA

SEQ ID NO: 11892 - RNA, 8787 nt, synthetic construct; identical to SEQ ID NO: 10295
  modified_base 1..8787: mod_base = OTHER; note = Each t is m1f
  source 1..8787: mol_type = other RNA

SEQ ID NO: 11893 - RNA, 8787 nt, synthetic construct; identical to SEQ ID NO: 10296
  modified_base 1..8787: mod_base = OTHER; note = Each t is m1f
  source 1..8787: mol_type = other RNA

SEQ ID NO: 11894 - RNA, 8787 nt, synthetic construct; identical to SEQ ID NO: 10297
  modified_base 1..8787: mod_base = OTHER; note = Each t is m1f
  source 1..8787: mol_type = other RNA

SEQ ID NO: 11895 - RNA, 8787 nt, synthetic construct; identical to SEQ ID NO: 10298
  modified_base 1..8787: mod_base = OTHER; note = Each t is m1f
  source 1..8787: mol_type = other RNA

SEQ ID NO: 11896 - RNA, 8787 nt, synthetic construct; identical to SEQ ID NO: 10299
  modified_base 1..8787: mod_base = OTHER; note = Each t is m1f
  source 1..8787: mol_type = other RNA

SEQ ID NO: 11897 - RNA, 8787 nt, synthetic construct; identical to SEQ ID NO: 10300
  modified_base 1..8787: mod_base = OTHER; note = Each t is m1f
  source 1..8787: mol_type = other RNA

SEQ ID NO: 11898 - RNA, 8787 nt, synthetic construct; identical to SEQ ID NO: 10301
  modified_base 1..8787: mod_base = OTHER; note = Each t is m1f
  source 1..8787: mol_type = other RNA

SEQ ID NO: 11899 - RNA, 8787 nt, synthetic construct; identical to SEQ ID NO: 10302
  modified_base 1..8787: mod_base = OTHER; note = Each t is m1f
  source 1..8787: mol_type = other RNA

SEQ ID NO: 11900 - RNA, 8787 nt, synthetic construct; identical to SEQ ID NO: 10303
  modified_base 1..8787: mod_base = OTHER; note = Each t is m1f
  source 1..8787: mol_type = other RNA

SEQ ID NO: 11901 - RNA, 8787 nt, synthetic construct; identical to SEQ ID NO: 10304
  modified_base 1..8787: mod_base = OTHER; note = Each t is m1f
  source 1..8787: mol_type = other RNA

SEQ ID NO: 11902 - RNA, 8787 nt, synthetic construct; identical to SEQ ID NO: 10305
  modified_base 1..8787: mod_base = OTHER; note = Each t is m1f
  source 1..8787: mol_type = other RNA

SEQ ID NO: 11903 - RNA, 8787 nt, synthetic construct; identical to SEQ ID NO: 10306
  modified_base 1..8787: mod_base = OTHER; note = Each t is m1f
  source 1..8787: mol_type = other RNA

SEQ ID NO: 11904 - RNA, 8787 nt, synthetic construct; identical to SEQ ID NO: 10307
  modified_base 1..8787: mod_base = OTHER; note = Each t is m1f
  source 1..8787: mol_type = other RNA

SEQ ID NO: 11905 - RNA, 8787 nt, synthetic construct; identical to SEQ ID NO: 10308
  modified_base 1..8787: mod_base = OTHER; note = Each t is m1f
  source 1..8787: mol_type = other RNA

SEQ ID NO: 11906 - RNA, 8787 nt, synthetic construct; identical to SEQ ID NO: 10309
  modified_base 1..8787: mod_base = OTHER; note = Each t is m1f
  source 1..8787: mol_type = other RNA

SEQ ID NO: 11907 - RNA, 8787 nt, synthetic construct; identical to SEQ ID NO: 10310
  modified_base 1..8787: mod_base = OTHER; note = Each t is m1f
  source 1..8787: mol_type = other RNA

SEQ ID NO: 11908 - RNA, 8787 nt, synthetic construct; identical to SEQ ID NO: 10311
  modified_base 1..8787: mod_base = OTHER; note = Each t is m1f
  source 1..8787: mol_type = other RNA

SEQ ID NO: 11909 - RNA, 8787 nt, synthetic construct; identical to SEQ ID NO: 10312
  modified_base 1..8787: mod_base = OTHER; note = Each t is m1f
  source 1..8787: mol_type = other RNA

SEQ ID NO: 11910 - RNA, 8787 nt, synthetic construct; identical to SEQ ID NO: 10313
  modified_base 1..8787: mod_base = OTHER; note = Each t is m1f
  source 1..8787: mol_type = other RNA

SEQ ID NO: 11911 - RNA, 8787 nt, synthetic construct; identical to SEQ ID NO: 10314
  modified_base 1..8787: mod_base = OTHER; note = Each t is m1f
  source 1..8787: mol_type = other RNA

SEQ ID NO: 11912 - RNA, 8787 nt, synthetic construct; identical to SEQ ID NO: 10315
  modified_base 1..8787: mod_base = OTHER; note = Each t is m1f
  source 1..8787: mol_type = other RNA

SEQ ID NO: 11913 - RNA, 8787 nt, synthetic construct; identical to SEQ ID NO: 10316
  modified_base 1..8787: mod_base = OTHER; note = Each t is m1f
  source 1..8787: mol_type = other RNA

SEQ ID NO: 11914 - RNA, 8787 nt, synthetic construct; identical to SEQ ID NO: 10317
  modified_base 1..8787: mod_base = OTHER; note = Each t is m1f
  source 1..8787: mol_type = other RNA

SEQ ID NO: 11915 - RNA, 8805 nt, synthetic construct; identical to SEQ ID NO: 10318
  modified_base 1..8805: mod_base = OTHER; note = Each t is m1f
  source 1..8805: mol_type = other RNA

SEQ ID NO: 11916 - RNA, 8787 nt, synthetic construct; identical to SEQ ID NO: 10319
  modified_base 1..8787: mod_base = OTHER; note = Each t is m1f
  source 1..8787: mol_type = other RNA

SEQ ID NO: 11917 - RNA, 8787 nt, synthetic construct; identical to SEQ ID NO: 10320
  modified_base 1..8787: mod_base = OTHER; note = Each t is m1f
  source 1..8787: mol_type = other RNA

SEQ ID NO: 11918 - RNA, 8787 nt, synthetic construct; identical to SEQ ID NO: 10321
  modified_base 1..8787: mod_base = OTHER; note = Each t is m1f
  source 1..8787: mol_type = other RNA

SEQ ID NO: 11919 - RNA, 8787 nt, synthetic construct; identical to SEQ ID NO: 10322
  modified_base 1..8787: mod_base = OTHER; note = Each t is m1f
  source 1..8787: mol_type = other RNA

SEQ ID NO: 11920 - RNA, 8787 nt, synthetic construct; identical to SEQ ID NO: 10323
  modified_base 1..8787: mod_base = OTHER; note = Each t is m1f
  source 1..8787: mol_type = other RNA

SEQ ID NO: 11921 - RNA, 8787 nt, synthetic construct; identical to SEQ ID NO: 10324
  modified_base 1..8787: mod_base = OTHER; note = Each t is m1f
  source 1..8787: mol_type = other RNA

SEQ ID NO: 11922 - RNA, 8784 nt, synthetic construct; identical to SEQ ID NO: 10325
  modified_base 1..8784: mod_base = OTHER; note = Each t is m1f
  source 1..8784: mol_type = other RNA

SEQ ID NO: 11923 - RNA, 8787 nt, synthetic construct; identical to SEQ ID NO: 10326
  modified_base 1..8787: mod_base = OTHER; note = Each t is m1f
  source 1..8787: mol_type = other RNA

SEQ ID NO: 11924 - RNA, 8787 nt, synthetic construct; identical to SEQ ID NO: 10327
  modified_base 1..8787: mod_base = OTHER; note = Each t is m1f
  source 1..8787: mol_type = other RNA

SEQ ID NO: 11925 - RNA, 8787 nt, synthetic construct; identical to SEQ ID NO: 10328
  modified_base 1..8787: mod_base = OTHER; note = Each t is m1f
  source 1..8787: mol_type = other RNA

SEQ ID NO: 11926 - RNA, 8787 nt, synthetic construct; identical to SEQ ID NO: 10329
  modified_base 1..8787: mod_base = OTHER; note = Each t is m1f
  source 1..8787: mol_type = other RNA

SEQ ID NO: 11927 - RNA, 8787 nt, synthetic construct; identical to SEQ ID NO: 10330
  modified_base 1..8787: mod_base = OTHER; note = Each t is m1f
  source 1..8787: mol_type = other RNA

SEQ ID NO: 11928 - RNA, 8787 nt, synthetic construct; identical to SEQ ID NO: 10331
  modified_base 1..8787: mod_base = OTHER; note = Each t is m1f
  source 1..8787: mol_type = other RNA

SEQ ID NO: 11929 - RNA, 8787 nt, synthetic construct; identical to SEQ ID NO: 10332
  modified_base 1..8787: mod_base = OTHER; note = Each t is m1f
  source 1..8787: mol_type = other RNA

SEQ ID NO: 11930 - RNA, 8787 nt, synthetic construct; identical to SEQ ID NO: 10333
  modified_base 1..8787: mod_base = OTHER; note = Each t is m1f
  source 1..8787: mol_type = other RNA

SEQ ID NO: 11931 - RNA, 8784 nt, synthetic construct; identical to SEQ ID NO: 10334
  modified_base 1..8784: mod_base = OTHER; note = Each t is m1f
  source 1..8784: mol_type = other RNA

SEQ ID NO: 11932 - RNA, 8787 nt, synthetic construct; identical to SEQ ID NO: 10335
  modified_base 1..8787: mod_base = OTHER; note = Each t is m1f
  source 1..8787: mol_type = other RNA

SEQ ID NO: 11933 - RNA, 8787 nt, synthetic construct; identical to SEQ ID NO: 10336
  modified_base 1..8787: mod_base = OTHER; note = Each t is m1f
  source 1..8787: mol_type = other RNA

SEQ ID NO: 11934 - RNA, 8796 nt, synthetic construct; identical to SEQ ID NO: 10337
  modified_base 1..8796: mod_base = OTHER; note = Each t is m1f
  source 1..8796: mol_type = other RNA

SEQ ID NO: 11935 - RNA, 8787 nt, synthetic construct; identical to SEQ ID NO: 10338
  modified_base 1..8787: mod_base = OTHER; note = Each t is m1f
  source 1..8787: mol_type = other RNA

SEQ ID NO: 11936 - RNA, 8784 nt, synthetic construct; identical to SEQ ID NO: 10339
  modified_base 1..8784: mod_base = OTHER; note = Each t is m1f
  source 1..8784: mol_type = other RNA

SEQ ID NO: 11937 - RNA, 8787 nt, synthetic construct; identical to SEQ ID NO: 10340
  modified_base 1..8787: mod_base = OTHER; note = Each t is m1f
  source 1..8787: mol_type = other RNA

SEQ ID NO: 11938 - RNA, 8787 nt, synthetic construct; identical to SEQ ID NO: 10341
  modified_base 1..8787: mod_base = OTHER; note = Each t is m1f
  source 1..8787: mol_type = other RNA

SEQ ID NO: 11939 - RNA, 8787 nt, synthetic construct; identical to SEQ ID NO: 10342
  modified_base 1..8787: mod_base = OTHER; note = Each t is m1f
  source 1..8787: mol_type = other RNA

SEQ ID NO: 11940 - RNA, 8787 nt, synthetic construct; identical to SEQ ID NO: 10343
  modified_base 1..8787: mod_base = OTHER; note = Each t is m1f
  source 1..8787: mol_type = other RNA

SEQ ID NO: 11941 - RNA, 8787 nt, synthetic construct; identical to SEQ ID NO: 10344
  modified_base 1..8787: mod_base = OTHER; note = Each t is m1f
  source 1..8787: mol_type = other RNA

SEQ ID NO: 11942 - RNA, 8787 nt, synthetic construct; identical to SEQ ID NO: 10345
  modified_base 1..8787: mod_base = OTHER; note = Each t is m1f
  source 1..8787: mol_type = other RNA

SEQ ID NO: 11943 - RNA, 8787 nt, synthetic construct; identical to SEQ ID NO: 10346
  modified_base 1..8787: mod_base = OTHER; note = Each t is m1f
  source 1..8787: mol_type = other RNA

SEQ ID NO: 11944 - RNA, 8787 nt, synthetic construct; identical to SEQ ID NO: 10347
  modified_base 1..8787: mod_base = OTHER; note = Each t is m1f
  source 1..8787: mol_type = other RNA

SEQ ID NO: 11945 - RNA, 8787 nt, synthetic construct; identical to SEQ ID NO: 10348
  modified_base 1..8787: mod_base = OTHER; note = Each t is m1f
  source 1..8787: mol_type = other RNA

SEQ ID NO: 11946 - RNA, 8787 nt, synthetic construct; identical to SEQ ID NO: 10349
  modified_base 1..8787: mod_base = OTHER; note = Each t is m1f
  source 1..8787: mol_type = other RNA

SEQ ID NO: 11947 - RNA, 8787 nt, synthetic construct; identical to SEQ ID NO: 10350
  modified_base 1..8787: mod_base = OTHER; note = Each t is m1f
  source 1..8787: mol_type = other RNA

SEQ ID NO: 11948 - RNA, 8787 nt, synthetic construct; identical to SEQ ID NO: 10351
  modified_base 1..8787: mod_base = OTHER; note = Each t is m1f
  source 1..8787: mol_type = other RNA

SEQ ID NO: 11949 - RNA, 8787 nt, synthetic construct; identical to SEQ ID NO: 10352
  modified_base 1..8787: mod_base = OTHER; note = Each t is m1f
  source 1..8787: mol_type = other RNA

SEQ ID NO: 11950 - RNA, 8796 nt, synthetic construct; identical to SEQ ID NO: 10353
  modified_base 1..8796: mod_base = OTHER; note = Each t is m1f
  source 1..8796: mol_type = other RNA

SEQ ID NO: 11951 - RNA, 8787 nt, synthetic construct; identical to SEQ ID NO: 10354
  modified_base 1..8787: mod_base = OTHER; note = Each t is m1f
  source 1..8787: mol_type = other RNA

SEQ ID NO: 11952 - RNA, 8787 nt, synthetic construct; identical to SEQ ID NO: 10355
  modified_base 1..8787: mod_base = OTHER; note = Each t is m1f
  source 1..8787: mol_type = other RNA

SEQ ID NO: 11953 - RNA, 8787 nt, synthetic construct; identical to SEQ ID NO: 10356
  modified_base 1..8787: mod_base = OTHER; note = Each t is m1f
  source 1..8787: mol_type = other RNA

SEQ ID NO: 11954 - RNA, 8787 nt, synthetic construct; identical to SEQ ID NO: 10357
  modified_base 1..8787: mod_base = OTHER; note = Each t is m1f
  source 1..8787: mol_type = other RNA

SEQ ID NO: 11955 - RNA, 8787 nt, synthetic construct; identical to SEQ ID NO: 10358
  modified_base 1..8787: mod_base = OTHER; note = Each t is m1f
  source 1..8787: mol_type = other RNA

SEQ ID NO: 11956 - RNA, 8787 nt, synthetic construct; identical to SEQ ID NO: 10359
  modified_base 1..8787: mod_base = OTHER; note = Each t is m1f
  source 1..8787: mol_type = other RNA

SEQ ID NO: 11957 - RNA, 8787 nt, synthetic construct; identical to SEQ ID NO: 10360
  modified_base 1..8787: mod_base = OTHER; note = Each t is m1f
  source 1..8787: mol_type = other RNA

SEQ ID NO: 11958 - RNA, 8787 nt, synthetic construct; identical to SEQ ID NO: 10361
  modified_base 1..8787: mod_base = OTHER; note = Each t is m1f
  source 1..8787: mol_type = other RNA

SEQ ID NO: 11959 - RNA, 8787 nt, synthetic construct; identical to SEQ ID NO: 10362
  modified_base 1..8787: mod_base = OTHER; note = Each t is m1f
  source 1..8787: mol_type = other RNA

SEQ ID NO: 11960 - RNA, 8787 nt, synthetic construct; identical to SEQ ID NO: 10363
  modified_base 1..8787: mod_base = OTHER; note = Each t is m1f
  source 1..8787: mol_type = other RNA

SEQ ID NO: 11961 - RNA, 8787 nt, synthetic construct; identical to SEQ ID NO: 10364
  modified_base 1..8787: mod_base = OTHER; note = Each t is m1f
  source 1..8787: mol_type = other RNA

SEQ ID NO: 11962 - RNA, 8787 nt, synthetic construct; identical to SEQ ID NO: 10365
  modified_base 1..8787: mod_base = OTHER; note = Each t is m1f
  source 1..8787: mol_type = other RNA

SEQ ID NO: 11963 - RNA, 8787 nt, synthetic construct; identical to SEQ ID NO: 10366
  modified_base 1..8787: mod_base = OTHER; note = Each t is m1f
  source 1..8787: mol_type = other RNA

SEQ ID NO: 11964 - RNA, 8787 nt, synthetic construct; identical to SEQ ID NO: 10367
  modified_base 1..8787: mod_base = OTHER; note = Each t is m1f
  source 1..8787: mol_type = other RNA

SEQ ID NO: 11965 - RNA, 8787 nt, synthetic construct; identical to SEQ ID NO: 10368
  modified_base 1..8787: mod_base = OTHER; note = Each t is m1f
  source 1..8787: mol_type = other RNA

SEQ ID NO: 11966 - RNA, 8787 nt, synthetic construct; identical to SEQ ID NO: 10369
  modified_base 1..8787: mod_base = OTHER; note = Each t is m1f
  source 1..8787: mol_type = other RNA

SEQ ID NO: 11967 - RNA, 8787 nt, synthetic construct; identical to SEQ ID NO: 10370
  modified_base 1..8787: mod_base = OTHER; note = Each t is m1f
  source 1..8787: mol_type = other RNA

SEQ ID NO: 11968 - RNA, 8787 nt, synthetic construct; identical to SEQ ID NO: 10371
  modified_base 1..8787: mod_base = OTHER; note = Each t is m1f
  source 1..8787: mol_type = other RNA

SEQ ID NO: 11969 - RNA, 8787 nt, synthetic construct; identical to SEQ ID NO: 10372
  modified_base 1..8787: mod_base = OTHER; note = Each t is m1f
  source 1..8787: mol_type = other RNA

SEQ ID NO: 11970 - RNA, 8787 nt, synthetic construct; identical to SEQ ID NO: 10373
  modified_base 1..8787: mod_base = OTHER; note = Each t is m1f
  source 1..8787: mol_type = other RNA

SEQ ID NO: 11971 - RNA, 8787 nt, synthetic construct; identical to SEQ ID NO: 10374
  modified_base 1..8787: mod_base = OTHER; note = Each t is m1f
  source 1..8787: mol_type = other RNA

SEQ ID NO: 11972 - RNA, 8787 nt, synthetic construct; identical to SEQ ID NO: 10375
  modified_base 1..8787: mod_base = OTHER; note = Each t is m1f
  source 1..8787: mol_type = other RNA

SEQ ID NO: 11973 - RNA, 8787 nt, synthetic construct; identical to SEQ ID NO: 10376
  modified_base 1..8787: mod_base = OTHER; note = Each t is m1f
  source 1..8787: mol_type = other RNA

SEQ ID NO: 11974 - RNA, 8787 nt, synthetic construct; identical to SEQ ID NO: 10377
  modified_base 1..8787: mod_base = OTHER; note = Each t is m1f
  source 1..8787: mol_type = other RNA

SEQ ID NO: 11975 - RNA, 8787 nt, synthetic construct; identical to SEQ ID NO: 10378
  modified_base 1..8787: mod_base = OTHER; note = Each t is m1f
  source 1..8787: mol_type = other RNA

SEQ ID NO: 11976 - RNA, 8787 nt, synthetic construct; identical to SEQ ID NO: 10379
  modified_base 1..8787: mod_base = OTHER; note = Each t is m1f
  source 1..8787: mol_type = other RNA

SEQ ID NO: 11977 - RNA, 8787 nt, synthetic construct; identical to SEQ ID NO: 10380
  modified_base 1..8787: mod_base = OTHER; note = Each t is m1f
  source 1..8787: mol_type = other RNA

SEQ ID NO: 11978 - RNA, 8787 nt, synthetic construct; identical to SEQ ID NO: 10381
  modified_base 1..8787: mod_base = OTHER; note = Each t is m1f
  source 1..8787: mol_type = other RNA

SEQ ID NO: 11979 - RNA, 8787 nt, synthetic construct; identical to SEQ ID NO: 10382
  modified_base 1..8787: mod_base = OTHER; note = Each t is m1f
  source 1..8787: mol_type = other RNA

SEQ ID NO: 11980 - RNA, 8787 nt, synthetic construct; identical to SEQ ID NO: 10383
  modified_base 1..8787: mod_base = OTHER; note = Each t is m1f
  source 1..8787: mol_type = other RNA

SEQ ID NO: 11981 - RNA, 8787 nt, synthetic construct; identical to SEQ ID NO: 10384
  modified_base 1..8787: mod_base = OTHER; note = Each t is m1f
  source 1..8787: mol_type = other RNA

SEQ ID NO: 11982 - RNA, 8787 nt, synthetic construct; identical to SEQ ID NO: 10385
  modified_base 1..8787: mod_base = OTHER; note = Each t is m1f
  source 1..8787: mol_type = other RNA

SEQ ID NO: 11983 - RNA, 8787 nt, synthetic construct; identical to SEQ ID NO: 10386
  modified_base 1..8787: mod_base = OTHER; note = Each t is m1f
  source 1..8787: mol_type = other RNA

SEQ ID NO: 11984 - RNA, 8787 nt, synthetic construct; identical to SEQ ID NO: 10387
  modified_base 1..8787: mod_base = OTHER; note = Each t is m1f
  source 1..8787: mol_type = other RNA

SEQ ID NO: 11985 - RNA, 8787 nt, synthetic construct; identical to SEQ ID NO: 10388
  modified_base 1..8787: mod_base = OTHER; note = Each t is m1f
  source 1..8787: mol_type = other RNA

SEQ ID NO: 11986 - RNA, 8787 nt, synthetic construct; identical to SEQ ID NO: 10389
  modified_base 1..8787: mod_base = OTHER; note = Each t is m1f
  source 1..8787: mol_type = other RNA

SEQ ID NO: 11987 - RNA, 8787 nt, synthetic construct; identical to SEQ ID NO: 10390
  modified_base 1..8787: mod_base = OTHER; note = Each t is m1f
  source 1..8787: mol_type = other RNA

SEQ ID NO: 11988 - RNA, 8787 nt, synthetic construct; identical to SEQ ID NO: 10391
  modified_base 1..8787: mod_base = OTHER; note = Each t is m1f
  source 1..8787: mol_type = other RNA

SEQ ID NO: 11989 - RNA, 8787 nt, synthetic construct; identical to SEQ ID NO: 10392
  modified_base 1..8787: mod_base = OTHER; note = Each t is m1f
  source 1..8787: mol_type = other RNA

SEQ ID NO: 11990 - RNA, 8787 nt, synthetic construct; identical to SEQ ID NO: 10393
  modified_base 1..8787: mod_base = OTHER; note = Each t is m1f
  source 1..8787: mol_type = other RNA

SEQ ID NO: 11991 - RNA, 8787 nt, synthetic construct; identical to SEQ ID NO: 10394
  modified_base 1..8787: mod_base = OTHER; note = Each t is m1f
  source 1..8787: mol_type = other RNA

SEQ ID NO: 11992 - RNA, 8787 nt, synthetic construct; identical to SEQ ID NO: 10395
  modified_base 1..8787: mod_base = OTHER; note = Each t is m1f
  source 1..8787: mol_type = other RNA

SEQ ID NO: 11993 - RNA, 8787 nt, synthetic construct; identical to SEQ ID NO: 10396
  modified_base 1..8787: mod_base = OTHER; note = Each t is m1f
  source 1..8787: mol_type = other RNA

SEQ ID NO: 11994 - RNA, 8787 nt, synthetic construct; identical to SEQ ID NO: 10397
  modified_base 1..8787: mod_base = OTHER; note = Each t is m1f
  source 1..8787: mol_type = other RNA

SEQ ID NO: 11995 - RNA, 8787 nt, synthetic construct; identical to SEQ ID NO: 10398
  modified_base 1..8787: mod_base = OTHER; note = Each t is m1f
  source 1..8787: mol_type = other RNA

SEQ ID NO: 11996 - RNA, 8787 nt, synthetic construct; identical to SEQ ID NO: 10399
  modified_base 1..8787: mod_base = OTHER; note = Each t is m1f
  source 1..8787: mol_type = other RNA

SEQ ID NO: 11997 - RNA, 8787 nt, synthetic construct; identical to SEQ ID NO: 10400
  modified_base 1..8787: mod_base = OTHER; note = Each t is m1f
  source 1..8787: mol_type = other RNA

SEQ ID NO: 11998 - RNA, 8787 nt, synthetic construct; identical to SEQ ID NO: 10401
  modified_base 1..8787: mod_base = OTHER; note = Each t is m1f
  source 1..8787: mol_type = other RNA

SEQ ID NO: 11999 - RNA, 8787 nt, synthetic construct; identical to SEQ ID NO: 10402
  modified_base 1..8787: mod_base = OTHER; note = Each t is m1f
  source 1..8787: mol_type = other RNA

SEQ ID NO: 12000 - RNA, 8787 nt, synthetic construct; identical to SEQ ID NO: 10403
  modified_base 1..8787: mod_base = OTHER; note = Each t is m1f
  source 1..8787: mol_type = other RNA

SEQ ID NO: 12001 - RNA, 8787 nt, synthetic construct; identical to SEQ ID NO: 10404
  modified_base 1..8787: mod_base = OTHER; note = Each t is m1f
  source 1..8787: mol_type = other RNA

SEQ ID NO: 12002 - RNA, 8787 nt, synthetic construct; identical to SEQ ID NO: 10405
  modified_base 1..8787: mod_base = OTHER; note = Each t is m1f
  source 1..8787: mol_type = other RNA

SEQ ID NO: 12003 - RNA, 8787 nt, synthetic construct; identical to SEQ ID NO: 10406
  modified_base 1..8787: mod_base = OTHER; note = Each t is m1f
  source 1..8787: mol_type = other RNA

SEQ ID NO: 12004 - RNA, 8787 nt, synthetic construct; identical to SEQ ID NO: 10407
  modified_base 1..8787: mod_base = OTHER; note = Each t is m1f
  source 1..8787: mol_type = other RNA

SEQ ID NO: 12005 - RNA, 8787 nt, synthetic construct; identical to SEQ ID NO: 10408
  modified_base 1..8787: mod_base = OTHER; note = Each t is m1f
  source 1..8787: mol_type = other RNA

SEQ ID NO: 12006 - RNA, 8787 nt, synthetic construct; identical to SEQ ID NO: 10409
  modified_base 1..8787: mod_base = OTHER; note = Each t is m1f
  source 1..8787: mol_type = other RNA

SEQ ID NO: 12007 - RNA, 8787 nt, synthetic construct; identical to SEQ ID NO: 10410
  modified_base 1..8787: mod_base = OTHER; note = Each t is m1f
  source 1..8787: mol_type = other RNA

SEQ ID NO: 12008 - RNA, 8787 nt, synthetic construct; identical to SEQ ID NO: 10411
  modified_base 1..8787: mod_base = OTHER; note = Each t is m1f
  source 1..8787: mol_type = other RNA

SEQ ID NO: 12009 - RNA, 8787 nt, synthetic construct; identical to SEQ ID NO: 10412
  modified_base 1..8787: mod_base = OTHER; note = Each t is m1f
  source 1..8787: mol_type = other RNA

SEQ ID NO: 12010 - RNA, 8787 nt, synthetic construct; identical to SEQ ID NO: 10413
  modified_base 1..8787: mod_base = OTHER; note = Each t is m1f
  source 1..8787: mol_type = other RNA

SEQ ID NO: 12011 - RNA, 8787 nt, synthetic construct; identical to SEQ ID NO: 10414
  modified_base 1..8787: mod_base = OTHER; note = Each t is m1f
  source 1..8787: mol_type = other RNA

SEQ ID NO: 12012 - RNA, 8787 nt, synthetic construct; identical to SEQ ID NO: 10415
  modified_base 1..8787: mod_base = OTHER; note = Each t is m1f
  source 1..8787: mol_type = other RNA

SEQ ID NO: 12013 - RNA, 8787 nt, synthetic construct; identical to SEQ ID NO: 10416
  modified_base 1..8787: mod_base = OTHER; note = Each t is m1f
  source 1..8787: mol_type = other RNA

SEQ ID NO: 12014 - RNA, 8787 nt, synthetic construct; identical to SEQ ID NO: 10417
  modified_base 1..8787: mod_base = OTHER; note = Each t is m1f
  source 1..8787: mol_type = other RNA

SEQ ID NO: 12015 - RNA, 8787 nt, synthetic construct; identical to SEQ ID NO: 10418
  modified_base 1..8787: mod_base = OTHER; note = Each t is m1f
  source 1..8787: mol_type = other RNA

SEQ ID NO: 12016 - RNA, 8787 nt, synthetic construct; identical to SEQ ID NO: 10419
  modified_base 1..8787: mod_base = OTHER; note = Each t is m1f
  source 1..8787: mol_type = other RNA

SEQ ID NO: 12017 - RNA, 8787 nt, synthetic construct; identical to SEQ ID NO: 10420
  modified_base 1..8787: mod_base = OTHER; note = Each t is m1f
  source 1..8787: mol_type = other RNA

SEQ ID NO: 12018 - RNA, 8787 nt, synthetic construct; identical to SEQ ID NO: 10421
  modified_base 1..8787: mod_base = OTHER; note = Each t is m1f
  source 1..8787: mol_type = other RNA

SEQ ID NO: 12019 - RNA, 8787 nt, synthetic construct; identical to SEQ ID NO: 10422
  modified_base 1..8787: mod_base = OTHER; note = Each t is m1f
  source 1..8787: mol_type = other RNA

SEQ ID NO: 12020 - RNA, 8787 nt, synthetic construct; identical to SEQ ID NO: 10423
  modified_base 1..8787: mod_base = OTHER; note = Each t is m1f
  source 1..8787: mol_type = other RNA

SEQ ID NO: 12021 - RNA, 8787 nt, synthetic construct; identical to SEQ ID NO: 10424
  modified_base 1..8787: mod_base = OTHER; note = Each t is m1f
  source 1..8787: mol_type = other RNA

SEQ ID NO: 12022 - RNA, 8787 nt, synthetic construct; identical to SEQ ID NO: 10425
  modified_base 1..8787: mod_base = OTHER; note = Each t is m1f
  source 1..8787: mol_type = other RNA

SEQ ID NO: 12023 - RNA, 8787 nt, synthetic construct; identical to SEQ ID NO: 10426
  modified_base 1..8787: mod_base = OTHER; note = Each t is m1f
  source 1..8787: mol_type = other RNA

SEQ ID NO: 12024 - RNA, 8787 nt, synthetic construct; identical to SEQ ID NO: 10427
  modified_base 1..8787: mod_base = OTHER; note = Each t is m1f
  source 1..8787: mol_type = other RNA

SEQ ID NO: 12025 - RNA, 8787 nt, synthetic construct; identical to SEQ ID NO: 10428
  modified_base 1..8787: mod_base = OTHER; note = Each t is m1f
  source 1..8787: mol_type = other RNA

SEQ ID NO: 12026 - RNA, 8787 nt, synthetic construct; identical to SEQ ID NO: 10429
  modified_base 1..8787: mod_base = OTHER; note = Each t is m1f
  source 1..8787: mol_type = other RNA

SEQ ID NO: 12027 - RNA, 8787 nt, synthetic construct; identical to SEQ ID NO: 10430
  modified_base 1..8787: mod_base = OTHER; note = Each t is m1f
  source 1..8787: mol_type = other RNA

SEQ ID NO: 12028 - RNA, 8787 nt, synthetic construct; identical to SEQ ID NO: 10431
  modified_base 1..8787: mod_base = OTHER; note = Each t is m1f
  source 1..8787: mol_type = other RNA

SEQ ID NO: 12029 - RNA, 8787 nt, synthetic construct; identical to SEQ ID NO: 10432
  modified_base 1..8787: mod_base = OTHER; note = Each t is m1f
  source 1..8787: mol_type = other RNA

SEQ ID NO: 12030 - RNA, 8787 nt, synthetic construct; identical to SEQ ID NO: 10433
  modified_base 1..8787: mod_base = OTHER; note = Each t is m1f
  source 1..8787: mol_type = other RNA

SEQ ID NO: 12031 - RNA, 8787 nt, synthetic construct; identical to SEQ ID NO: 10434
  modified_base 1..8787: mod_base = OTHER; note = Each t is m1f
  source 1..8787: mol_type = other RNA

SEQ ID NO: 12032 - RNA, 8787 nt, synthetic construct; identical to SEQ ID NO: 10435
  modified_base 1..8787: mod_base = OTHER; note = Each t is m1f
  source 1..8787: mol_type = other RNA

SEQ ID NO: 12033 - RNA, 8787 nt, synthetic construct; identical to SEQ ID NO: 10436
  modified_base 1..8787: mod_base = OTHER; note = Each t is m1f
  source 1..8787: mol_type = other RNA

SEQ ID NO: 12034 - RNA, 8787 nt, synthetic construct; identical to SEQ ID NO: 10437
  modified_base 1..8787: mod_base = OTHER; note = Each t is m1f
  source 1..8787: mol_type = other RNA

SEQ ID NO: 12035 - RNA, 8787 nt, synthetic construct; identical to SEQ ID NO: 10438
  modified_base 1..8787: mod_base = OTHER; note = Each t is m1f
  source 1..8787: mol_type = other RNA

SEQ ID NO: 12036 - RNA, 8787 nt, synthetic construct; identical to SEQ ID NO: 10439
  modified_base 1..8787: mod_base = OTHER; note = Each t is m1f
  source 1..8787: mol_type = other RNA

SEQ ID NO: 12037 - RNA, 8787 nt, synthetic construct; identical to SEQ ID NO: 10440
  modified_base 1..8787: mod_base = OTHER; note = Each t is m1f
  source 1..8787: mol_type = other RNA

SEQ ID NO: 12038 - RNA, 8787 nt, synthetic construct; identical to SEQ ID NO: 10441
  modified_base 1..8787: mod_base = OTHER; note = Each t is m1f
  source 1..8787: mol_type = other RNA

SEQ ID NO: 12039 - RNA, 8787 nt, synthetic construct; identical to SEQ ID NO: 10442
  modified_base 1..8787: mod_base = OTHER; note = Each t is m1f
  source 1..8787: mol_type = other RNA

SEQ ID NO: 12040 - RNA, 8787 nt, synthetic construct; identical to SEQ ID NO: 10443
  modified_base 1..8787: mod_base = OTHER; note = Each t is m1f
  source 1..8787: mol_type = other RNA

SEQ ID NO: 12041 - RNA, 8787 nt, synthetic construct; identical to SEQ ID NO: 10444
  modified_base 1..8787: mod_base = OTHER; note = Each t is m1f
  source 1..8787: mol_type = other RNA

SEQ ID NO: 12042 - RNA, 8787 nt, synthetic construct; identical to SEQ ID NO: 10445
  modified_base 1..8787: mod_base = OTHER; note = Each t is m1f
  source 1..8787: mol_type = other RNA

SEQ ID NO: 12043 - RNA, 8787 nt, synthetic construct; identical to SEQ ID NO: 10446
  modified_base 1..8787: mod_base = OTHER; note = Each t is m1f
  source 1..8787: mol_type = other RNA

SEQ ID NO: 12044 - RNA, 8787 nt, synthetic construct; identical to SEQ ID NO: 10447
  modified_base 1..8787: mod_base = OTHER; note = Each t is m1f
  source 1..8787: mol_type = other RNA

SEQ ID NO: 12045 - RNA, 8787 nt, synthetic construct; identical to SEQ ID NO: 10448
  modified_base 1..8787: mod_base = OTHER; note = Each t is m1f
  source 1..8787: mol_type = other RNA

SEQ ID NO: 12046 - RNA, 8787 nt, synthetic construct; identical to SEQ ID NO: 10449
  modified_base 1..8787: mod_base = OTHER; note = Each t is m1f
  source 1..8787: mol_type = other RNA

SEQ ID NO: 12047 - RNA, 8787 nt, synthetic construct; identical to SEQ ID NO: 10450
  modified_base 1..8787: mod_base = OTHER; note = Each t is m1f
  source 1..8787: mol_type = other RNA

SEQ ID NO: 12048 - RNA, 8787 nt, synthetic construct; identical to SEQ ID NO: 10451
  modified_base 1..8787: mod_base = OTHER; note = Each t is m1f
  source 1..8787: mol_type = other RNA

SEQ ID NO: 12049 - RNA, 8787 nt, synthetic construct; identical to SEQ ID NO: 10452
  modified_base 1..8787: mod_base = OTHER; note = Each t is m1f
  source 1..8787: mol_type = other RNA

SEQ ID NO: 12050 - RNA, 8787 nt, synthetic construct; identical to SEQ ID NO: 10453
  modified_base 1..8787: mod_base = OTHER; note = Each t is m1f
  source 1..8787: mol_type = other RNA

SEQ ID NO: 12051 - RNA, 8787 nt, synthetic construct; identical to SEQ ID NO: 10454
  modified_base 1..8787: mod_base = OTHER; note = Each t is m1f
  source 1..8787: mol_type = other RNA

SEQ ID NO: 12052 - RNA, 8787 nt, synthetic construct; identical to SEQ ID NO: 10455
  modified_base 1..8787: mod_base = OTHER; note = Each t is m1f
  source 1..8787: mol_type = other RNA

SEQ ID NO: 12053 - RNA, 8787 nt, synthetic construct; identical to SEQ ID NO: 10456
  modified_base 1..8787: mod_base = OTHER; note = Each t is m1f
  source 1..8787: mol_type = other RNA

SEQ ID NO: 12054 - RNA, 8787 nt, synthetic construct; identical to SEQ ID NO: 10457
  modified_base 1..8787: mod_base = OTHER; note = Each t is m1f
  source 1..8787: mol_type = other RNA

SEQ ID NO: 12055 - RNA, 8787 nt, synthetic construct; identical to SEQ ID NO: 10458
  modified_base 1..8787: mod_base = OTHER; note = Each t is m1f
  source 1..8787: mol_type = other RNA

SEQ ID NO: 12056 - RNA, 8787 nt, synthetic construct; identical to SEQ ID NO: 10459
  modified_base 1..8787: mod_base = OTHER; note = Each t is m1f
  source 1..8787: mol_type = other RNA

SEQ ID NO: 12057 - RNA, 8787 nt, synthetic construct; identical to SEQ ID NO: 10460
  modified_base 1..8787: mod_base = OTHER; note = Each t is m1f
  source 1..8787: mol_type = other RNA

SEQ ID NO: 12058 - RNA, 8787 nt, synthetic construct; identical to SEQ ID NO: 10461
  modified_base 1..8787: mod_base = OTHER; note = Each t is m1f
  source 1..8787: mol_type = other RNA

SEQ ID NO: 12059 - RNA, 8787 nt, synthetic construct; identical to SEQ ID NO: 10462
  modified_base 1..8787: mod_base = OTHER; note = Each t is m1f
  source 1..8787: mol_type = other RNA

SEQ ID NO: 12060 - RNA, 8787 nt, synthetic construct; identical to SEQ ID NO: 10463
  modified_base 1..8787: mod_base = OTHER; note = Each t is m1f
  source 1..8787: mol_type = other RNA

SEQ ID NO: 12061 - RNA, 8787 nt, synthetic construct; identical to SEQ ID NO: 10464
  modified_base 1..8787: mod_base = OTHER; note = Each t is m1f
  source 1..8787: mol_type = other RNA

SEQ ID NO: 12062 - RNA, 8787 nt, synthetic construct; identical to SEQ ID NO: 10465
  modified_base 1..8787: mod_base = OTHER; note = Each t is m1f
  source 1..8787: mol_type = other RNA

SEQ ID NO: 12063 - RNA, 8787 nt, synthetic construct; identical to SEQ ID NO: 10466
  modified_base 1..8787: mod_base = OTHER; note = Each t is m1f
  source 1..8787: mol_type = other RNA

SEQ ID NO: 12064 - RNA, 8787 nt, synthetic construct; identical to SEQ ID NO: 10467
  modified_base 1..8787: mod_base = OTHER; note = Each t is m1f
  source 1..8787: mol_type = other RNA

SEQ ID NO: 12065 - RNA, 8787 nt, synthetic construct; identical to SEQ ID NO: 10468
  modified_base 1..8787: mod_base = OTHER; note = Each t is m1f
  source 1..8787: mol_type = other RNA

SEQ ID NO: 12066 - RNA, 8787 nt, synthetic construct; identical to SEQ ID NO: 10469
  modified_base 1..8787: mod_base = OTHER; note = Each t is m1f
  source 1..8787: mol_type = other RNA

SEQ ID NO: 12067 - RNA, 8787 nt, synthetic construct; identical to SEQ ID NO: 10470
  modified_base 1..8787: mod_base = OTHER; note = Each t is m1f
  source 1..8787: mol_type = other RNA

SEQ ID NO: 12068 - RNA, 8787 nt, synthetic construct; identical to SEQ ID NO: 10471
  modified_base 1..8787: mod_base = OTHER; note = Each t is m1f
  source 1..8787: mol_type = other RNA

SEQ ID NO: 12069 - RNA, 8787 nt, synthetic construct; identical to SEQ ID NO: 10472
  modified_base 1..8787: mod_base = OTHER; note = Each t is m1f
  source 1..8787: mol_type = other RNA

SEQ ID NO: 12070 - RNA, 8784 nt, synthetic construct; identical to SEQ ID NO: 10473
  modified_base 1..8784: mod_base = OTHER; note = Each t is m1f
  source 1..8784: mol_type = other RNA

SEQ ID NO: 12071 - RNA, 8787 nt, synthetic construct; identical to SEQ ID NO: 10474
  modified_base 1..8787: mod_base = OTHER; note = Each t is m1f
  source 1..8787: mol_type = other RNA

SEQ ID NO: 12072 - RNA, 8787 nt, synthetic construct; identical to SEQ ID NO: 10475
  modified_base 1..8787: mod_base = OTHER; note = Each t is m1f
  source 1..8787: mol_type = other RNA

SEQ ID NO: 12073 - RNA, 8787 nt, synthetic construct; identical to SEQ ID NO: 10476
  modified_base 1..8787: mod_base = OTHER; note = Each t is m1f
  source 1..8787: mol_type = other RNA

SEQ ID NO: 12074 - RNA, 8787 nt, synthetic construct; identical to SEQ ID NO: 10477
  modified_base 1..8787: mod_base = OTHER; note = Each t is m1f
  source 1..8787: mol_type = other RNA

SEQ ID NO: 12075 - RNA, 8787 nt, synthetic construct; identical to SEQ ID NO: 10478
  modified_base 1..8787: mod_base = OTHER; note = Each t is m1f
  source 1..8787: mol_type = other RNA

SEQ ID NO: 12076 - RNA, 8787 nt, synthetic construct; identical to SEQ ID NO: 10479
  modified_base 1..8787: mod_base = OTHER; note = Each t is m1f
  source 1..8787: mol_type = other RNA

SEQ ID NO: 12077 - RNA, 8787 nt, synthetic construct; identical to SEQ ID NO: 10480
  modified_base 1..8787: mod_base = OTHER; note = Each t is m1f
  source 1..8787: mol_type = other RNA

SEQ ID NO: 12078 - RNA, 8787 nt, synthetic construct; identical to SEQ ID NO: 10481
  modified_base 1..8787: mod_base = OTHER; note = Each t is m1f
  source 1..8787: mol_type = other RNA

SEQ ID NO: 12079 - RNA, 8787 nt, synthetic construct; identical to SEQ ID NO: 10482
  modified_base 1..8787: mod_base = OTHER; note = Each t is m1f
  source 1..8787: mol_type = other RNA

SEQ ID NO: 12080 - RNA, 8787 nt, synthetic construct; identical to SEQ ID NO: 10483
  modified_base 1..8787: mod_base = OTHER; note = Each t is m1f
  source 1..8787: mol_type = other RNA

SEQ ID NO: 12081 - RNA, 8787 nt, synthetic construct; identical to SEQ ID NO: 10484
  modified_base 1..8787: mod_base = OTHER; note = Each t is m1f
  source 1..8787: mol_type = other RNA

SEQ ID NO: 12082 - RNA, 8787 nt, synthetic construct; identical to SEQ ID NO: 10485
  modified_base 1..8787: mod_base = OTHER; note = Each t is m1f
  source 1..8787: mol_type = other RNA

SEQ ID NO: 12083 - RNA, 8787 nt, synthetic construct; identical to SEQ ID NO: 10486
  modified_base 1..8787: mod_base = OTHER; note = Each t is m1f
  source 1..8787: mol_type = other RNA

SEQ ID NO: 12084 - RNA, 8787 nt, synthetic construct; identical to SEQ ID NO: 10487
  modified_base 1..8787: mod_base = OTHER; note = Each t is m1f
  source 1..8787: mol_type = other RNA

SEQ ID NO: 12085 - RNA, 8787 nt, synthetic construct; identical to SEQ ID NO: 10488
  modified_base 1..8787: mod_base = OTHER; note = Each t is m1f
  source 1..8787: mol_type = other RNA

SEQ ID NO: 12086 - RNA, 8787 nt, synthetic construct; identical to SEQ ID NO: 10489
  modified_base 1..8787: mod_base = OTHER; note = Each t is m1f
  source 1..8787: mol_type = other RNA

SEQ ID NO: 12087 - RNA, 8787 nt, synthetic construct; identical to SEQ ID NO: 10490
  modified_base 1..8787: mod_base = OTHER; note = Each t is m1f
  source 1..8787: mol_type = other RNA

SEQ ID NO: 12088 - RNA, 8787 nt, synthetic construct; identical to SEQ ID NO: 10491
  modified_base 1..8787: mod_base = OTHER; note = Each t is m1f
  source 1..8787: mol_type = other RNA

SEQ ID NO: 12089 - RNA, 8787 nt, synthetic construct; identical to SEQ ID NO: 10492
  modified_base 1..8787: mod_base = OTHER; note = Each t is m1f
  source 1..8787: mol_type = other RNA

SEQ ID NO: 12090 - RNA, 8787 nt, synthetic construct; identical to SEQ ID NO: 10493
  modified_base 1..8787: mod_base = OTHER; note = Each t is m1f
  source 1..8787: mol_type = other RNA

SEQ ID NO: 12091 - RNA, 8787 nt, synthetic construct; identical to SEQ ID NO: 10494
  modified_base 1..8787: mod_base = OTHER; note = Each t is m1f
  source 1..8787: mol_type = other RNA

SEQ ID NO: 12092 - RNA, 8787 nt, synthetic construct; identical to SEQ ID NO: 10495
  modified_base 1..8787: mod_base = OTHER; note = Each t is m1f
  source 1..8787: mol_type = other RNA

SEQ ID NO: 12093 - RNA, 8787 nt, synthetic construct; identical to SEQ ID NO: 10496
  modified_base 1..8787: mod_base = OTHER; note = Each t is m1f
  source 1..8787: mol_type = other RNA

SEQ ID NO: 12094 - RNA, 8787 nt, synthetic construct; identical to SEQ ID NO: 10497
  modified_base 1..8787: mod_base = OTHER; note = Each t is m1f
  source 1..8787: mol_type = other RNA

SEQ ID NO: 12095 - RNA, 8787 nt, synthetic construct; identical to SEQ ID NO: 10498
  modified_base 1..8787: mod_base = OTHER; note = Each t is m1f
  source 1..8787: mol_type = other RNA

SEQ ID NO: 12096 - RNA, 8805 nt, synthetic construct; identical to SEQ ID NO: 10499
  modified_base 1..8805: mod_base = OTHER; note = Each t is m1f
  source 1..8805: mol_type = other RNA

SEQ ID NO: 12097 - RNA, 8796 nt, synthetic construct; identical to SEQ ID NO: 10500
  modified_base 1..8796: mod_base = OTHER; note = Each t is m1f
  source 1..8796: mol_type = other RNA

SEQ ID NO: 12098 - RNA, 8787 nt, synthetic construct; identical to SEQ ID NO: 10501
  modified_base 1..8787: mod_base = OTHER; note = Each t is m1f
  source 1..8787: mol_type = other RNA

SEQ ID NO: 12099 - RNA, 8787 nt, synthetic construct; identical to SEQ ID NO: 10502
  modified_base 1..8787: mod_base = OTHER; note = Each t is m1f
  source 1..8787: mol_type = other RNA

SEQ ID NO: 12100 - RNA, 8787 nt, synthetic construct; identical to SEQ ID NO: 10503
  modified_base 1..8787: mod_base = OTHER; note = Each t is m1f
  source 1..8787: mol_type = other RNA

SEQ ID NO: 12101 - RNA, 8817 nt, synthetic construct; identical to SEQ ID NO: 10504
  modified_base 1..8817: mod_base = OTHER; note = Each t is m1f
  source 1..8817: mol_type = other RNA

SEQ ID NO: 12102 - RNA, 8835 nt, synthetic construct; identical to SEQ ID NO: 10505
  modified_base 1..8835: mod_base = OTHER; note = Each t is m1f
  source 1..8835: mol_type = other RNA

SEQ ID NO: 12103 - RNA, 5785 nt, synthetic construct
  source 1..5785: mol_type = other RNA
aggaaataagagagaaaagaagagtaagaagaaatataagagccaccatggcccctaagaagaagcgtaaagtgagccggatggaacgcctcgtctacgaggtgcggcagaagtgcagaaacatcgaggacatctgcatctcctgcggatctctgaacgtgaccctggagcacccactgttcatcggcggcatgtgccagaactgtaaaaactgttttctggagtgtgcctatcaatacgacgatgacggctaccagagctactgcaccatctgttgcggcggaagagaggtgctgatgtgtggaaataacaactgctgccggtgcttctgcgtggaatgcgtggacctgctggtgggccccggcgccgcccaggccgctattaaggaagatccttggaactgctacatgtgcggccacaagggcacatacggcctgctgagacggagagaggactggcctagcagactgcagatgttcttcgccaataaccacgaccaggagttcgacccccctaaggtgtaccctcccgtccccgccgagaagagaaagcccatccgggtcctgagcctgttcgatggcatcgccaccggtctgctggtgctgaaggacctgggcatccaggtggataggtacattgcctccgaggtgtgcgaggactccatcaccgtgggaatggtgcgtcatcagggcaagatcatgtacgtgggcgacgtgcggagcgtgacacagaagcatatccaggagtggggccctttcgacctggtgatcggcggcagcccttgcaatgacctgagcatcgtgaacccagcccggaagggcctgtacgagggaaccggcagactgttcttcgagttttacagactgctgcacgacgcccggcctaaggaaggcgacgaccggcccttcttttggctgttcgagaatgtggtggccatgggagtcagcgacaagcgggatattagccggttcctggagagcaaccccgtgatgatcgatgccaaggaagtgagcgccgcccaccgggccagatacttctggggcaatctgcctggcatgaacagacccctggccagcaccgtgaacgacaagctggagctgcaggagtgcctggagcacggccggatcgccaagttcagcaaggtgagaaccatcaccacccgaagcaacagcatcaaacaaggcaaggaccagcactttcctgtgttcatgaacgagaaggaggacatcctgtggtgtaccgagatggagagagtgttcgggttcccagtccactacacagatgtcagcaacatgtctagactggccagacagagactgctgggaagaagctggtccgtccctgtgatcagacacctgttcgcccctctgaaggagtacttcgcctgcgtgagcagcggcaacagcaacgccaacagccggggccccagcttctctagcggcctggtgccactgtccctgagagggagccacatgggccccatggagatctacaaaaccgtgagcgcctggaagcggcagcctgtgcgcgtgctgagcctgtttcggaatatcgataaagtcctgaaaagcctgggattcctggagagcggctctggctccggcggtggcaccctgaagtacgtggaggatgtgacaaacgtggtcagacgggatgtggagaagtggggccccttcgatctggtgtacggcagcacccaacccctgggcagctcttgtgaccggtgccctggctggtacatgtttcagttccaccggatcctgcagtacgccctgccgagacaggagtcccagcggccattcttttggattttcatggacaacttgctgctgaccgaggatgaccaggaaactaccactcggttcctgcagaccgaagccgtgaccctgcaggacgtgagaggccgggactaccagaacgccatgcgggtgtggtccaacatccctggactgaaaagcaagcacgcacctctgacccctaaagaagaggagtacctgcaggcccaggtgcggagcagaagcaagctggacgcccctaaggtggatctgctggtgaagaattgcctcctgcccctgagagagtacttcaagtatttcagccagaatagtctgcccctgggaggcagcggcggcggcagccagagccccctgaccttcggcgacgtggccgtggagttcagcggcgaggagtgggcctggctggacagcgcccagaggagcctgcacaggagcgtgatgctggagaactacaggaacctggccagcctgggcctgtgcctgagcaagcccgagatgatcagcagcctggagcagaggaaggagccctgggccgtgaagaggaagagcaccaggggcatgcaccccgacagccagaccctgggcggcccaagcagcggcgcccctcctcccagcggcggcagcccagccggctccccaacctctaccgaggagggcacctctgagtccgccacccccgagagcggccctggcacctccaccgagcccagcgagggcagcgcacccggcagccctgccggcagccccacctccacagaggagggaaccagcaccgagcccagcgaaggcagcgccccaggcaccagcaccgagcctagtgagcaggagattaaacggatcaacaagatcagaagaagacttgtgaaagacagcaacaccaagaaggccggcaagacaggccccatgaaaaccctgctggttagagtgatgacacccgatctgagagagcggctggaaaacctgagaaagaagcctgaaaatatcccccagcccatcagcaatacatctagagccaacctgaataagctgctgaccgattacaccgaaatgaagaaggcgatcctgcatgtgtactgggaagagttccagaaggaccctgtgggcctgatgagccgggtggcccagcctgccagcaagaagatcgatcagaacaagctgaaacctgagatggacgagaagggcaacctgaccaccgccggctttgcctgctctcagtgtggccagcccctgttcgtgtacaagctggagcaggtgtctgagaagggcaaggcttacaccaactacttcggacggtgcaatgtggccgagcacgaaaagctgatcctgctggcccagctgaagcccgagaaggatagcgacgaagccgtgacatatagcctgggaaagtttgggcagagggccctggatttctacagcattcatgtgaccaaggagtccacccaccccgtgaagcccctggcccagatcgccggaaacagatacgcctccggacctgtgggaaaggccctgagcgacgcatgtatgggcacaatcgcctccttcctgtctaagtaccaggacatcatcatcgaacaccagaaggtggtgaagggcaaccagaagagactggagagcctgcgggagctggccggcaaggaaaacctggaataccctagcgtgaccctgccacctcagcctcacaccaaggagggcgttgatgcctacaacgaagtgatcgcccgggtgcgaatgtgggtgaacctgaacctgtggcagaagctgaagctaagcagagatgatgccaagcctctgctgagactgaagggattcccttcctttcctctggtcgagagacaggccaacgaagtggactggtgggacatggtgtgtaacgtgaagaagctgatcaacgagaaaaaggaggatggcaaggtgttttggcagaatctggctggctacaagagacaggaagccctgagaccatacctgagcagcgaggaagatcggaagaagggaaagaaattcgctcggtaccagctgggcgacctgctgctgcacctggaaaagaagcacggcgaggactggggaaaggtgtacgacgaggcctgggagcggattgacaagaaagtggaaggcctgagcaagcacatcaagctggaagaggaacggagaagcgaggacgcccagagcaaggccgccctgaccgactggctgcgggctaaggccagcttcgtgatcgagggcctgaaggaggccgacaaggacgagttctgcagatgcgagctgaagctgcagaagtggtacggggacctgcggggaaagcccttcgccatcgaagccgagaacagcatcctggacatcagcggcttcagcaagcagtacaactgtgccttcatctggcagaaggacggcgtgaagaagctgaacctgtacctgatcatcaactacttcaagggcggcaagctgcggttcaagaagatcaaacctgaagccttcgaagccaacagattctacaccgtgatcaacaaaaagagcggcgagatcgtgcccatggaggtgaacttcaacttcgacgaccccaacctgatcatcctgcctctggcctttggcaagagacagggcagagaattcatctggaacgacctgctgtccctggaaaccggcagcctgaagctggccaacggaagagtgatcgagaagacactgtacaacagaagaacccggcaggatgagcctgccctgttcgtggccctgaccttcgagcggcgggaggtcctggactcctccaatatcaaaccaatgaacctgatcggcgtggcaagaggcgaaaacatccccgccgtgatcgccctgaccgaccccgagggctgcccactgagccggtttaaggatagcctgggaaacccaacccacatcctgagaatcggcgagagctataaggagaagcagcggaccatccaggccaagaaggaggtggagcagcggagagccggcggctacagccggaagtacgccagcaaagccaagaatctggcagacgatatggtgagaaacaccgctagagatctgctgtactacgccgtgacccaggatgccatgctgatcttcgccaacctgagccggggcttcggccggcagggcaagcggaccttcatggccgagagacagtacacacggatggaggactggctgaccgccaagctggcctacgagggcctgagcaagacctacctgtccaagacactggcccagtacacctccaagacatgcagcaactgtgggtttaccatcaccagcgccgactacgacagggtgctggagaagctgaagaagacagcaacaggctggatgaccacaattaacggcaaggagctgaaggtggagggccagattacctactacaacagatacaagagacagaacgtagtcaaggacctgtccgtcgagctggatagactgagcgaagaatctgtgaacaacgacatctcctcctggacaaagggcagaagcggagaagctctgagcctcctgaagaaaagattctcccatagacccgtgcaggagaagttcgtgtgcctgaactgcggcttcgagacacacgcagccgagcaagccgccctgaacatcgccagatcctggctgttcctgcggagccaggagtacaagaaataccagacaaacaagacaaccggcaacaccgataagagagccttcgtcgagacctggcagtccttttaccggaagaagcttaaggaggtgtggaaacctgccgtgcggtctggcggatctggcggaggctccaccagccccaagaaaaagagaaaagtctaagctgccttctgcggggcttgccttctggccatgcccttcttctctcccttgcacctgtacctcttggtctttgaataaagcctgagtaggaaggctagcaaaaaaaaaaaaaaaaaaaaaaaaaaaaaaaaaaaaaaaaaaaaaaaaaaaaaaaaaaaaaaaaaaaaaaaaaaaaaaaa

SEQ ID NO: 12104 - RNA, 5785 nt, synthetic construct
  source 1..5785: mol_type = other RNA
aggaaataagagagaaaagaagagtaagaagaaatataagagccaccatggcccctaagaagaagcgtaaagtgagccggatggaacgcctcgtctacgaggtgcggcagaagtgcagaaacatcgaggacatctgcatctcctgcggatctctgaacgtgaccctggagcacccactgttcatcggcggcatgtgccagaactgtaaaaactgttttctggagtgtgcctatcaatacgacgatgacggctaccagagctactgcaccatctgttgcggcggaagagaggtgctgatgtgtggaaataacaactgctgccggtgcttctgcgtggaatgcgtggacctgctggtgggccccggcgccgcccaggccgctattaaggaagatccttggaactgctacatgtgcggccacaagggcacatacggcctgctgagacggagagaggactggcctagcagactgcagatgttcttcgccaataaccacgaccaggagttcgacccccctaaggtgtaccctcccgtccccgccgagaagagaaagcccatccgggtcctgagcctgttcgatggcatcgccaccggtctgctggtgctgaaggacctgggcatccaggtggataggtacattgcctccgaggtgtgcgaggactccatcaccgtgggaatggtgcgtcatcagggcaagatcatgtacgtgggcgacgtgcggagcgtgacacagaagcatatccaggagtggggccctttcgacctggtgatcggcggcagcccttgcaatgacctgagcatcgtgaacccagcccggaagggcctgtacgagggaaccggcagactgttcttcgagttttacagactgctgcacgacgcccggcctaaggaaggcgacgaccggcccttcttttggctgttcgagaatgtggtggccatgggagtcagcgacaagcgggatattagccggttcctggagagcaaccccgtgatgatcgatgccaaggaagtgagcgccgcccaccgggccagatacttctggggcaatctgcctggcatgaacagacccctggccagcaccgtgaacgacaagctggagctgcaggagtgcctggagcacggccggatcgccaagttcagcaaggtgagaaccatcaccacccgaagcaacagcatcaaacaaggcaaggaccagcactttcctgtgttcatgaacgagaaggaggacatcctgtggtgtaccgagatggagagagtgttcgggttcccagtccactacacagatgtcagcaacatgtctagactggccagacagagactgctgggaagaagctggtccgtccctgtgatcagacacctgttcgcccctctgaaggagtacttcgcctgcgtgagcagcggcaacagcaacgccaacagccggggccccagcttctctagcggcctggtgccactgtccctgagagggagccacatgggccccatggagatctacaaaaccgtgagcgcctggaagcggcagcctgtgcgcgtgctgagcctgtttcggaatatcgataaagtcctgaaaagcctgggattcctggagagcggctctggctccggcggtggcaccctgaagtacgtggaggatgtgacaaacgtggtcagacgggatgtggagaagtggggccccttcgatctggtgtacggcagcacccaacccctgggcagctcttgtgaccggtgccctggctggtacatgtttcagttccaccggatcctgcagtacgccctgccgagacaggagtcccagcggccattcttttggattttcatggacaacttgctgctgaccgaggatgaccaggaaactaccactcggttcctgcagaccgaagccgtgaccctgcaggacgtgagaggccgggactaccagaacgccatgcgggtgtggtccaacatccctggactgaaaagcaagcacgcacctctgacccctaaagaagaggagtacctgcaggcccaggtgcggagcagaagcaagctggacgcccctaaggtggatctgctggtgaagaattgcctcctgcccctgagagagtacttcaagtatttcagccagaatagtctgcccctgggaggcagcggcggcggcagccagagccccctgaccttcggcgacgtggccgtggagttcagcggcgaggagtgggcctggctggacagcgcccagaggagcctgcacaggagcgtgatgctggagaactacaggaacctggccagcctgggcctgtgcctgagcaagcccgagatgatcagcagcctggagcagaggaaggagccctgggccgtgaagaggaagagcaccaggggcatgaggcccgacagccagaccctgggcggcccaagcagcggcgcccctcctcccagcggcggcagcccagccggctccccaacctctaccgaggagggcacctctgagtccgccacccccgagagcggccctggcacctccaccgagcccagcgagggcagcgcacccggcagccctgccggcagccccacctccacagaggagggaaccagcaccgagcccagcgaaggcagcgccccaggcaccagcaccgagcctagtgagcaggagattaaacggatcaacaagatcagaagaagacttgtgaaagacagcaacaccaagaaggccggcaagacaggccccatgaaaaccctgctggttagagtgatgacacccgatctgagagagcggctggaaaacctgagaaagaagcctgaaaatatcccccagcccatcagcaatacatctagagccaacctgaataagctgctgaccgattacaccgaaatgaagaaggcgatcctgcatgtgtactgggaagagttccagaaggaccctgtgggcctgatgagccgggtggcccagcctgccagcaagaagatcgatcagaacaagctgaaacctgagatggacgagaagggcaacctgaccaccgccggctttgcctgctctcagtgtggccagcccctgttcgtgtacaagctggagcaggtgtctgagaagggcaaggcttacaccaactacttcggacggtgcaatgtggccgagcacgaaaagctgatcctgctggcccagctgaagcccgagaaggatagcgacgaagccgtgacatatagcctgggaaagtttgggcagagggccctggatttctacagcattcatgtgaccaaggagtccacccaccccgtgaagcccctggcccagatcgccggaaacagatacgcctccggacctgtgggaaaggccctgagcgacgcatgtatgggcacaatcgcctccttcctgtctaagtaccaggacatcatcatcgaacaccagaaggtggtgaagggcaaccagaagagactggagagcctgcgggagctggccggcaaggaaaacctggaataccctagcgtgaccctgccacctcagcctcacaccaaggagggcgttgatgcctacaacgaagtgatcgcccgggtgcgaatgtgggtgaacctgaacctgtggcagaagctgaagctaagcagagatgatgccaagcctctgctgagactgaagggattcccttcctttcctctggtcgagagacaggccaacgaagtggactggtgggacatggtgtgtaacgtgaagaagctgatcaacgagaaaaaggaggatggcaaggtgttttggcagaatctggctggctacaagagacaggaagccctgagaccatacctgagcagcgaggaagatcggaagaagggaaagaaattcgctcggtaccagctgggcgacctgctgctgcacctggaaaagaagcacggcgaggactggggaaaggtgtacgacgaggcctgggagcggattgacaagaaagtggaaggcctgagcaagcacatcaagctggaagaggaacggagaagcgaggacgcccagagcaaggccgccctgaccgactggctgcgggctaaggccagcttcgtgatcgagggcctgaaggaggccgacaaggacgagttctgcagatgcgagctgaagctgcagaagtggtacggggacctgcggggaaagcccttcgccatcgaagccgagaacagcatcctggacatcagcggcttcagcaagcagtacaactgtgccttcatctggcagaaggacggcgtgaagaagctgaacctgtacctgatcatcaactacttcaagggcggcaagctgcggttcaagaagatcaaacctgaagccttcgaagccaacagattctacaccgtgatcaacaaaaagagcggcgagatcgtgcccatggaggtgaacttcaacttcgacgaccccaacctgatcatcctgcctctggcctttggcaagagacagggcagagaattcatctggaacgacctgctgtccctggaaaccggcagcctgaagctggccaacggaagagtgatcgagaagacactgtacaacagaagaacccggcaggatgagcctgccctgttcgtggccctgaccttcgagcggcgggaggtcctggactcctccaatatcaaaccaatgaacctgatcggcgtggcaagaggcgaaaacatccccgccgtgatcgccctgaccgaccccgagggctgcccactgagccggtttaaggatagcctgggaaacccaacccacatcctgagaatcggcgagagctataaggagaagcagcggaccatccaggccaagaaggaggtggagcagcggagagccggcggctacagccggaagtacgccagcaaagccaagaatctggcagacgatatggtgagaaacaccgctagagatctgctgtactacgccgtgacccaggatgccatgctgatcttcgccaacctgagccggggcttcggccggcagggcaagcggaccttcatggccgagagacagtacacacggatggaggactggctgaccgccaagctggcctacgagggcctgagcaagacctacctgtccaagacactggcccagtacacctccaagacatgcagcaactgtgggtttaccatcaccagcgccgactacgacagggtgctggagaagctgaagaagacagcaacaggctggatgaccacaattaacggcaaggagctgaaggtggagggccagattacctactacaacagatacaagagacagaacgtagtcaaggacctgtccgtcgagctggatagactgagcgaagaatctgtgaacaacgacatctcctcctggacaaagggcagaagcggagaagctctgagcctcctgaagaaaagattctcccatagacccgtgcaggagaagttcgtgtgcctgaactgcggcttcgagacacacgcagccgagcaagccgccctgaacatcgccagatcctggctgttcctgcggagccaggagtacaagaaataccagacaaacaagacaaccggcaacaccgataagagagccttcgtcgagacctggcagtccttttaccggaagaagcttaaggaggtgtggaaacctgccgtgcggtctggcggatctggcggaggctccaccagccccaagaaaaagagaaaagtctaagctgccttctgcggggcttgccttctggccatgcccttcttctctcccttgcacctgtacctcttggtctttgaataaagcctgagtaggaaggctagcaaaaaaaaaaaaaaaaaaaaaaaaaaaaaaaaaaaaaaaaaaaaaaaaaaaaaaaaaaaaaaaaaaaaaaaaaaaaaaaa

SEQ ID NO: 12105 - RNA, 5785 nt, synthetic construct
  source 1..5785: mol_type = other RNA
aggaaataagagagaaaagaagagtaagaagaaatataagagccaccatggcccctaagaagaagcgtaaagtgagccggatggaacgcctcgtctacgaggtgcggcagaagtgcagaaacatcgaggacatctgcatctcctgcggatctctgaacgtgaccctggagcacccactgttcatcggcggcatgtgccagaactgtaaaaactgttttctggagtgtgcctatcaatacgacgatgacggctaccagagctactgcaccatctgttgcggcggaagagaggtgctgatgtgtggaaataacaactgctgccggtgcttctgcgtggaatgcgtggacctgctggtgggccccggcgccgcccaggccgctattaaggaagatccttggaactgctacatgtgcggccacaagggcacatacggcctgctgagacggagagaggactggcctagcagactgcagatgttcttcgccaataaccacgaccaggagttcgacccccctaaggtgtaccctcccgtccccgccgagaagagaaagcccatccgggtcctgagcctgttcgatggcatcgccaccggtctgctggtgctgaaggacctgggcatccaggtggataggtacattgcctccgaggtgtgcgaggactccatcaccgtgggaatggtgcgtcatcagggcaagatcatgtacgtgggcgacgtgcggagcgtgacacagaagcatatccaggagtggggccctttcgacctggtgatcggcggcagcccttgcaatgacctgagcatcgtgaacccagcccggaagggcctgtacgagggaaccggcagactgttcttcgagttttacagactgctgcacgacgcccggcctaaggaaggcgacgaccggcccttcttttggctgttcgagaatgtggtggccatgggagtcagcgacaagcgggatattagccggttcctggagagcaaccccgtgatgatcgatgccaaggaagtgagcgccgcccaccgggccagatacttctggggcaatctgcctggcatgaacagacccctggccagcaccgtgaacgacaagctggagctgcaggagtgcctggagcacggccggatcgccaagttcagcaaggtgagaaccatcaccacccgaagcaacagcatcaaacaaggcaaggaccagcactttcctgtgttcatgaacgagaaggaggacatcctgtggtgtaccgagatggagagagtgttcgggttcccagtccactacacagatgtcagcaacatgtctagactggccagacagagactgctgggaagaagctggtccgtccctgtgatcagacacctgttcgcccctctgaaggagtacttcgcctgcgtgagcagcggcaacagcaacgccaacagccggggccccagcttctctagcggcctggtgccactgtccctgagagggagccacatgggccccatggagatctacaaaaccgtgagcgcctggaagcggcagcctgtgcgcgtgctgagcctgtttcggaatatcgataaagtcctgaaaagcctgggattcctggagagcggctctggctccggcggtggcaccctgaagtacgtggaggatgtgacaaacgtggtcagacgggatgtggagaagtggggccccttcgatctggtgtacggcagcacccaacccctgggcagctcttgtgaccggtgccctggctggtacatgtttcagttccaccggatcctgcagtacgccctgccgagacaggagtcccagcggccattcttttggattttcatggacaacttgctgctgaccgaggatgaccaggaaactaccactcggttcctgcagaccgaagccgtgaccctgcaggacgtgagaggccgggactaccagaacgccatgcgggtgtggtccaacatccctggactgaaaagcaagcacgcacctctgacccctaaagaagaggagtacctgcaggcccaggtgcggagcagaagcaagctggacgcccctaaggtggatctgctggtgaagaattgcctcctgcccctgagagagtacttcaagtatttcagccagaatagtctgcccctgggaggcagcggcggcggcatggccttcgaggacgtggccgtgtacttcagccaggaggagtggggcctgctggacaccgcccagagggccctgtacaggagggtgatgctggacaacttcgccctggtggccagcctgggcctgagcaccagcaggcccagggtggtgatccagctggagaggggcgaggagccctgggtgcccagcggcaccgacaccaccctgagcaggaccacctacaggaggaggaaccccggcagcggcggcccaagcagcggcgcccctcctcccagcggcggcagcccagccggctccccaacctctaccgaggagggcacctctgagtccgccacccccgagagcggccctggcacctccaccgagcccagcgagggcagcgcacccggcagccctgccggcagccccacctccacagaggagggaaccagcaccgagcccagcgaaggcagcgccccaggcaccagcaccgagcctagtgagcaggagattaaacggatcaacaagatcagaagaagacttgtgaaagacagcaacaccaagaaggccggcaagacaggccccatgaaaaccctgctggttagagtgatgacacccgatctgagagagcggctggaaaacctgagaaagaagcctgaaaatatcccccagcccatcagcaatacatctagagccaacctgaataagctgctgaccgattacaccgaaatgaagaaggcgatcctgcatgtgtactgggaagagttccagaaggaccctgtgggcctgatgagccgggtggcccagcctgccagcaagaagatcgatcagaacaagctgaaacctgagatggacgagaagggcaacctgaccaccgccggctttgcctgctctcagtgtggccagcccctgttcgtgtacaagctggagcaggtgtctgagaagggcaaggcttacaccaactacttcggacggtgcaatgtggccgagcacgaaaagctgatcctgctggcccagctgaagcccgagaaggatagcgacgaagccgtgacatatagcctgggaaagtttgggcagagggccctggatttctacagcattcatgtgaccaaggagtccacccaccccgtgaagcccctggcccagatcgccggaaacagatacgcctccggacctgtgggaaaggccctgagcgacgcatgtatgggcacaatcgcctccttcctgtctaagtaccaggacatcatcatcgaacaccagaaggtggtgaagggcaaccagaagagactggagagcctgcgggagctggccggcaaggaaaacctggaataccctagcgtgaccctgccacctcagcctcacaccaaggagggcgttgatgcctacaacgaagtgatcgcccgggtgcgaatgtgggtgaacctgaacctgtggcagaagctgaagctaagcagagatgatgccaagcctctgctgagactgaagggattcccttcctttcctctggtcgagagacaggccaacgaagtggactggtgggacatggtgtgtaacgtgaagaagctgatcaacgagaaaaaggaggatggcaaggtgttttggcagaatctggctggctacaagagacaggaagccctgagaccatacctgagcagcgaggaagatcggaagaagggaaagaaattcgctcggtaccagctgggcgacctgctgctgcacctggaaaagaagcacggcgaggactggggaaaggtgtacgacgaggcctgggagcggattgacaagaaagtggaaggcctgagcaagcacatcaagctggaagaggaacggagaagcgaggacgcccagagcaaggccgccctgaccgactggctgcgggctaaggccagcttcgtgatcgagggcctgaaggaggccgacaaggacgagttctgcagatgcgagctgaagctgcagaagtggtacggggacctgcggggaaagcccttcgccatcgaagccgagaacagcatcctggacatcagcggcttcagcaagcagtacaactgtgccttcatctggcagaaggacggcgtgaagaagctgaacctgtacctgatcatcaactacttcaagggcggcaagctgcggttcaagaagatcaaacctgaagccttcgaagccaacagattctacaccgtgatcaacaaaaagagcggcgagatcgtgcccatggaggtgaacttcaacttcgacgaccccaacctgatcatcctgcctctggcctttggcaagagacagggcagagaattcatctggaacgacctgctgtccctggaaaccggcagcctgaagctggccaacggaagagtgatcgagaagacactgtacaacagaagaacccggcaggatgagcctgccctgttcgtggccctgaccttcgagcggcgggaggtcctggactcctccaatatcaaaccaatgaacctgatcggcgtggcaagaggcgaaaacatccccgccgtgatcgccctgaccgaccccgagggctgcccactgagccggtttaaggatagcctgggaaacccaacccacatcctgagaatcggcgagagctataaggagaagcagcggaccatccaggccaagaaggaggtggagcagcggagagccggcggctacagccggaagtacgccagcaaagccaagaatctggcagacgatatggtgagaaacaccgctagagatctgctgtactacgccgtgacccaggatgccatgctgatcttcgccaacctgagccggggcttcggccggcagggcaagcggaccttcatggccgagagacagtacacacggatggaggactggctgaccgccaagctggcctacgagggcctgagcaagacctacctgtccaagacactggcccagtacacctccaagacatgcagcaactgtgggtttaccatcaccagcgccgactacgacagggtgctggagaagctgaagaagacagcaacaggctggatgaccacaattaacggcaaggagctgaaggtggagggccagattacctactacaacagatacaagagacagaacgtagtcaaggacctgtccgtcgagctggatagactgagcgaagaatctgtgaacaacgacatctcctcctggacaaagggcagaagcggagaagctctgagcctcctgaagaaaagattctcccatagacccgtgcaggagaagttcgtgtgcctgaactgcggcttcgagacacacgcagccgagcaagccgccctgaacatcgccagatcctggctgttcctgcggagccaggagtacaagaaataccagacaaacaagacaaccggcaacaccgataagagagccttcgtcgagacctggcagtccttttaccggaagaagcttaaggaggtgtggaaacctgccgtgcggtctggcggatctggcggaggctccaccagccccaagaaaaagagaaaagtctaagctgccttctgcggggcttgccttctggccatgcccttcttctctcccttgcacctgtacctcttggtctttgaataaagcctgagtaggaaggctagcaaaaaaaaaaaaaaaaaaaaaaaaaaaaaaaaaaaaaaaaaaaaaaaaaaaaaaaaaaaaaaaaaaaaaaaaaaaaaaaa

SEQ ID NO: 12106 - RNA, 5785 nt, synthetic construct
  source 1..5785: mol_type = other RNA
aggaaataagagagaaaagaagagtaagaagaaatataagagccaccatggcccctaagaagaagcgtaaagtgagccggatggaacgcctcgtctacgaggtgcggcagaagtgcagaaacatcgaggacatctgcatctcctgcggatctctgaacgtgaccctggagcacccactgttcatcggcggcatgtgccagaactgtaaaaactgttttctggagtgtgcctatcaatacgacgatgacggctaccagagctactgcaccatctgttgcggcggaagagaggtgctgatgtgtggaaataacaactgctgccggtgcttctgcgtggaatgcgtggacctgctggtgggccccggcgccgcccaggccgctattaaggaagatccttggaactgctacatgtgcggccacaagggcacatacggcctgctgagacggagagaggactggcctagcagactgcagatgttcttcgccaataaccacgaccaggagttcgacccccctaaggtgtaccctcccgtccccgccgagaagagaaagcccatccgggtcctgagcctgttcgatggcatcgccaccggtctgctggtgctgaaggacctgggcatccaggtggataggtacattgcctccgaggtgtgcgaggactccatcaccgtgggaatggtgcgtcatcagggcaagatcatgtacgtgggcgacgtgcggagcgtgacacagaagcatatccaggagtggggccctttcgacctggtgatcggcggcagcccttgcaatgacctgagcatcgtgaacccagcccggaagggcctgtacgagggaaccggcagactgttcttcgagttttacagactgctgcacgacgcccggcctaaggaaggcgacgaccggcccttcttttggctgttcgagaatgtggtggccatgggagtcagcgacaagcgggatattagccggttcctggagagcaaccccgtgatgatcgatgccaaggaagtgagcgccgcccaccgggccagatacttctggggcaatctgcctggcatgaacagacccctggccagcaccgtgaacgacaagctggagctgcaggagtgcctggagcacggccggatcgccaagttcagcaaggtgagaaccatcaccacccgaagcaacagcatcaaacaaggcaaggaccagcactttcctgtgttcatgaacgagaaggaggacatcctgtggtgtaccgagatggagagagtgttcgggttcccagtccactacacagatgtcagcaacatgtctagactggccagacagagactgctgggaagaagctggtccgtccctgtgatcagacacctgttcgcccctctgaaggagtacttcgcctgcgtgagcagcggcaacagcaacgccaacagccggggccccagcttctctagcggcctggtgccactgtccctgagagggagccacatgggccccatggagatctacaaaaccgtgagcgcctggaagcggcagcctgtgcgcgtgctgagcctgtttcggaatatcgataaagtcctgaaaagcctgggattcctggagagcggctctggctccggcggtggcaccctgaagtacgtggaggatgtgacaaacgtggtcagacgggatgtggagaagtggggccccttcgatctggtgtacggcagcacccaacccctgggcagctcttgtgaccggtgccctggctggtacatgtttcagttccaccggatcctgcagtacgccctgccgagacaggagtcccagcggccattcttttggattttcatggacaacttgctgctgaccgaggatgaccaggaaactaccactcggttcctgcagaccgaagccgtgaccctgcaggacgtgagaggccgggactaccagaacgccatgcgggtgtggtccaacatccctggactgaaaagcaagcacgcacctctgacccctaaagaagaggagtacctgcaggcccaggtgcggagcagaagcaagctggacgcccctaaggtggatctgctggtgaagaattgcctcctgcccctgagagagtacttcaagtatttcagccagaatagtctgcccctgggaggcagcggcggcggcagccagagcagcgtgaccttcggcgacgtggccgtggacttcagccaggacgagtgggcctggctggacgccacccagaggagcctgtacaggagcgtgatgctggagaactacaggaacctggtgagcctgggcctgtgcagcagcaagcccgacatgatcagcagcctggagcagaggaaggagccctggaccgtgaagaggaagctgcccggcggcggctgccccgacccccaggccgtgggcggcccaagcagcggcgcccctcctcccagcggcggcagcccagccggctccccaacctctaccgaggagggcacctctgagtccgccacccccgagagcggccctggcacctccaccgagcccagcgagggcagcgcacccggcagccctgccggcagccccacctccacagaggagggaaccagcaccgagcccagcgaaggcagcgccccaggcaccagcaccgagcctagtgagcaggagattaaacggatcaacaagatcagaagaagacttgtgaaagacagcaacaccaagaaggccggcaagacaggccccatgaaaaccctgctggttagagtgatgacacccgatctgagagagcggctggaaaacctgagaaagaagcctgaaaatatcccccagcccatcagcaatacatctagagccaacctgaataagctgctgaccgattacaccgaaatgaagaaggcgatcctgcatgtgtactgggaagagttccagaaggaccctgtgggcctgatgagccgggtggcccagcctgccagcaagaagatcgatcagaacaagctgaaacctgagatggacgagaagggcaacctgaccaccgccggctttgcctgctctcagtgtggccagcccctgttcgtgtacaagctggagcaggtgtctgagaagggcaaggcttacaccaactacttcggacggtgcaatgtggccgagcacgaaaagctgatcctgctggcccagctgaagcccgagaaggatagcgacgaagccgtgacatatagcctgggaaagtttgggcagagggccctggatttctacagcattcatgtgaccaaggagtccacccaccccgtgaagcccctggcccagatcgccggaaacagatacgcctccggacctgtgggaaaggccctgagcgacgcatgtatgggcacaatcgcctccttcctgtctaagtaccaggacatcatcatcgaacaccagaaggtggtgaagggcaaccagaagagactggagagcctgcgggagctggccggcaaggaaaacctggaataccctagcgtgaccctgccacctcagcctcacaccaaggagggcgttgatgcctacaacgaagtgatcgcccgggtgcgaatgtgggtgaacctgaacctgtggcagaagctgaagctaagcagagatgatgccaagcctctgctgagactgaagggattcccttcctttcctctggtcgagagacaggccaacgaagtggactggtgggacatggtgtgtaacgtgaagaagctgatcaacgagaaaaaggaggatggcaaggtgttttggcagaatctggctggctacaagagacaggaagccctgagaccatacctgagcagcgaggaagatcggaagaagggaaagaaattcgctcggtaccagctgggcgacctgctgctgcacctggaaaagaagcacggcgaggactggggaaaggtgtacgacgaggcctgggagcggattgacaagaaagtggaaggcctgagcaagcacatcaagctggaagaggaacggagaagcgaggacgcccagagcaaggccgccctgaccgactggctgcgggctaaggccagcttcgtgatcgagggcctgaaggaggccgacaaggacgagttctgcagatgcgagctgaagctgcagaagtggtacggggacctgcggggaaagcccttcgccatcgaagccgagaacagcatcctggacatcagcggcttcagcaagcagtacaactgtgccttcatctggcagaaggacggcgtgaagaagctgaacctgtacctgatcatcaactacttcaagggcggcaagctgcggttcaagaagatcaaacctgaagccttcgaagccaacagattctacaccgtgatcaacaaaaagagcggcgagatcgtgcccatggaggtgaacttcaacttcgacgaccccaacctgatcatcctgcctctggcctttggcaagagacagggcagagaattcatctggaacgacctgctgtccctggaaaccggcagcctgaagctggccaacggaagagtgatcgagaagacactgtacaacagaagaacccggcaggatgagcctgccctgttcgtggccctgaccttcgagcggcgggaggtcctggactcctccaatatcaaaccaatgaacctgatcggcgtggcaagaggcgaaaacatccccgccgtgatcgccctgaccgaccccgagggctgcccactgagccggtttaaggatagcctgggaaacccaacccacatcctgagaatcggcgagagctataaggagaagcagcggaccatccaggccaagaaggaggtggagcagcggagagccggcggctacagccggaagtacgccagcaaagccaagaatctggcagacgatatggtgagaaacaccgctagagatctgctgtactacgccgtgacccaggatgccatgctgatcttcgccaacctgagccggggcttcggccggcagggcaagcggaccttcatggccgagagacagtacacacggatggaggactggctgaccgccaagctggcctacgagggcctgagcaagacctacctgtccaagacactggcccagtacacctccaagacatgcagcaactgtgggtttaccatcaccagcgccgactacgacagggtgctggagaagctgaagaagacagcaacaggctggatgaccacaattaacggcaaggagctgaaggtggagggccagattacctactacaacagatacaagagacagaacgtagtcaaggacctgtccgtcgagctggatagactgagcgaagaatctgtgaacaacgacatctcctcctggacaaagggcagaagcggagaagctctgagcctcctgaagaaaagattctcccatagacccgtgcaggagaagttcgtgtgcctgaactgcggcttcgagacacacgcagccgagcaagccgccctgaacatcgccagatcctggctgttcctgcggagccaggagtacaagaaataccagacaaacaagacaaccggcaacaccgataagagagccttcgtcgagacctggcagtccttttaccggaagaagcttaaggaggtgtggaaacctgccgtgcggtctggcggatctggcggaggctccaccagccccaagaaaaagagaaaagtctaagctgccttctgcggggcttgccttctggccatgcccttcttctctcccttgcacctgtacctcttggtctttgaataaagcctgagtaggaaggctagcaaaaaaaaaaaaaaaaaaaaaaaaaaaaaaaaaaaaaaaaaaaaaaaaaaaaaaaaaaaaaaaaaaaaaaaaaaaaaaaa

SEQ ID NO: 12107 - RNA, 5785 nt, synthetic construct
  source 1..5785: mol_type = other RNA
aggaaataagagagaaaagaagagtaagaagaaatataagagccaccatggcccctaagaagaagcgtaaagtgagccggatggaacgcctcgtctacgaggtgcggcagaagtgcagaaacatcgaggacatctgcatctcctgcggatctctgaacgtgaccctggagcacccactgttcatcggcggcatgtgccagaactgtaaaaactgttttctggagtgtgcctatcaatacgacgatgacggctaccagagctactgcaccatctgttgcggcggaagagaggtgctgatgtgtggaaataacaactgctgccggtgcttctgcgtggaatgcgtggacctgctggtgggccccggcgccgcccaggccgctattaaggaagatccttggaactgctacatgtgcggccacaagggcacatacggcctgctgagacggagagaggactggcctagcagactgcagatgttcttcgccaataaccacgaccaggagttcgacccccctaaggtgtaccctcccgtccccgccgagaagagaaagcccatccgggtcctgagcctgttcgatggcatcgccaccggtctgctggtgctgaaggacctgggcatccaggtggataggtacattgcctccgaggtgtgcgaggactccatcaccgtgggaatggtgcgtcatcagggcaagatcatgtacgtgggcgacgtgcggagcgtgacacagaagcatatccaggagtggggccctttcgacctggtgatcggcggcagcccttgcaatgacctgagcatcgtgaacccagcccggaagggcctgtacgagggaaccggcagactgttcttcgagttttacagactgctgcacgacgcccggcctaaggaaggcgacgaccggcccttcttttggctgttcgagaatgtggtggccatgggagtcagcgacaagcgggatattagccggttcctggagagcaaccccgtgatgatcgatgccaaggaagtgagcgccgcccaccgggccagatacttctggggcaatctgcctggcatgaacagacccctggccagcaccgtgaacgacaagctggagctgcaggagtgcctggagcacggccggatcgccaagttcagcaaggtgagaaccatcaccacccgaagcaacagcatcaaacaaggcaaggaccagcactttcctgtgttcatgaacgagaaggaggacatcctgtggtgtaccgagatggagagagtgttcgggttcccagtccactacacagatgtcagcaacatgtctagactggccagacagagactgctgggaagaagctggtccgtccctgtgatcagacacctgttcgcccctctgaaggagtacttcgcctgcgtgagcagcggcaacagcaacgccaacagccggggccccagcttctctagcggcctggtgccactgtccctgagagggagccacatgggccccatggagatctacaaaaccgtgagcgcctggaagcggcagcctgtgcgcgtgctgagcctgtttcggaatatcgataaagtcctgaaaagcctgggattcctggagagcggctctggctccggcggtggcaccctgaagtacgtggaggatgtgacaaacgtggtcagacgggatgtggagaagtggggccccttcgatctggtgtacggcagcacccaacccctgggcagctcttgtgaccggtgccctggctggtacatgtttcagttccaccggatcctgcagtacgccctgccgagacaggagtcccagcggccattcttttggattttcatggacaacttgctgctgaccgaggatgaccaggaaactaccactcggttcctgcagaccgaagccgtgaccctgcaggacgtgagaggccgggactaccagaacgccatgcgggtgtggtccaacatccctggactgaaaagcaagcacgcacctctgacccctaaagaagaggagtacctgcaggcccaggtgcggagcagaagcaagctggacgcccctaaggtggatctgctggtgaagaattgcctcctgcccctgagagagtacttcaagtatttcagccagaatagtctgcccctgggaggcagcggcggcggcagccagggcagcgtgaccttcagggacgtggccatcgacttcagccaggaggagtggaagtggctgcagcccgcccagagggacctgtacaggagggtgatgctggagaactacggccacctggtgagcctgggcctgagcatcagcaagcccgacgtggtgagcctgctggagcagggcaaggagccctggctgggcaagaggaacgtgaagagggacctgttcagcgccagcgagagcagcggcggcccaagcagcggcgcccctcctcccagcggcggcagcccagccggctccccaacctctaccgaggagggcacctctgagtccgccacccccgagagcggccctggcacctccaccgagcccagcgagggcagcgcacccggcagccctgccggcagccccacctccacagaggagggaaccagcaccgagcccagcgaaggcagcgccccaggcaccagcaccgagcctagtgagcaggagattaaacggatcaacaagatcagaagaagacttgtgaaagacagcaacaccaagaaggccggcaagacaggccccatgaaaaccctgctggttagagtgatgacacccgatctgagagagcggctggaaaacctgagaaagaagcctgaaaatatcccccagcccatcagcaatacatctagagccaacctgaataagctgctgaccgattacaccgaaatgaagaaggcgatcctgcatgtgtactgggaagagttccagaaggaccctgtgggcctgatgagccgggtggcccagcctgccagcaagaagatcgatcagaacaagctgaaacctgagatggacgagaagggcaacctgaccaccgccggctttgcctgctctcagtgtggccagcccctgttcgtgtacaagctggagcaggtgtctgagaagggcaaggcttacaccaactacttcggacggtgcaatgtggccgagcacgaaaagctgatcctgctggcccagctgaagcccgagaaggatagcgacgaagccgtgacatatagcctgggaaagtttgggcagagggccctggatttctacagcattcatgtgaccaaggagtccacccaccccgtgaagcccctggcccagatcgccggaaacagatacgcctccggacctgtgggaaaggccctgagcgacgcatgtatgggcacaatcgcctccttcctgtctaagtaccaggacatcatcatcgaacaccagaaggtggtgaagggcaaccagaagagactggagagcctgcgggagctggccggcaaggaaaacctggaataccctagcgtgaccctgccacctcagcctcacaccaaggagggcgttgatgcctacaacgaagtgatcgcccgggtgcgaatgtgggtgaacctgaacctgtggcagaagctgaagctaagcagagatgatgccaagcctctgctgagactgaagggattcccttcctttcctctggtcgagagacaggccaacgaagtggactggtgggacatggtgtgtaacgtgaagaagctgatcaacgagaaaaaggaggatggcaaggtgttttggcagaatctggctggctacaagagacaggaagccctgagaccatacctgagcagcgaggaagatcggaagaagggaaagaaattcgctcggtaccagctgggcgacctgctgctgcacctggaaaagaagcacggcgaggactggggaaaggtgtacgacgaggcctgggagcggattgacaagaaagtggaaggcctgagcaagcacatcaagctggaagaggaacggagaagcgaggacgcccagagcaaggccgccctgaccgactggctgcgggctaaggccagcttcgtgatcgagggcctgaaggaggccgacaaggacgagttctgcagatgcgagctgaagctgcagaagtggtacggggacctgcggggaaagcccttcgccatcgaagccgagaacagcatcctggacatcagcggcttcagcaagcagtacaactgtgccttcatctggcagaaggacggcgtgaagaagctgaacctgtacctgatcatcaactacttcaagggcggcaagctgcggttcaagaagatcaaacctgaagccttcgaagccaacagattctacaccgtgatcaacaaaaagagcggcgagatcgtgcccatggaggtgaacttcaacttcgacgaccccaacctgatcatcctgcctctggcctttggcaagagacagggcagagaattcatctggaacgacctgctgtccctggaaaccggcagcctgaagctggccaacggaagagtgatcgagaagacactgtacaacagaagaacccggcaggatgagcctgccctgttcgtggccctgaccttcgagcggcgggaggtcctggactcctccaatatcaaaccaatgaacctgatcggcgtggcaagaggcgaaaacatccccgccgtgatcgccctgaccgaccccgagggctgcccactgagccggtttaaggatagcctgggaaacccaacccacatcctgagaatcggcgagagctataaggagaagcagcggaccatccaggccaagaaggaggtggagcagcggagagccggcggctacagccggaagtacgccagcaaagccaagaatctggcagacgatatggtgagaaacaccgctagagatctgctgtactacgccgtgacccaggatgccatgctgatcttcgccaacctgagccggggcttcggccggcagggcaagcggaccttcatggccgagagacagtacacacggatggaggactggctgaccgccaagctggcctacgagggcctgagcaagacctacctgtccaagacactggcccagtacacctccaagacatgcagcaactgtgggtttaccatcaccagcgccgactacgacagggtgctggagaagctgaagaagacagcaacaggctggatgaccacaattaacggcaaggagctgaaggtggagggccagattacctactacaacagatacaagagacagaacgtagtcaaggacctgtccgtcgagctggatagactgagcgaagaatctgtgaacaacgacatctcctcctggacaaagggcagaagcggagaagctctgagcctcctgaagaaaagattctcccatagacccgtgcaggagaagttcgtgtgcctgaactgcggcttcgagacacacgcagccgagcaagccgccctgaacatcgccagatcctggctgttcctgcggagccaggagtacaagaaataccagacaaacaagacaaccggcaacaccgataagagagccttcgtcgagacctggcagtccttttaccggaagaagcttaaggaggtgtggaaacctgccgtgcggtctggcggatctggcggaggctccaccagccccaagaaaaagagaaaagtctaagctgccttctgcggggcttgccttctggccatgcccttcttctctcccttgcacctgtacctcttggtctttgaataaagcctgagtaggaaggctagcaaaaaaaaaaaaaaaaaaaaaaaaaaaaaaaaaaaaaaaaaaaaaaaaaaaaaaaaaaaaaaaaaaaaaaaaaaaaaaaa

SEQ ID NO: 12108 - RNA, 5785 nt, synthetic construct
  source 1..5785: mol_type = other RNA
aggaaataagagagaaaagaagagtaagaagaaatataagagccaccatggcccctaagaagaagcgtaaagtgagccggatggaacgcctcgtctacgaggtgcggcagaagtgcagaaacatcgaggacatctgcatctcctgcggatctctgaacgtgaccctggagcacccactgttcatcggcggcatgtgccagaactgtaaaaactgttttctggagtgtgcctatcaatacgacgatgacggctaccagagctactgcaccatctgttgcggcggaagagaggtgctgatgtgtggaaataacaactgctgccggtgcttctgcgtggaatgcgtggacctgctggtgggccccggcgccgcccaggccgctattaaggaagatccttggaactgctacatgtgcggccacaagggcacatacggcctgctgagacggagagaggactggcctagcagactgcagatgttcttcgccaataaccacgaccaggagttcgacccccctaaggtgtaccctcccgtccccgccgagaagagaaagcccatccgggtcctgagcctgttcgatggcatcgccaccggtctgctggtgctgaaggacctgggcatccaggtggataggtacattgcctccgaggtgtgcgaggactccatcaccgtgggaatggtgcgtcatcagggcaagatcatgtacgtgggcgacgtgcggagcgtgacacagaagcatatccaggagtggggccctttcgacctggtgatcggcggcagcccttgcaatgacctgagcatcgtgaacccagcccggaagggcctgtacgagggaaccggcagactgttcttcgagttttacagactgctgcacgacgcccggcctaaggaaggcgacgaccggcccttcttttggctgttcgagaatgtggtggccatgggagtcagcgacaagcgggatattagccggttcctggagagcaaccccgtgatgatcgatgccaaggaagtgagcgccgcccaccgggccagatacttctggggcaatctgcctggcatgaacagacccctggccagcaccgtgaacgacaagctggagctgcaggagtgcctggagcacggccggatcgccaagttcagcaaggtgagaaccatcaccacccgaagcaacagcatcaaacaaggcaaggaccagcactttcctgtgttcatgaacgagaaggaggacatcctgtggtgtaccgagatggagagagtgttcgggttcccagtccactacacagatgtcagcaacatgtctagactggccagacagagactgctgggaagaagctggtccgtccctgtgatcagacacctgttcgcccctctgaaggagtacttcgcctgcgtgagcagcggcaacagcaacgccaacagccggggccccagcttctctagcggcctggtgccactgtccctgagagggagccacatgggccccatggagatctacaaaaccgtgagcgcctggaagcggcagcctgtgcgcgtgctgagcctgtttcggaatatcgataaagtcctgaaaagcctgggattcctggagagcggctctggctccggcggtggcaccctgaagtacgtggaggatgtgacaaacgtggtcagacgggatgtggagaagtggggccccttcgatctggtgtacggcagcacccaacccctgggcagctcttgtgaccggtgccctggctggtacatgtttcagttccaccggatcctgcagtacgccctgccgagacaggagtcccagcggccattcttttggattttcatggacaacttgctgctgaccgaggatgaccaggaaactaccactcggttcctgcagaccgaagccgtgaccctgcaggacgtgagaggccgggactaccagaacgccatgcgggtgtggtccaacatccctggactgaaaagcaagcacgcacctctgacccctaaagaagaggagtacctgcaggcccaggtgcggagcagaagcaagctggacgcccctaaggtggatctgctggtgaagaattgcctcctgcccctgagagagtacttcaagtatttcagccagaatagtctgcccctgggaggcagcggcggcggcatggccttcgaggacgtggccgtgtacttcagccaggaggagtggggcctgctggacaccgcccagagggccctgtacaggagggtgatgctggacaacttcgccctggtggccagcctgggcctgagcaccaccaggcccagggtggtgatccagctggagaggggcgaggagccctgggtgcccagcggcaccgacatgaccatgagcaggaacgcccacaggaggaggaaccccggcagcggcggcccaagcagcggcgcccctcctcccagcggcggcagcccagccggctccccaacctctaccgaggagggcacctctgagtccgccacccccgagagcggccctggcacctccaccgagcccagcgagggcagcgcacccggcagccctgccggcagccccacctccacagaggagggaaccagcaccgagcccagcgaaggcagcgccccaggcaccagcaccgagcctagtgagcaggagattaaacggatcaacaagatcagaagaagacttgtgaaagacagcaacaccaagaaggccggcaagacaggccccatgaaaaccctgctggttagagtgatgacacccgatctgagagagcggctggaaaacctgagaaagaagcctgaaaatatcccccagcccatcagcaatacatctagagccaacctgaataagctgctgaccgattacaccgaaatgaagaaggcgatcctgcatgtgtactgggaagagttccagaaggaccctgtgggcctgatgagccgggtggcccagcctgccagcaagaagatcgatcagaacaagctgaaacctgagatggacgagaagggcaacctgaccaccgccggctttgcctgctctcagtgtggccagcccctgttcgtgtacaagctggagcaggtgtctgagaagggcaaggcttacaccaactacttcggacggtgcaatgtggccgagcacgaaaagctgatcctgctggcccagctgaagcccgagaaggatagcgacgaagccgtgacatatagcctgggaaagtttgggcagagggccctggatttctacagcattcatgtgaccaaggagtccacccaccccgtgaagcccctggcccagatcgccggaaacagatacgcctccggacctgtgggaaaggccctgagcgacgcatgtatgggcacaatcgcctccttcctgtctaagtaccaggacatcatcatcgaacaccagaaggtggtgaagggcaaccagaagagactggagagcctgcgggagctggccggcaaggaaaacctggaataccctagcgtgaccctgccacctcagcctcacaccaaggagggcgttgatgcctacaacgaagtgatcgcccgggtgcgaatgtgggtgaacctgaacctgtggcagaagctgaagctaagcagagatgatgccaagcctctgctgagactgaagggattcccttcctttcctctggtcgagagacaggccaacgaagtggactggtgggacatggtgtgtaacgtgaagaagctgatcaacgagaaaaaggaggatggcaaggtgttttggcagaatctggctggctacaagagacaggaagccctgagaccatacctgagcagcgaggaagatcggaagaagggaaagaaattcgctcggtaccagctgggcgacctgctgctgcacctggaaaagaagcacggcgaggactggggaaaggtgtacgacgaggcctgggagcggattgacaagaaagtggaaggcctgagcaagcacatcaagctggaagaggaacggagaagcgaggacgcccagagcaaggccgccctgaccgactggctgcgggctaaggccagcttcgtgatcgagggcctgaaggaggccgacaaggacgagttctgcagatgcgagctgaagctgcagaagtggtacggggacctgcggggaaagcccttcgccatcgaagccgagaacagcatcctggacatcagcggcttcagcaagcagtacaactgtgccttcatctggcagaaggacggcgtgaagaagctgaacctgtacctgatcatcaactacttcaagggcggcaagctgcggttcaagaagatcaaacctgaagccttcgaagccaacagattctacaccgtgatcaacaaaaagagcggcgagatcgtgcccatggaggtgaacttcaacttcgacgaccccaacctgatcatcctgcctctggcctttggcaagagacagggcagagaattcatctggaacgacctgctgtccctggaaaccggcagcctgaagctggccaacggaagagtgatcgagaagacactgtacaacagaagaacccggcaggatgagcctgccctgttcgtggccctgaccttcgagcggcgggaggtcctggactcctccaatatcaaaccaatgaacctgatcggcgtggcaagaggcgaaaacatccccgccgtgatcgccctgaccgaccccgagggctgcccactgagccggtttaaggatagcctgggaaacccaacccacatcctgagaatcggcgagagctataaggagaagcagcggaccatccaggccaagaaggaggtggagcagcggagagccggcggctacagccggaagtacgccagcaaagccaagaatctggcagacgatatggtgagaaacaccgctagagatctgctgtactacgccgtgacccaggatgccatgctgatcttcgccaacctgagccggggcttcggccggcagggcaagcggaccttcatggccgagagacagtacacacggatggaggactggctgaccgccaagctggcctacgagggcctgagcaagacctacctgtccaagacactggcccagtacacctccaagacatgcagcaactgtgggtttaccatcaccagcgccgactacgacagggtgctggagaagctgaagaagacagcaacaggctggatgaccacaattaacggcaaggagctgaaggtggagggccagattacctactacaacagatacaagagacagaacgtagtcaaggacctgtccgtcgagctggatagactgagcgaagaatctgtgaacaacgacatctcctcctggacaaagggcagaagcggagaagctctgagcctcctgaagaaaagattctcccatagacccgtgcaggagaagttcgtgtgcctgaactgcggcttcgagacacacgcagccgagcaagccgccctgaacatcgccagatcctggctgttcctgcggagccaggagtacaagaaataccagacaaacaagacaaccggcaacaccgataagagagccttcgtcgagacctggcagtccttttaccggaagaagcttaaggaggtgtggaaacctgccgtgcggtctggcggatctggcggaggctccaccagccccaagaaaaagagaaaagtctaagctgccttctgcggggcttgccttctggccatgcccttcttctctcccttgcacctgtacctcttggtctttgaataaagcctgagtaggaaggctagcaaaaaaaaaaaaaaaaaaaaaaaaaaaaaaaaaaaaaaaaaaaaaaaaaaaaaaaaaaaaaaaaaaaaaaaaaaaaaaaa

SEQ ID NO: 12109 - RNA, 5785 nt, synthetic construct
  source 1..5785: mol_type = other RNA
aggaaataagagagaaaagaagagtaagaagaaatataagagccaccatggcccctaagaagaagcgtaaagtgagccggatggaacgcctcgtctacgaggtgcggcagaagtgcagaaacatcgaggacatctgcatctcctgcggatctctgaacgtgaccctggagcacccactgttcatcggcggcatgtgccagaactgtaaaaactgttttctggagtgtgcctatcaatacgacgatgacggctaccagagctactgcaccatctgttgcggcggaagagaggtgctgatgtgtggaaataacaactgctgccggtgcttctgcgtggaatgcgtggacctgctggtgggccccggcgccgcccaggccgctattaaggaagatccttggaactgctacatgtgcggccacaagggcacatacggcctgctgagacggagagaggactggcctagcagactgcagatgttcttcgccaataaccacgaccaggagttcgacccccctaaggtgtaccctcccgtccccgccgagaagagaaagcccatccgggtcctgagcctgttcgatggcatcgccaccggtctgctggtgctgaaggacctgggcatccaggtggataggtacattgcctccgaggtgtgcgaggactccatcaccgtgggaatggtgcgtcatcagggcaagatcatgtacgtgggcgacgtgcggagcgtgacacagaagcatatccaggagtggggccctttcgacctggtgatcggcggcagcccttgcaatgacctgagcatcgtgaacccagcccggaagggcctgtacgagggaaccggcagactgttcttcgagttttacagactgctgcacgacgcccggcctaaggaaggcgacgaccggcccttcttttggctgttcgagaatgtggtggccatgggagtcagcgacaagcgggatattagccggttcctggagagcaaccccgtgatgatcgatgccaaggaagtgagcgccgcccaccgggccagatacttctggggcaatctgcctggcatgaacagacccctggccagcaccgtgaacgacaagctggagctgcaggagtgcctggagcacggccggatcgccaagttcagcaaggtgagaaccatcaccacccgaagcaacagcatcaaacaaggcaaggaccagcactttcctgtgttcatgaacgagaaggaggacatcctgtggtgtaccgagatggagagagtgttcgggttcccagtccactacacagatgtcagcaacatgtctagactggccagacagagactgctgggaagaagctggtccgtccctgtgatcagacacctgttcgcccctctgaaggagtacttcgcctgcgtgagcagcggcaacagcaacgccaacagccggggccccagcttctctagcggcctggtgccactgtccctgagagggagccacatgggccccatggagatctacaaaaccgtgagcgcctggaagcggcagcctgtgcgcgtgctgagcctgtttcggaatatcgataaagtcctgaaaagcctgggattcctggagagcggctctggctccggcggtggcaccctgaagtacgtggaggatgtgacaaacgtggtcagacgggatgtggagaagtggggccccttcgatctggtgtacggcagcacccaacccctgggcagctcttgtgaccggtgccctggctggtacatgtttcagttccaccggatcctgcagtacgccctgccgagacaggagtcccagcggccattcttttggattttcatggacaacttgctgctgaccgaggatgaccaggaaactaccactcggttcctgcagaccgaagccgtgaccctgcaggacgtgagaggccgggactaccagaacgccatgcgggtgtggtccaacatccctggactgaaaagcaagcacgcacctctgacccctaaagaagaggagtacctgcaggcccaggtgcggagcagaagcaagctggacgcccctaaggtggatctgctggtgaagaattgcctcctgcccctgagagagtacttcaagtatttcagccagaatagtctgcccctgggaggcagcggcggcggcaagcccggcgccgtgagcttcgccgacgtggccgtgtacttcagccccgaggagtggggctgcctgaggcccgcccagagggccctgtacagggacgtgatgagggagacctacggccacctgggcgccctgggcttccccggccccaagcccgccctgatcagctggatggagcaggagagcgaggcctggagcagcgccgcccaggaccccgagaagggcgagaacctgggcggcgccaggggcggcccaagcagcggcgcccctcctcccagcggcggcagcccagccggctccccaacctctaccgaggagggcacctctgagtccgccacccccgagagcggccctggcacctccaccgagcccagcgagggcagcgcacccggcagccctgccggcagccccacctccacagaggagggaaccagcaccgagcccagcgaaggcagcgccccaggcaccagcaccgagcctagtgagcaggagattaaacggatcaacaagatcagaagaagacttgtgaaagacagcaacaccaagaaggccggcaagacaggccccatgaaaaccctgctggttagagtgatgacacccgatctgagagagcggctggaaaacctgagaaagaagcctgaaaatatcccccagcccatcagcaatacatctagagccaacctgaataagctgctgaccgattacaccgaaatgaagaaggcgatcctgcatgtgtactgggaagagttccagaaggaccctgtgggcctgatgagccgggtggcccagcctgccagcaagaagatcgatcagaacaagctgaaacctgagatggacgagaagggcaacctgaccaccgccggctttgcctgctctcagtgtggccagcccctgttcgtgtacaagctggagcaggtgtctgagaagggcaaggcttacaccaactacttcggacggtgcaatgtggccgagcacgaaaagctgatcctgctggcccagctgaagcccgagaaggatagcgacgaagccgtgacatatagcctgggaaagtttgggcagagggccctggatttctacagcattcatgtgaccaaggagtccacccaccccgtgaagcccctggcccagatcgccggaaacagatacgcctccggacctgtgggaaaggccctgagcgacgcatgtatgggcacaatcgcctccttcctgtctaagtaccaggacatcatcatcgaacaccagaaggtggtgaagggcaaccagaagagactggagagcctgcgggagctggccggcaaggaaaacctggaataccctagcgtgaccctgccacctcagcctcacaccaaggagggcgttgatgcctacaacgaagtgatcgcccgggtgcgaatgtgggtgaacctgaacctgtggcagaagctgaagctaagcagagatgatgccaagcctctgctgagactgaagggattcccttcctttcctctggtcgagagacaggccaacgaagtggactggtgggacatggtgtgtaacgtgaagaagctgatcaacgagaaaaaggaggatggcaaggtgttttggcagaatctggctggctacaagagacaggaagccctgagaccatacctgagcagcgaggaagatcggaagaagggaaagaaattcgctcggtaccagctgggcgacctgctgctgcacctggaaaagaagcacggcgaggactggggaaaggtgtacgacgaggcctgggagcggattgacaagaaagtggaaggcctgagcaagcacatcaagctggaagaggaacggagaagcgaggacgcccagagcaaggccgccctgaccgactggctgcgggctaaggccagcttcgtgatcgagggcctgaaggaggccgacaaggacgagttctgcagatgcgagctgaagctgcagaagtggtacggggacctgcggggaaagcccttcgccatcgaagccgagaacagcatcctggacatcagcggcttcagcaagcagtacaactgtgccttcatctggcagaaggacggcgtgaagaagctgaacctgtacctgatcatcaactacttcaagggcggcaagctgcggttcaagaagatcaaacctgaagccttcgaagccaacagattctacaccgtgatcaacaaaaagagcggcgagatcgtgcccatggaggtgaacttcaacttcgacgaccccaacctgatcatcctgcctctggcctttggcaagagacagggcagagaattcatctggaacgacctgctgtccctggaaaccggcagcctgaagctggccaacggaagagtgatcgagaagacactgtacaacagaagaacccggcaggatgagcctgccctgttcgtggccctgaccttcgagcggcgggaggtcctggactcctccaatatcaaaccaatgaacctgatcggcgtggcaagaggcgaaaacatccccgccgtgatcgccctgaccgaccccgagggctgcccactgagccggtttaaggatagcctgggaaacccaacccacatcctgagaatcggcgagagctataaggagaagcagcggaccatccaggccaagaaggaggtggagcagcggagagccggcggctacagccggaagtacgccagcaaagccaagaatctggcagacgatatggtgagaaacaccgctagagatctgctgtactacgccgtgacccaggatgccatgctgatcttcgccaacctgagccggggcttcggccggcagggcaagcggaccttcatggccgagagacagtacacacggatggaggactggctgaccgccaagctggcctacgagggcctgagcaagacctacctgtccaagacactggcccagtacacctccaagacatgcagcaactgtgggtttaccatcaccagcgccgactacgacagggtgctggagaagctgaagaagacagcaacaggctggatgaccacaattaacggcaaggagctgaaggtggagggccagattacctactacaacagatacaagagacagaacgtagtcaaggacctgtccgtcgagctggatagactgagcgaagaatctgtgaacaacgacatctcctcctggacaaagggcagaagcggagaagctctgagcctcctgaagaaaagattctcccatagacccgtgcaggagaagttcgtgtgcctgaactgcggcttcgagacacacgcagccgagcaagccgccctgaacatcgccagatcctggctgttcctgcggagccaggagtacaagaaataccagacaaacaagacaaccggcaacaccgataagagagccttcgtcgagacctggcagtccttttaccggaagaagcttaaggaggtgtggaaacctgccgtgcggtctggcggatctggcggaggctccaccagccccaagaaaaagagaaaagtctaagctgccttctgcggggcttgccttctggccatgcccttcttctctcccttgcacctgtacctcttggtctttgaataaagcctgagtaggaaggctagcaaaaaaaaaaaaaaaaaaaaaaaaaaaaaaaaaaaaaaaaaaaaaaaaaaaaaaaaaaaaaaaaaaaaaaaaaaaaaaaa

SEQ ID NO: 12110 - RNA, 5785 nt, synthetic construct
  source 1..5785: mol_type = other RNA
aggaaataagagagaaaagaagagtaagaagaaatataagagccaccatggcccctaagaagaagcgtaaagtgagccggatggaacgcctcgtctacgaggtgcggcagaagtgcagaaacatcgaggacatctgcatctcctgcggatctctgaacgtgaccctggagcacccactgttcatcggcggcatgtgccagaactgtaaaaactgttttctggagtgtgcctatcaatacgacgatgacggctaccagagctactgcaccatctgttgcggcggaagagaggtgctgatgtgtggaaataacaactgctgccggtgcttctgcgtggaatgcgtggacctgctggtgggccccggcgccgcccaggccgctattaaggaagatccttggaactgctacatgtgcggccacaagggcacatacggcctgctgagacggagagaggactggcctagcagactgcagatgttcttcgccaataaccacgaccaggagttcgacccccctaaggtgtaccctcccgtccccgccgagaagagaaagcccatccgggtcctgagcctgttcgatggcatcgccaccggtctgctggtgctgaaggacctgggcatccaggtggataggtacattgcctccgaggtgtgcgaggactccatcaccgtgggaatggtgcgtcatcagggcaagatcatgtacgtgggcgacgtgcggagcgtgacacagaagcatatccaggagtggggccctttcgacctggtgatcggcggcagcccttgcaatgacctgagcatcgtgaacccagcccggaagggcctgtacgagggaaccggcagactgttcttcgagttttacagactgctgcacgacgcccggcctaaggaaggcgacgaccggcccttcttttggctgttcgagaatgtggtggccatgggagtcagcgacaagcgggatattagccggttcctggagagcaaccccgtgatgatcgatgccaaggaagtgagcgccgcccaccgggccagatacttctggggcaatctgcctggcatgaacagacccctggccagcaccgtgaacgacaagctggagctgcaggagtgcctggagcacggccggatcgccaagttcagcaaggtgagaaccatcaccacccgaagcaacagcatcaaacaaggcaaggaccagcactttcctgtgttcatgaacgagaaggaggacatcctgtggtgtaccgagatggagagagtgttcgggttcccagtccactacacagatgtcagcaacatgtctagactggccagacagagactgctgggaagaagctggtccgtccctgtgatcagacacctgttcgcccctctgaaggagtacttcgcctgcgtgagcagcggcaacagcaacgccaacagccggggccccagcttctctagcggcctggtgccactgtccctgagagggagccacatgggccccatggagatctacaaaaccgtgagcgcctggaagcggcagcctgtgcgcgtgctgagcctgtttcggaatatcgataaagtcctgaaaagcctgggattcctggagagcggctctggctccggcggtggcaccctgaagtacgtggaggatgtgacaaacgtggtcagacgggatgtggagaagtggggccccttcgatctggtgtacggcagcacccaacccctgggcagctcttgtgaccggtgccctggctggtacatgtttcagttccaccggatcctgcagtacgccctgccgagacaggagtcccagcggccattcttttggattttcatggacaacttgctgctgaccgaggatgaccaggaaactaccactcggttcctgcagaccgaagccgtgaccctgcaggacgtgagaggccgggactaccagaacgccatgcgggtgtggtccaacatccctggactgaaaagcaagcacgcacctctgacccctaaagaagaggagtacctgcaggcccaggtgcggagcagaagcaagctggacgcccctaaggtggatctgctggtgaagaattgcctcctgcccctgagagagtacttcaagtatttcagccagaatagtctgcccctgggaggcagcggcggcggcaagcccggcgccgtgagcttcgccgacgtggccgtgtacttcagccccgaggagtggggctgcctgaggcccgcccagagggccctgtacagggacgtgatgagggagacctacggccacctgggcgccctgggcttccccggccccaagcccgccctgatcagctggatggagcaggagagcgaggcctggagccccgccgcccaggaccccgagaagggcgagaggctgggcggcgccaggggcggcccaagcagcggcgcccctcctcccagcggcggcagcccagccggctccccaacctctaccgaggagggcacctctgagtccgccacccccgagagcggccctggcacctccaccgagcccagcgagggcagcgcacccggcagccctgccggcagccccacctccacagaggagggaaccagcaccgagcccagcgaaggcagcgccccaggcaccagcaccgagcctagtgagcaggagattaaacggatcaacaagatcagaagaagacttgtgaaagacagcaacaccaagaaggccggcaagacaggccccatgaaaaccctgctggttagagtgatgacacccgatctgagagagcggctggaaaacctgagaaagaagcctgaaaatatcccccagcccatcagcaatacatctagagccaacctgaataagctgctgaccgattacaccgaaatgaagaaggcgatcctgcatgtgtactgggaagagttccagaaggaccctgtgggcctgatgagccgggtggcccagcctgccagcaagaagatcgatcagaacaagctgaaacctgagatggacgagaagggcaacctgaccaccgccggctttgcctgctctcagtgtggccagcccctgttcgtgtacaagctggagcaggtgtctgagaagggcaaggcttacaccaactacttcggacggtgcaatgtggccgagcacgaaaagctgatcctgctggcccagctgaagcccgagaaggatagcgacgaagccgtgacatatagcctgggaaagtttgggcagagggccctggatttctacagcattcatgtgaccaaggagtccacccaccccgtgaagcccctggcccagatcgccggaaacagatacgcctccggacctgtgggaaaggccctgagcgacgcatgtatgggcacaatcgcctccttcctgtctaagtaccaggacatcatcatcgaacaccagaaggtggtgaagggcaaccagaagagactggagagcctgcgggagctggccggcaaggaaaacctggaataccctagcgtgaccctgccacctcagcctcacaccaaggagggcgttgatgcctacaacgaagtgatcgcccgggtgcgaatgtgggtgaacctgaacctgtggcagaagctgaagctaagcagagatgatgccaagcctctgctgagactgaagggattcccttcctttcctctggtcgagagacaggccaacgaagtggactggtgggacatggtgtgtaacgtgaagaagctgatcaacgagaaaaaggaggatggcaaggtgttttggcagaatctggctggctacaagagacaggaagccctgagaccatacctgagcagcgaggaagatcggaagaagggaaagaaattcgctcggtaccagctgggcgacctgctgctgcacctggaaaagaagcacggcgaggactggggaaaggtgtacgacgaggcctgggagcggattgacaagaaagtggaaggcctgagcaagcacatcaagctggaagaggaacggagaagcgaggacgcccagagcaaggccgccctgaccgactggctgcgggctaaggccagcttcgtgatcgagggcctgaaggaggccgacaaggacgagttctgcagatgcgagctgaagctgcagaagtggtacggggacctgcggggaaagcccttcgccatcgaagccgagaacagcatcctggacatcagcggcttcagcaagcagtacaactgtgccttcatctggcagaaggacggcgtgaagaagctgaacctgtacctgatcatcaactacttcaagggcggcaagctgcggttcaagaagatcaaacctgaagccttcgaagccaacagattctacaccgtgatcaacaaaaagagcggcgagatcgtgcccatggaggtgaacttcaacttcgacgaccccaacctgatcatcctgcctctggcctttggcaagagacagggcagagaattcatctggaacgacctgctgtccctggaaaccggcagcctgaagctggccaacggaagagtgatcgagaagacactgtacaacagaagaacccggcaggatgagcctgccctgttcgtggccctgaccttcgagcggcgggaggtcctggactcctccaatatcaaaccaatgaacctgatcggcgtggcaagaggcgaaaacatccccgccgtgatcgccctgaccgaccccgagggctgcccactgagccggtttaaggatagcctgggaaacccaacccacatcctgagaatcggcgagagctataaggagaagcagcggaccatccaggccaagaaggaggtggagcagcggagagccggcggctacagccggaagtacgccagcaaagccaagaatctggcagacgatatggtgagaaacaccgctagagatctgctgtactacgccgtgacccaggatgccatgctgatcttcgccaacctgagccggggcttcggccggcagggcaagcggaccttcatggccgagagacagtacacacggatggaggactggctgaccgccaagctggcctacgagggcctgagcaagacctacctgtccaagacactggcccagtacacctccaagacatgcagcaactgtgggtttaccatcaccagcgccgactacgacagggtgctggagaagctgaagaagacagcaacaggctggatgaccacaattaacggcaaggagctgaaggtggagggccagattacctactacaacagatacaagagacagaacgtagtcaaggacctgtccgtcgagctggatagactgagcgaagaatctgtgaacaacgacatctcctcctggacaaagggcagaagcggagaagctctgagcctcctgaagaaaagattctcccatagacccgtgcaggagaagttcgtgtgcctgaactgcggcttcgagacacacgcagccgagcaagccgccctgaacatcgccagatcctggctgttcctgcggagccaggagtacaagaaataccagacaaacaagacaaccggcaacaccgataagagagccttcgtcgagacctggcagtccttttaccggaagaagcttaaggaggtgtggaaacctgccgtgcggtctggcggatctggcggaggctccaccagccccaagaaaaagagaaaagtctaagctgccttctgcggggcttgccttctggccatgcccttcttctctcccttgcacctgtacctcttggtctttgaataaagcctgagtaggaaggctagcaaaaaaaaaaaaaaaaaaaaaaaaaaaaaaaaaaaaaaaaaaaaaaaaaaaaaaaaaaaaaaaaaaaaaaaaaaaaaaaa

SEQ ID NO: 12111 - RNA, 5785 nt, synthetic construct
  source 1..5785: mol_type = other RNA
aggaaataagagagaaaagaagagtaagaagaaatataagagccaccatggcccctaagaagaagcgtaaagtgagccggatggaacgcctcgtctacgaggtgcggcagaagtgcagaaacatcgaggacatctgcatctcctgcggatctctgaacgtgaccctggagcacccactgttcatcggcggcatgtgccagaactgtaaaaactgttttctggagtgtgcctatcaatacgacgatgacggctaccagagctactgcaccatctgttgcggcggaagagaggtgctgatgtgtggaaataacaactgctgccggtgcttctgcgtggaatgcgtggacctgctggtgggccccggcgccgcccaggccgctattaaggaagatccttggaactgctacatgtgcggccacaagggcacatacggcctgctgagacggagagaggactggcctagcagactgcagatgttcttcgccaataaccacgaccaggagttcgacccccctaaggtgtaccctcccgtccccgccgagaagagaaagcccatccgggtcctgagcctgttcgatggcatcgccaccggtctgctggtgctgaaggacctgggcatccaggtggataggtacattgcctccgaggtgtgcgaggactccatcaccgtgggaatggtgcgtcatcagggcaagatcatgtacgtgggcgacgtgcggagcgtgacacagaagcatatccaggagtggggccctttcgacctggtgatcggcggcagcccttgcaatgacctgagcatcgtgaacccagcccggaagggcctgtacgagggaaccggcagactgttcttcgagttttacagactgctgcacgacgcccggcctaaggaaggcgacgaccggcccttcttttggctgttcgagaatgtggtggccatgggagtcagcgacaagcgggatattagccggttcctggagagcaaccccgtgatgatcgatgccaaggaagtgagcgccgcccaccgggccagatacttctggggcaatctgcctggcatgaacagacccctggccagcaccgtgaacgacaagctggagctgcaggagtgcctggagcacggccggatcgccaagttcagcaaggtgagaaccatcaccacccgaagcaacagcatcaaacaaggcaaggaccagcactttcctgtgttcatgaacgagaaggaggacatcctgtggtgtaccgagatggagagagtgttcgggttcccagtccactacacagatgtcagcaacatgtctagactggccagacagagactgctgggaagaagctggtccgtccctgtgatcagacacctgttcgcccctctgaaggagtacttcgcctgcgtgagcagcggcaacagcaacgccaacagccggggccccagcttctctagcggcctggtgccactgtccctgagagggagccacatgggccccatggagatctacaaaaccgtgagcgcctggaagcggcagcctgtgcgcgtgctgagcctgtttcggaatatcgataaagtcctgaaaagcctgggattcctggagagcggctctggctccggcggtggcaccctgaagtacgtggaggatgtgacaaacgtggtcagacgggatgtggagaagtggggccccttcgatctggtgtacggcagcacccaacccctgggcagctcttgtgaccggtgccctggctggtacatgtttcagttccaccggatcctgcagtacgccctgccgagacaggagtcccagcggccattcttttggattttcatggacaacttgctgctgaccgaggatgaccaggaaactaccactcggttcctgcagaccgaagccgtgaccctgcaggacgtgagaggccgggactaccagaacgccatgcgggtgtggtccaacatccctggactgaaaagcaagcacgcacctctgacccctaaagaagaggagtacctgcaggcccaggtgcggagcagaagcaagctggacgcccctaaggtggatctgctggtgaagaattgcctcctgcccctgagagagtacttcaagtatttcagccagaatagtctgcccctgggaggcagcggcggcggcatggtgagcttcgaggacgtggccgtgctgctgagccaggaggagtgggactgcctgatccccgcccagaggggcctgtacagggacgtgatgctggagacctacggcaacctggtgagcctgggcctgcaggccagcaagcccgacgtgatcagcaggctggagcagggcgacgagccctggaccacccacaccctgaggatgcagggcagctggagctggaggcacaagagggagggctgcggcggcccaagcagcggcgcccctcctcccagcggcggcagcccagccggctccccaacctctaccgaggagggcacctctgagtccgccacccccgagagcggccctggcacctccaccgagcccagcgagggcagcgcacccggcagccctgccggcagccccacctccacagaggagggaaccagcaccgagcccagcgaaggcagcgccccaggcaccagcaccgagcctagtgagcaggagattaaacggatcaacaagatcagaagaagacttgtgaaagacagcaacaccaagaaggccggcaagacaggccccatgaaaaccctgctggttagagtgatgacacccgatctgagagagcggctggaaaacctgagaaagaagcctgaaaatatcccccagcccatcagcaatacatctagagccaacctgaataagctgctgaccgattacaccgaaatgaagaaggcgatcctgcatgtgtactgggaagagttccagaaggaccctgtgggcctgatgagccgggtggcccagcctgccagcaagaagatcgatcagaacaagctgaaacctgagatggacgagaagggcaacctgaccaccgccggctttgcctgctctcagtgtggccagcccctgttcgtgtacaagctggagcaggtgtctgagaagggcaaggcttacaccaactacttcggacggtgcaatgtggccgagcacgaaaagctgatcctgctggcccagctgaagcccgagaaggatagcgacgaagccgtgacatatagcctgggaaagtttgggcagagggccctggatttctacagcattcatgtgaccaaggagtccacccaccccgtgaagcccctggcccagatcgccggaaacagatacgcctccggacctgtgggaaaggccctgagcgacgcatgtatgggcacaatcgcctccttcctgtctaagtaccaggacatcatcatcgaacaccagaaggtggtgaagggcaaccagaagagactggagagcctgcgggagctggccggcaaggaaaacctggaataccctagcgtgaccctgccacctcagcctcacaccaaggagggcgttgatgcctacaacgaagtgatcgcccgggtgcgaatgtgggtgaacctgaacctgtggcagaagctgaagctaagcagagatgatgccaagcctctgctgagactgaagggattcccttcctttcctctggtcgagagacaggccaacgaagtggactggtgggacatggtgtgtaacgtgaagaagctgatcaacgagaaaaaggaggatggcaaggtgttttggcagaatctggctggctacaagagacaggaagccctgagaccatacctgagcagcgaggaagatcggaagaagggaaagaaattcgctcggtaccagctgggcgacctgctgctgcacctggaaaagaagcacggcgaggactggggaaaggtgtacgacgaggcctgggagcggattgacaagaaagtggaaggcctgagcaagcacatcaagctggaagaggaacggagaagcgaggacgcccagagcaaggccgccctgaccgactggctgcgggctaaggccagcttcgtgatcgagggcctgaaggaggccgacaaggacgagttctgcagatgcgagctgaagctgcagaagtggtacggggacctgcggggaaagcccttcgccatcgaagccgagaacagcatcctggacatcagcggcttcagcaagcagtacaactgtgccttcatctggcagaaggacggcgtgaagaagctgaacctgtacctgatcatcaactacttcaagggcggcaagctgcggttcaagaagatcaaacctgaagccttcgaagccaacagattctacaccgtgatcaacaaaaagagcggcgagatcgtgcccatggaggtgaacttcaacttcgacgaccccaacctgatcatcctgcctctggcctttggcaagagacagggcagagaattcatctggaacgacctgctgtccctggaaaccggcagcctgaagctggccaacggaagagtgatcgagaagacactgtacaacagaagaacccggcaggatgagcctgccctgttcgtggccctgaccttcgagcggcgggaggtcctggactcctccaatatcaaaccaatgaacctgatcggcgtggcaagaggcgaaaacatccccgccgtgatcgccctgaccgaccccgagggctgcccactgagccggtttaaggatagcctgggaaacccaacccacatcctgagaatcggcgagagctataaggagaagcagcggaccatccaggccaagaaggaggtggagcagcggagagccggcggctacagccggaagtacgccagcaaagccaagaatctggcagacgatatggtgagaaacaccgctagagatctgctgtactacgccgtgacccaggatgccatgctgatcttcgccaacctgagccggggcttcggccggcagggcaagcggaccttcatggccgagagacagtacacacggatggaggactggctgaccgccaagctggcctacgagggcctgagcaagacctacctgtccaagacactggcccagtacacctccaagacatgcagcaactgtgggtttaccatcaccagcgccgactacgacagggtgctggagaagctgaagaagacagcaacaggctggatgaccacaattaacggcaaggagctgaaggtggagggccagattacctactacaacagatacaagagacagaacgtagtcaaggacctgtccgtcgagctggatagactgagcgaagaatctgtgaacaacgacatctcctcctggacaaagggcagaagcggagaagctctgagcctcctgaagaaaagattctcccatagacccgtgcaggagaagttcgtgtgcctgaactgcggcttcgagacacacgcagccgagcaagccgccctgaacatcgccagatcctggctgttcctgcggagccaggagtacaagaaataccagacaaacaagacaaccggcaacaccgataagagagccttcgtcgagacctggcagtccttttaccggaagaagcttaaggaggtgtggaaacctgccgtgcggtctggcggatctggcggaggctccaccagccccaagaaaaagagaaaagtctaagctgccttctgcggggcttgccttctggccatgcccttcttctctcccttgcacctgtacctcttggtctttgaataaagcctgagtaggaaggctagcaaaaaaaaaaaaaaaaaaaaaaaaaaaaaaaaaaaaaaaaaaaaaaaaaaaaaaaaaaaaaaaaaaaaaaaaaaaaaaaa

SEQ ID NO: 12112 - RNA, 5785 nt, synthetic construct
  source 1..5785: mol_type = other RNA
aggaaataagagagaaaagaagagtaagaagaaatataagagccaccatggcccctaagaagaagcgtaaagtgagccggatggaacgcctcgtctacgaggtgcggcagaagtgcagaaacatcgaggacatctgcatctcctgcggatctctgaacgtgaccctggagcacccactgttcatcggcggcatgtgccagaactgtaaaaactgttttctggagtgtgcctatcaatacgacgatgacggctaccagagctactgcaccatctgttgcggcggaagagaggtgctgatgtgtggaaataacaactgctgccggtgcttctgcgtggaatgcgtggacctgctggtgggccccggcgccgcccaggccgctattaaggaagatccttggaactgctacatgtgcggccacaagggcacatacggcctgctgagacggagagaggactggcctagcagactgcagatgttcttcgccaataaccacgaccaggagttcgacccccctaaggtgtaccctcccgtccccgccgagaagagaaagcccatccgggtcctgagcctgttcgatggcatcgccaccggtctgctggtgctgaaggacctgggcatccaggtggataggtacattgcctccgaggtgtgcgaggactccatcaccgtgggaatggtgcgtcatcagggcaagatcatgtacgtgggcgacgtgcggagcgtgacacagaagcatatccaggagtggggccctttcgacctggtgatcggcggcagcccttgcaatgacctgagcatcgtgaacccagcccggaagggcctgtacgagggaaccggcagactgttcttcgagttttacagactgctgcacgacgcccggcctaaggaaggcgacgaccggcccttcttttggctgttcgagaatgtggtggccatgggagtcagcgacaagcgggatattagccggttcctggagagcaaccccgtgatgatcgatgccaaggaagtgagcgccgcccaccgggccagatacttctggggcaatctgcctggcatgaacagacccctggccagcaccgtgaacgacaagctggagctgcaggagtgcctggagcacggccggatcgccaagttcagcaaggtgagaaccatcaccacccgaagcaacagcatcaaacaaggcaaggaccagcactttcctgtgttcatgaacgagaaggaggacatcctgtggtgtaccgagatggagagagtgttcgggttcccagtccactacacagatgtcagcaacatgtctagactggccagacagagactgctgggaagaagctggtccgtccctgtgatcagacacctgttcgcccctctgaaggagtacttcgcctgcgtgagcagcggcaacagcaacgccaacagccggggccccagcttctctagcggcctggtgccactgtccctgagagggagccacatgggccccatggagatctacaaaaccgtgagcgcctggaagcggcagcctgtgcgcgtgctgagcctgtttcggaatatcgataaagtcctgaaaagcctgggattcctggagagcggctctggctccggcggtggcaccctgaagtacgtggaggatgtgacaaacgtggtcagacgggatgtggagaagtggggccccttcgatctggtgtacggcagcacccaacccctgggcagctcttgtgaccggtgccctggctggtacatgtttcagttccaccggatcctgcagtacgccctgccgagacaggagtcccagcggccattcttttggattttcatggacaacttgctgctgaccgaggatgaccaggaaactaccactcggttcctgcagaccgaagccgtgaccctgcaggacgtgagaggccgggactaccagaacgccatgcgggtgtggtccaacatccctggactgaaaagcaagcacgcacctctgacccctaaagaagaggagtacctgcaggcccaggtgcggagcagaagcaagctggacgcccctaaggtggatctgctggtgaagaattgcctcctgcccctgagagagtacttcaagtatttcagccagaatagtctgcccctgggaggcagcggcggcggccaggccgaggtgaccttcgaggacgtggccgtgctgttcagcagggaggagtggggcaggctgggccccgcccagaggggcctgtacagggacgtgatgctggagacctacaggaacctggtgagcctgggcgccggccccgccggccccaagcccggcgtgatcacccagctggagaggggcgacgagccctgggtgctggacgcccagggcgccaagggcaaggagaggctgagggtgagcggcggcccaagcagcggcgcccctcctcccagcggcggcagcccagccggctccccaacctctaccgaggagggcacctctgagtccgccacccccgagagcggccctggcacctccaccgagcccagcgagggcagcgcacccggcagccctgccggcagccccacctccacagaggagggaaccagcaccgagcccagcgaaggcagcgccccaggcaccagcaccgagcctagtgagcaggagattaaacggatcaacaagatcagaagaagacttgtgaaagacagcaacaccaagaaggccggcaagacaggccccatgaaaaccctgctggttagagtgatgacacccgatctgagagagcggctggaaaacctgagaaagaagcctgaaaatatcccccagcccatcagcaatacatctagagccaacctgaataagctgctgaccgattacaccgaaatgaagaaggcgatcctgcatgtgtactgggaagagttccagaaggaccctgtgggcctgatgagccgggtggcccagcctgccagcaagaagatcgatcagaacaagctgaaacctgagatggacgagaagggcaacctgaccaccgccggctttgcctgctctcagtgtggccagcccctgttcgtgtacaagctggagcaggtgtctgagaagggcaaggcttacaccaactacttcggacggtgcaatgtggccgagcacgaaaagctgatcctgctggcccagctgaagcccgagaaggatagcgacgaagccgtgacatatagcctgggaaagtttgggcagagggccctggatttctacagcattcatgtgaccaaggagtccacccaccccgtgaagcccctggcccagatcgccggaaacagatacgcctccggacctgtgggaaaggccctgagcgacgcatgtatgggcacaatcgcctccttcctgtctaagtaccaggacatcatcatcgaacaccagaaggtggtgaagggcaaccagaagagactggagagcctgcgggagctggccggcaaggaaaacctggaataccctagcgtgaccctgccacctcagcctcacaccaaggagggcgttgatgcctacaacgaagtgatcgcccgggtgcgaatgtgggtgaacctgaacctgtggcagaagctgaagctaagcagagatgatgccaagcctctgctgagactgaagggattcccttcctttcctctggtcgagagacaggccaacgaagtggactggtgggacatggtgtgtaacgtgaagaagctgatcaacgagaaaaaggaggatggcaaggtgttttggcagaatctggctggctacaagagacaggaagccctgagaccatacctgagcagcgaggaagatcggaagaagggaaagaaattcgctcggtaccagctgggcgacctgctgctgcacctggaaaagaagcacggcgaggactggggaaaggtgtacgacgaggcctgggagcggattgacaagaaagtggaaggcctgagcaagcacatcaagctggaagaggaacggagaagcgaggacgcccagagcaaggccgccctgaccgactggctgcgggctaaggccagcttcgtgatcgagggcctgaaggaggccgacaaggacgagttctgcagatgcgagctgaagctgcagaagtggtacggggacctgcggggaaagcccttcgccatcgaagccgagaacagcatcctggacatcagcggcttcagcaagcagtacaactgtgccttcatctggcagaaggacggcgtgaagaagctgaacctgtacctgatcatcaactacttcaagggcggcaagctgcggttcaagaagatcaaacctgaagccttcgaagccaacagattctacaccgtgatcaacaaaaagagcggcgagatcgtgcccatggaggtgaacttcaacttcgacgaccccaacctgatcatcctgcctctggcctttggcaagagacagggcagagaattcatctggaacgacctgctgtccctggaaaccggcagcctgaagctggccaacggaagagtgatcgagaagacactgtacaacagaagaacccggcaggatgagcctgccctgttcgtggccctgaccttcgagcggcgggaggtcctggactcctccaatatcaaaccaatgaacctgatcggcgtggcaagaggcgaaaacatccccgccgtgatcgccctgaccgaccccgagggctgcccactgagccggtttaaggatagcctgggaaacccaacccacatcctgagaatcggcgagagctataaggagaagcagcggaccatccaggccaagaaggaggtggagcagcggagagccggcggctacagccggaagtacgccagcaaagccaagaatctggcagacgatatggtgagaaacaccgctagagatctgctgtactacgccgtgacccaggatgccatgctgatcttcgccaacctgagccggggcttcggccggcagggcaagcggaccttcatggccgagagacagtacacacggatggaggactggctgaccgccaagctggcctacgagggcctgagcaagacctacctgtccaagacactggcccagtacacctccaagacatgcagcaactgtgggtttaccatcaccagcgccgactacgacagggtgctggagaagctgaagaagacagcaacaggctggatgaccacaattaacggcaaggagctgaaggtggagggccagattacctactacaacagatacaagagacagaacgtagtcaaggacctgtccgtcgagctggatagactgagcgaagaatctgtgaacaacgacatctcctcctggacaaagggcagaagcggagaagctctgagcctcctgaagaaaagattctcccatagacccgtgcaggagaagttcgtgtgcctgaactgcggcttcgagacacacgcagccgagcaagccgccctgaacatcgccagatcctggctgttcctgcggagccaggagtacaagaaataccagacaaacaagacaaccggcaacaccgataagagagccttcgtcgagacctggcagtccttttaccggaagaagcttaaggaggtgtggaaacctgccgtgcggtctggcggatctggcggaggctccaccagccccaagaaaaagagaaaagtctaagctgccttctgcggggcttgccttctggccatgcccttcttctctcccttgcacctgtacctcttggtctttgaataaagcctgagtaggaaggctagcaaaaaaaaaaaaaaaaaaaaaaaaaaaaaaaaaaaaaaaaaaaaaaaaaaaaaaaaaaaaaaaaaaaaaaaaaaaaaaaa

SEQ ID NO: 12113 - RNA, 5785 nt, synthetic construct
  source 1..5785: mol_type = other RNA
aggaaataagagagaaaagaagagtaagaagaaatataagagccaccatggcccctaagaagaagcgtaaagtgagccggatggaacgcctcgtctacgaggtgcggcagaagtgcagaaacatcgaggacatctgcatctcctgcggatctctgaacgtgaccctggagcacccactgttcatcggcggcatgtgccagaactgtaaaaactgttttctggagtgtgcctatcaatacgacgatgacggctaccagagctactgcaccatctgttgcggcggaagagaggtgctgatgtgtggaaataacaactgctgccggtgcttctgcgtggaatgcgtggacctgctggtgggccccggcgccgcccaggccgctattaaggaagatccttggaactgctacatgtgcggccacaagggcacatacggcctgctgagacggagagaggactggcctagcagactgcagatgttcttcgccaataaccacgaccaggagttcgacccccctaaggtgtaccctcccgtccccgccgagaagagaaagcccatccgggtcctgagcctgttcgatggcatcgccaccggtctgctggtgctgaaggacctgggcatccaggtggataggtacattgcctccgaggtgtgcgaggactccatcaccgtgggaatggtgcgtcatcagggcaagatcatgtacgtgggcgacgtgcggagcgtgacacagaagcatatccaggagtggggccctttcgacctggtgatcggcggcagcccttgcaatgacctgagcatcgtgaacccagcccggaagggcctgtacgagggaaccggcagactgttcttcgagttttacagactgctgcacgacgcccggcctaaggaaggcgacgaccggcccttcttttggctgttcgagaatgtggtggccatgggagtcagcgacaagcgggatattagccggttcctggagagcaaccccgtgatgatcgatgccaaggaagtgagcgccgcccaccgggccagatacttctggggcaatctgcctggcatgaacagacccctggccagcaccgtgaacgacaagctggagctgcaggagtgcctggagcacggccggatcgccaagttcagcaaggtgagaaccatcaccacccgaagcaacagcatcaaacaaggcaaggaccagcactttcctgtgttcatgaacgagaaggaggacatcctgtggtgtaccgagatggagagagtgttcgggttcccagtccactacacagatgtcagcaacatgtctagactggccagacagagactgctgggaagaagctggtccgtccctgtgatcagacacctgttcgcccctctgaaggagtacttcgcctgcgtgagcagcggcaacagcaacgccaacagccggggccccagcttctctagcggcctggtgccactgtccctgagagggagccacatgggccccatggagatctacaaaaccgtgagcgcctggaagcggcagcctgtgcgcgtgctgagcctgtttcggaatatcgataaagtcctgaaaagcctgggattcctggagagcggctctggctccggcggtggcaccctgaagtacgtggaggatgtgacaaacgtggtcagacgggatgtggagaagtggggccccttcgatctggtgtacggcagcacccaacccctgggcagctcttgtgaccggtgccctggctggtacatgtttcagttccaccggatcctgcagtacgccctgccgagacaggagtcccagcggccattcttttggattttcatggacaacttgctgctgaccgaggatgaccaggaaactaccactcggttcctgcagaccgaagccgtgaccctgcaggacgtgagaggccgggactaccagaacgccatgcgggtgtggtccaacatccctggactgaaaagcaagcacgcacctctgacccctaaagaagaggagtacctgcaggcccaggtgcggagcagaagcaagctggacgcccctaaggtggatctgctggtgaagaattgcctcctgcccctgagagagtacttcaagtatttcagccagaatagtctgcccctgggaggcagcggcggcggcagccaggagagcgtggccttcgaggacgtggccgtgtacttcaccaccaaggagtgggccatcatggtgcccgccgagagggccctgtacagggacgtgatgctggagaactacgaggccgtggccttcgtggtgccccccaccagcaagcccgccctggtgagccacctggagcagggcaaggagagctgcttcatcaggccccagggcgtgctgagcaggagcgactggagggccggcctgggcggcccaagcagcggcgcccctcctcccagcggcggcagcccagccggctccccaacctctaccgaggagggcacctctgagtccgccacccccgagagcggccctggcacctccaccgagcccagcgagggcagcgcacccggcagccctgccggcagccccacctccacagaggagggaaccagcaccgagcccagcgaaggcagcgccccaggcaccagcaccgagcctagtgagcaggagattaaacggatcaacaagatcagaagaagacttgtgaaagacagcaacaccaagaaggccggcaagacaggccccatgaaaaccctgctggttagagtgatgacacccgatctgagagagcggctggaaaacctgagaaagaagcctgaaaatatcccccagcccatcagcaatacatctagagccaacctgaataagctgctgaccgattacaccgaaatgaagaaggcgatcctgcatgtgtactgggaagagttccagaaggaccctgtgggcctgatgagccgggtggcccagcctgccagcaagaagatcgatcagaacaagctgaaacctgagatggacgagaagggcaacctgaccaccgccggctttgcctgctctcagtgtggccagcccctgttcgtgtacaagctggagcaggtgtctgagaagggcaaggcttacaccaactacttcggacggtgcaatgtggccgagcacgaaaagctgatcctgctggcccagctgaagcccgagaaggatagcgacgaagccgtgacatatagcctgggaaagtttgggcagagggccctggatttctacagcattcatgtgaccaaggagtccacccaccccgtgaagcccctggcccagatcgccggaaacagatacgcctccggacctgtgggaaaggccctgagcgacgcatgtatgggcacaatcgcctccttcctgtctaagtaccaggacatcatcatcgaacaccagaaggtggtgaagggcaaccagaagagactggagagcctgcgggagctggccggcaaggaaaacctggaataccctagcgtgaccctgccacctcagcctcacaccaaggagggcgttgatgcctacaacgaagtgatcgcccgggtgcgaatgtgggtgaacctgaacctgtggcagaagctgaagctaagcagagatgatgccaagcctctgctgagactgaagggattcccttcctttcctctggtcgagagacaggccaacgaagtggactggtgggacatggtgtgtaacgtgaagaagctgatcaacgagaaaaaggaggatggcaaggtgttttggcagaatctggctggctacaagagacaggaagccctgagaccatacctgagcagcgaggaagatcggaagaagggaaagaaattcgctcggtaccagctgggcgacctgctgctgcacctggaaaagaagcacggcgaggactggggaaaggtgtacgacgaggcctgggagcggattgacaagaaagtggaaggcctgagcaagcacatcaagctggaagaggaacggagaagcgaggacgcccagagcaaggccgccctgaccgactggctgcgggctaaggccagcttcgtgatcgagggcctgaaggaggccgacaaggacgagttctgcagatgcgagctgaagctgcagaagtggtacggggacctgcggggaaagcccttcgccatcgaagccgagaacagcatcctggacatcagcggcttcagcaagcagtacaactgtgccttcatctggcagaaggacggcgtgaagaagctgaacctgtacctgatcatcaactacttcaagggcggcaagctgcggttcaagaagatcaaacctgaagccttcgaagccaacagattctacaccgtgatcaacaaaaagagcggcgagatcgtgcccatggaggtgaacttcaacttcgacgaccccaacctgatcatcctgcctctggcctttggcaagagacagggcagagaattcatctggaacgacctgctgtccctggaaaccggcagcctgaagctggccaacggaagagtgatcgagaagacactgtacaacagaagaacccggcaggatgagcctgccctgttcgtggccctgaccttcgagcggcgggaggtcctggactcctccaatatcaaaccaatgaacctgatcggcgtggcaagaggcgaaaacatccccgccgtgatcgccctgaccgaccccgagggctgcccactgagccggtttaaggatagcctgggaaacccaacccacatcctgagaatcggcgagagctataaggagaagcagcggaccatccaggccaagaaggaggtggagcagcggagagccggcggctacagccggaagtacgccagcaaagccaagaatctggcagacgatatggtgagaaacaccgctagagatctgctgtactacgccgtgacccaggatgccatgctgatcttcgccaacctgagccggggcttcggccggcagggcaagcggaccttcatggccgagagacagtacacacggatggaggactggctgaccgccaagctggcctacgagggcctgagcaagacctacctgtccaagacactggcccagtacacctccaagacatgcagcaactgtgggtttaccatcaccagcgccgactacgacagggtgctggagaagctgaagaagacagcaacaggctggatgaccacaattaacggcaaggagctgaaggtggagggccagattacctactacaacagatacaagagacagaacgtagtcaaggacctgtccgtcgagctggatagactgagcgaagaatctgtgaacaacgacatctcctcctggacaaagggcagaagcggagaagctctgagcctcctgaagaaaagattctcccatagacccgtgcaggagaagttcgtgtgcctgaactgcggcttcgagacacacgcagccgagcaagccgccctgaacatcgccagatcctggctgttcctgcggagccaggagtacaagaaataccagacaaacaagacaaccggcaacaccgataagagagccttcgtcgagacctggcagtccttttaccggaagaagcttaaggaggtgtggaaacctgccgtgcggtctggcggatctggcggaggctccaccagccccaagaaaaagagaaaagtctaagctgccttctgcggggcttgccttctggccatgcccttcttctctcccttgcacctgtacctcttggtctttgaataaagcctgagtaggaaggctagcaaaaaaaaaaaaaaaaaaaaaaaaaaaaaaaaaaaaaaaaaaaaaaaaaaaaaaaaaaaaaaaaaaaaaaaaaaaaaaaa

SEQ ID NO: 12114 - RNA, 5785 nt, synthetic construct
  source 1..5785: mol_type = other RNA
aggaaataagagagaaaagaagagtaagaagaaatataagagccaccatggcccctaagaagaagcgtaaagtgagccggatggaacgcctcgtctacgaggtgcggcagaagtgcagaaacatcgaggacatctgcatctcctgcggatctctgaacgtgaccctggagcacccactgttcatcggcggcatgtgccagaactgtaaaaactgttttctggagtgtgcctatcaatacgacgatgacggctaccagagctactgcaccatctgttgcggcggaagagaggtgctgatgtgtggaaataacaactgctgccggtgcttctgcgtggaatgcgtggacctgctggtgggccccggcgccgcccaggccgctattaaggaagatccttggaactgctacatgtgcggccacaagggcacatacggcctgctgagacggagagaggactggcctagcagactgcagatgttcttcgccaataaccacgaccaggagttcgacccccctaaggtgtaccctcccgtccccgccgagaagagaaagcccatccgggtcctgagcctgttcgatggcatcgccaccggtctgctggtgctgaaggacctgggcatccaggtggataggtacattgcctccgaggtgtgcgaggactccatcaccgtgggaatggtgcgtcatcagggcaagatcatgtacgtgggcgacgtgcggagcgtgacacagaagcatatccaggagtggggccctttcgacctggtgatcggcggcagcccttgcaatgacctgagcatcgtgaacccagcccggaagggcctgtacgagggaaccggcagactgttcttcgagttttacagactgctgcacgacgcccggcctaaggaaggcgacgaccggcccttcttttggctgttcgagaatgtggtggccatgggagtcagcgacaagcgggatattagccggttcctggagagcaaccccgtgatgatcgatgccaaggaagtgagcgccgcccaccgggccagatacttctggggcaatctgcctggcatgaacagacccctggccagcaccgtgaacgacaagctggagctgcaggagtgcctggagcacggccggatcgccaagttcagcaaggtgagaaccatcaccacccgaagcaacagcatcaaacaaggcaaggaccagcactttcctgtgttcatgaacgagaaggaggacatcctgtggtgtaccgagatggagagagtgttcgggttcccagtccactacacagatgtcagcaacatgtctagactggccagacagagactgctgggaagaagctggtccgtccctgtgatcagacacctgttcgcccctctgaaggagtacttcgcctgcgtgagcagcggcaacagcaacgccaacagccggggccccagcttctctagcggcctggtgccactgtccctgagagggagccacatgggccccatggagatctacaaaaccgtgagcgcctggaagcggcagcctgtgcgcgtgctgagcctgtttcggaatatcgataaagtcctgaaaagcctgggattcctggagagcggctctggctccggcggtggcaccctgaagtacgtggaggatgtgacaaacgtggtcagacgggatgtggagaagtggggccccttcgatctggtgtacggcagcacccaacccctgggcagctcttgtgaccggtgccctggctggtacatgtttcagttccaccggatcctgcagtacgccctgccgagacaggagtcccagcggccattcttttggattttcatggacaacttgctgctgaccgaggatgaccaggaaactaccactcggttcctgcagaccgaagccgtgaccctgcaggacgtgagaggccgggactaccagaacgccatgcgggtgtggtccaacatccctggactgaaaagcaagcacgcacctctgacccctaaagaagaggagtacctgcaggcccaggtgcggagcagaagcaagctggacgcccctaaggtggatctgctggtgaagaattgcctcctgcccctgagagagtacttcaagtatttcagccagaatagtctgcccctgggaggcagcggcggcggcagcacccccgtgaccttcgaggacgtggtggtgtacttcaccgccgccgagtgggtgcacctgaccaactggcagagggacttctaccaggccgtgatgatggagacctacgagctggtggccagcgtggccggcgacggcgtgcccatggccgaggacgaggagggcggcgtggagaggcccgtgtggcagtacatccccaggggcaagaggaggaggaagaccccccagcccagggccgacggcggcccaagcagcggcgcccctcctcccagcggcggcagcccagccggctccccaacctctaccgaggagggcacctctgagtccgccacccccgagagcggccctggcacctccaccgagcccagcgagggcagcgcacccggcagccctgccggcagccccacctccacagaggagggaaccagcaccgagcccagcgaaggcagcgccccaggcaccagcaccgagcctagtgagcaggagattaaacggatcaacaagatcagaagaagacttgtgaaagacagcaacaccaagaaggccggcaagacaggccccatgaaaaccctgctggttagagtgatgacacccgatctgagagagcggctggaaaacctgagaaagaagcctgaaaatatcccccagcccatcagcaatacatctagagccaacctgaataagctgctgaccgattacaccgaaatgaagaaggcgatcctgcatgtgtactgggaagagttccagaaggaccctgtgggcctgatgagccgggtggcccagcctgccagcaagaagatcgatcagaacaagctgaaacctgagatggacgagaagggcaacctgaccaccgccggctttgcctgctctcagtgtggccagcccctgttcgtgtacaagctggagcaggtgtctgagaagggcaaggcttacaccaactacttcggacggtgcaatgtggccgagcacgaaaagctgatcctgctggcccagctgaagcccgagaaggatagcgacgaagccgtgacatatagcctgggaaagtttgggcagagggccctggatttctacagcattcatgtgaccaaggagtccacccaccccgtgaagcccctggcccagatcgccggaaacagatacgcctccggacctgtgggaaaggccctgagcgacgcatgtatgggcacaatcgcctccttcctgtctaagtaccaggacatcatcatcgaacaccagaaggtggtgaagggcaaccagaagagactggagagcctgcgggagctggccggcaaggaaaacctggaataccctagcgtgaccctgccacctcagcctcacaccaaggagggcgttgatgcctacaacgaagtgatcgcccgggtgcgaatgtgggtgaacctgaacctgtggcagaagctgaagctaagcagagatgatgccaagcctctgctgagactgaagggattcccttcctttcctctggtcgagagacaggccaacgaagtggactggtgggacatggtgtgtaacgtgaagaagctgatcaacgagaaaaaggaggatggcaaggtgttttggcagaatctggctggctacaagagacaggaagccctgagaccatacctgagcagcgaggaagatcggaagaagggaaagaaattcgctcggtaccagctgggcgacctgctgctgcacctggaaaagaagcacggcgaggactggggaaaggtgtacgacgaggcctgggagcggattgacaagaaagtggaaggcctgagcaagcacatcaagctggaagaggaacggagaagcgaggacgcccagagcaaggccgccctgaccgactggctgcgggctaaggccagcttcgtgatcgagggcctgaaggaggccgacaaggacgagttctgcagatgcgagctgaagctgcagaagtggtacggggacctgcggggaaagcccttcgccatcgaagccgagaacagcatcctggacatcagcggcttcagcaagcagtacaactgtgccttcatctggcagaaggacggcgtgaagaagctgaacctgtacctgatcatcaactacttcaagggcggcaagctgcggttcaagaagatcaaacctgaagccttcgaagccaacagattctacaccgtgatcaacaaaaagagcggcgagatcgtgcccatggaggtgaacttcaacttcgacgaccccaacctgatcatcctgcctctggcctttggcaagagacagggcagagaattcatctggaacgacctgctgtccctggaaaccggcagcctgaagctggccaacggaagagtgatcgagaagacactgtacaacagaagaacccggcaggatgagcctgccctgttcgtggccctgaccttcgagcggcgggaggtcctggactcctccaatatcaaaccaatgaacctgatcggcgtggcaagaggcgaaaacatccccgccgtgatcgccctgaccgaccccgagggctgcccactgagccggtttaaggatagcctgggaaacccaacccacatcctgagaatcggcgagagctataaggagaagcagcggaccatccaggccaagaaggaggtggagcagcggagagccggcggctacagccggaagtacgccagcaaagccaagaatctggcagacgatatggtgagaaacaccgctagagatctgctgtactacgccgtgacccaggatgccatgctgatcttcgccaacctgagccggggcttcggccggcagggcaagcggaccttcatggccgagagacagtacacacggatggaggactggctgaccgccaagctggcctacgagggcctgagcaagacctacctgtccaagacactggcccagtacacctccaagacatgcagcaactgtgggtttaccatcaccagcgccgactacgacagggtgctggagaagctgaagaagacagcaacaggctggatgaccacaattaacggcaaggagctgaaggtggagggccagattacctactacaacagatacaagagacagaacgtagtcaaggacctgtccgtcgagctggatagactgagcgaagaatctgtgaacaacgacatctcctcctggacaaagggcagaagcggagaagctctgagcctcctgaagaaaagattctcccatagacccgtgcaggagaagttcgtgtgcctgaactgcggcttcgagacacacgcagccgagcaagccgccctgaacatcgccagatcctggctgttcctgcggagccaggagtacaagaaataccagacaaacaagacaaccggcaacaccgataagagagccttcgtcgagacctggcagtccttttaccggaagaagcttaaggaggtgtggaaacctgccgtgcggtctggcggatctggcggaggctccaccagccccaagaaaaagagaaaagtctaagctgccttctgcggggcttgccttctggccatgcccttcttctctcccttgcacctgtacctcttggtctttgaataaagcctgagtaggaaggctagcaaaaaaaaaaaaaaaaaaaaaaaaaaaaaaaaaaaaaaaaaaaaaaaaaaaaaaaaaaaaaaaaaaaaaaaaaaaaaaaa

SEQ ID NO: 12115 - RNA, 5785 nt, synthetic construct
  source 1..5785: mol_type = other RNA
aggaaataagagagaaaagaagagtaagaagaaatataagagccaccatggcccctaagaagaagcgtaaagtgagccggatggaacgcctcgtctacgaggtgcggcagaagtgcagaaacatcgaggacatctgcatctcctgcggatctctgaacgtgaccctggagcacccactgttcatcggcggcatgtgccagaactgtaaaaactgttttctggagtgtgcctatcaatacgacgatgacggctaccagagctactgcaccatctgttgcggcggaagagaggtgctgatgtgtggaaataacaactgctgccggtgcttctgcgtggaatgcgtggacctgctggtgggccccggcgccgcccaggccgctattaaggaagatccttggaactgctacatgtgcggccacaagggcacatacggcctgctgagacggagagaggactggcctagcagactgcagatgttcttcgccaataaccacgaccaggagttcgacccccctaaggtgtaccctcccgtccccgccgagaagagaaagcccatccgggtcctgagcctgttcgatggcatcgccaccggtctgctggtgctgaaggacctgggcatccaggtggataggtacattgcctccgaggtgtgcgaggactccatcaccgtgggaatggtgcgtcatcagggcaagatcatgtacgtgggcgacgtgcggagcgtgacacagaagcatatccaggagtggggccctttcgacctggtgatcggcggcagcccttgcaatgacctgagcatcgtgaacccagcccggaagggcctgtacgagggaaccggcagactgttcttcgagttttacagactgctgcacgacgcccggcctaaggaaggcgacgaccggcccttcttttggctgttcgagaatgtggtggccatgggagtcagcgacaagcgggatattagccggttcctggagagcaaccccgtgatgatcgatgccaaggaagtgagcgccgcccaccgggccagatacttctggggcaatctgcctggcatgaacagacccctggccagcaccgtgaacgacaagctggagctgcaggagtgcctggagcacggccggatcgccaagttcagcaaggtgagaaccatcaccacccgaagcaacagcatcaaacaaggcaaggaccagcactttcctgtgttcatgaacgagaaggaggacatcctgtggtgtaccgagatggagagagtgttcgggttcccagtccactacacagatgtcagcaacatgtctagactggccagacagagactgctgggaagaagctggtccgtccctgtgatcagacacctgttcgcccctctgaaggagtacttcgcctgcgtgagcagcggcaacagcaacgccaacagccggggccccagcttctctagcggcctggtgccactgtccctgagagggagccacatgggccccatggagatctacaaaaccgtgagcgcctggaagcggcagcctgtgcgcgtgctgagcctgtttcggaatatcgataaagtcctgaaaagcctgggattcctggagagcggctctggctccggcggtggcaccctgaagtacgtggaggatgtgacaaacgtggtcagacgggatgtggagaagtggggccccttcgatctggtgtacggcagcacccaacccctgggcagctcttgtgaccggtgccctggctggtacatgtttcagttccaccggatcctgcagtacgccctgccgagacaggagtcccagcggccattcttttggattttcatggacaacttgctgctgaccgaggatgaccaggaaactaccactcggttcctgcagaccgaagccgtgaccctgcaggacgtgagaggccgggactaccagaacgccatgcgggtgtggtccaacatccctggactgaaaagcaagcacgcacctctgacccctaaagaagaggagtacctgcaggcccaggtgcggagcagaagcaagctggacgcccctaaggtggatctgctggtgaagaattgcctcctgcccctgagagagtacttcaagtatttcagccagaatagtctgcccctgggaggcagcggcggcggcaagcccggcgccgtgagcttcgccgacgtggccgtgtacttcagccccgaggagtggggctgcctgaggcccgcccagagggccctgtacagggacgtgatgagggagacctacggccacctgggcgccctgggcttccccggccccaagcccgccctgatcagctggatggagcaggagagcgaggcctggagccccgccgcccaggaccccgaggagggcgagagcctgggcggcgccctgggcggcccaagcagcggcgcccctcctcccagcggcggcagcccagccggctccccaacctctaccgaggagggcacctctgagtccgccacccccgagagcggccctggcacctccaccgagcccagcgagggcagcgcacccggcagccctgccggcagccccacctccacagaggagggaaccagcaccgagcccagcgaaggcagcgccccaggcaccagcaccgagcctagtgagcaggagattaaacggatcaacaagatcagaagaagacttgtgaaagacagcaacaccaagaaggccggcaagacaggccccatgaaaaccctgctggttagagtgatgacacccgatctgagagagcggctggaaaacctgagaaagaagcctgaaaatatcccccagcccatcagcaatacatctagagccaacctgaataagctgctgaccgattacaccgaaatgaagaaggcgatcctgcatgtgtactgggaagagttccagaaggaccctgtgggcctgatgagccgggtggcccagcctgccagcaagaagatcgatcagaacaagctgaaacctgagatggacgagaagggcaacctgaccaccgccggctttgcctgctctcagtgtggccagcccctgttcgtgtacaagctggagcaggtgtctgagaagggcaaggcttacaccaactacttcggacggtgcaatgtggccgagcacgaaaagctgatcctgctggcccagctgaagcccgagaaggatagcgacgaagccgtgacatatagcctgggaaagtttgggcagagggccctggatttctacagcattcatgtgaccaaggagtccacccaccccgtgaagcccctggcccagatcgccggaaacagatacgcctccggacctgtgggaaaggccctgagcgacgcatgtatgggcacaatcgcctccttcctgtctaagtaccaggacatcatcatcgaacaccagaaggtggtgaagggcaaccagaagagactggagagcctgcgggagctggccggcaaggaaaacctggaataccctagcgtgaccctgccacctcagcctcacaccaaggagggcgttgatgcctacaacgaagtgatcgcccgggtgcgaatgtgggtgaacctgaacctgtggcagaagctgaagctaagcagagatgatgccaagcctctgctgagactgaagggattcccttcctttcctctggtcgagagacaggccaacgaagtggactggtgggacatggtgtgtaacgtgaagaagctgatcaacgagaaaaaggaggatggcaaggtgttttggcagaatctggctggctacaagagacaggaagccctgagaccatacctgagcagcgaggaagatcggaagaagggaaagaaattcgctcggtaccagctgggcgacctgctgctgcacctggaaaagaagcacggcgaggactggggaaaggtgtacgacgaggcctgggagcggattgacaagaaagtggaaggcctgagcaagcacatcaagctggaagaggaacggagaagcgaggacgcccagagcaaggccgccctgaccgactggctgcgggctaaggccagcttcgtgatcgagggcctgaaggaggccgacaaggacgagttctgcagatgcgagctgaagctgcagaagtggtacggggacctgcggggaaagcccttcgccatcgaagccgagaacagcatcctggacatcagcggcttcagcaagcagtacaactgtgccttcatctggcagaaggacggcgtgaagaagctgaacctgtacctgatcatcaactacttcaagggcggcaagctgcggttcaagaagatcaaacctgaagccttcgaagccaacagattctacaccgtgatcaacaaaaagagcggcgagatcgtgcccatggaggtgaacttcaacttcgacgaccccaacctgatcatcctgcctctggcctttggcaagagacagggcagagaattcatctggaacgacctgctgtccctggaaaccggcagcctgaagctggccaacggaagagtgatcgagaagacactgtacaacagaagaacccggcaggatgagcctgccctgttcgtggccctgaccttcgagcggcgggaggtcctggactcctccaatatcaaaccaatgaacctgatcggcgtggcaagaggcgaaaacatccccgccgtgatcgccctgaccgaccccgagggctgcccactgagccggtttaaggatagcctgggaaacccaacccacatcctgagaatcggcgagagctataaggagaagcagcggaccatccaggccaagaaggaggtggagcagcggagagccggcggctacagccggaagtacgccagcaaagccaagaatctggcagacgatatggtgagaaacaccgctagagatctgctgtactacgccgtgacccaggatgccatgctgatcttcgccaacctgagccggggcttcggccggcagggcaagcggaccttcatggccgagagacagtacacacggatggaggactggctgaccgccaagctggcctacgagggcctgagcaagacctacctgtccaagacactggcccagtacacctccaagacatgcagcaactgtgggtttaccatcaccagcgccgactacgacagggtgctggagaagctgaagaagacagcaacaggctggatgaccacaattaacggcaaggagctgaaggtggagggccagattacctactacaacagatacaagagacagaacgtagtcaaggacctgtccgtcgagctggatagactgagcgaagaatctgtgaacaacgacatctcctcctggacaaagggcagaagcggagaagctctgagcctcctgaagaaaagattctcccatagacccgtgcaggagaagttcgtgtgcctgaactgcggcttcgagacacacgcagccgagcaagccgccctgaacatcgccagatcctggctgttcctgcggagccaggagtacaagaaataccagacaaacaagacaaccggcaacaccgataagagagccttcgtcgagacctggcagtccttttaccggaagaagcttaaggaggtgtggaaacctgccgtgcggtctggcggatctggcggaggctccaccagccccaagaaaaagagaaaagtctaagctgccttctgcggggcttgccttctggccatgcccttcttctctcccttgcacctgtacctcttggtctttgaataaagcctgagtaggaaggctagcaaaaaaaaaaaaaaaaaaaaaaaaaaaaaaaaaaaaaaaaaaaaaaaaaaaaaaaaaaaaaaaaaaaaaaaaaaaaaaaa

SEQ ID NO: 12116 - RNA, 5785 nt, synthetic construct
  source 1..5785: mol_type = other RNA
aggaaataagagagaaaagaagagtaagaagaaatataagagccaccatggcccctaagaagaagcgtaaagtgagccggatggaacgcctcgtctacgaggtgcggcagaagtgcagaaacatcgaggacatctgcatctcctgcggatctctgaacgtgaccctggagcacccactgttcatcggcggcatgtgccagaactgtaaaaactgttttctggagtgtgcctatcaatacgacgatgacggctaccagagctactgcaccatctgttgcggcggaagagaggtgctgatgtgtggaaataacaactgctgccggtgcttctgcgtggaatgcgtggacctgctggtgggccccggcgccgcccaggccgctattaaggaagatccttggaactgctacatgtgcggccacaagggcacatacggcctgctgagacggagagaggactggcctagcagactgcagatgttcttcgccaataaccacgaccaggagttcgacccccctaaggtgtaccctcccgtccccgccgagaagagaaagcccatccgggtcctgagcctgttcgatggcatcgccaccggtctgctggtgctgaaggacctgggcatccaggtggataggtacattgcctccgaggtgtgcgaggactccatcaccgtgggaatggtgcgtcatcagggcaagatcatgtacgtgggcgacgtgcggagcgtgacacagaagcatatccaggagtggggccctttcgacctggtgatcggcggcagcccttgcaatgacctgagcatcgtgaacccagcccggaagggcctgtacgagggaaccggcagactgttcttcgagttttacagactgctgcacgacgcccggcctaaggaaggcgacgaccggcccttcttttggctgttcgagaatgtggtggccatgggagtcagcgacaagcgggatattagccggttcctggagagcaaccccgtgatgatcgatgccaaggaagtgagcgccgcccaccgggccagatacttctggggcaatctgcctggcatgaacagacccctggccagcaccgtgaacgacaagctggagctgcaggagtgcctggagcacggccggatcgccaagttcagcaaggtgagaaccatcaccacccgaagcaacagcatcaaacaaggcaaggaccagcactttcctgtgttcatgaacgagaaggaggacatcctgtggtgtaccgagatggagagagtgttcgggttcccagtccactacacagatgtcagcaacatgtctagactggccagacagagactgctgggaagaagctggtccgtccctgtgatcagacacctgttcgcccctctgaaggagtacttcgcctgcgtgagcagcggcaacagcaacgccaacagccggggccccagcttctctagcggcctggtgccactgtccctgagagggagccacatgggccccatggagatctacaaaaccgtgagcgcctggaagcggcagcctgtgcgcgtgctgagcctgtttcggaatatcgataaagtcctgaaaagcctgggattcctggagagcggctctggctccggcggtggcaccctgaagtacgtggaggatgtgacaaacgtggtcagacgggatgtggagaagtggggccccttcgatctggtgtacggcagcacccaacccctgggcagctcttgtgaccggtgccctggctggtacatgtttcagttccaccggatcctgcagtacgccctgccgagacaggagtcccagcggccattcttttggattttcatggacaacttgctgctgaccgaggatgaccaggaaactaccactcggttcctgcagaccgaagccgtgaccctgcaggacgtgagaggccgggactaccagaacgccatgcgggtgtggtccaacatccctggactgaaaagcaagcacgcacctctgacccctaaagaagaggagtacctgcaggcccaggtgcggagcagaagcaagctggacgcccctaaggtggatctgctggtgaagaattgcctcctgcccctgagagagtacttcaagtatttcagccagaatagtctgcccctgggaggcagcggcggcggcaagcccggcgccgtgagcttcgccgacgtggccgtgtacttcagccccgaggagtggggctgcctgaggcccgcccagagggccctgtacagggacgtgatgagggagacctacggccacctgggcgccctgggcttccccggccccaagcccgccctgatcagctggatggagcaggagagcgaggcctggagccccgacgcccaggaccccgaggagggcgagagcctgggcggcgccctgggcggcccaagcagcggcgcccctcctcccagcggcggcagcccagccggctccccaacctctaccgaggagggcacctctgagtccgccacccccgagagcggccctggcacctccaccgagcccagcgagggcagcgcacccggcagccctgccggcagccccacctccacagaggagggaaccagcaccgagcccagcgaaggcagcgccccaggcaccagcaccgagcctagtgagcaggagattaaacggatcaacaagatcagaagaagacttgtgaaagacagcaacaccaagaaggccggcaagacaggccccatgaaaaccctgctggttagagtgatgacacccgatctgagagagcggctggaaaacctgagaaagaagcctgaaaatatcccccagcccatcagcaatacatctagagccaacctgaataagctgctgaccgattacaccgaaatgaagaaggcgatcctgcatgtgtactgggaagagttccagaaggaccctgtgggcctgatgagccgggtggcccagcctgccagcaagaagatcgatcagaacaagctgaaacctgagatggacgagaagggcaacctgaccaccgccggctttgcctgctctcagtgtggccagcccctgttcgtgtacaagctggagcaggtgtctgagaagggcaaggcttacaccaactacttcggacggtgcaatgtggccgagcacgaaaagctgatcctgctggcccagctgaagcccgagaaggatagcgacgaagccgtgacatatagcctgggaaagtttgggcagagggccctggatttctacagcattcatgtgaccaaggagtccacccaccccgtgaagcccctggcccagatcgccggaaacagatacgcctccggacctgtgggaaaggccctgagcgacgcatgtatgggcacaatcgcctccttcctgtctaagtaccaggacatcatcatcgaacaccagaaggtggtgaagggcaaccagaagagactggagagcctgcgggagctggccggcaaggaaaacctggaataccctagcgtgaccctgccacctcagcctcacaccaaggagggcgttgatgcctacaacgaagtgatcgcccgggtgcgaatgtgggtgaacctgaacctgtggcagaagctgaagctaagcagagatgatgccaagcctctgctgagactgaagggattcccttcctttcctctggtcgagagacaggccaacgaagtggactggtgggacatggtgtgtaacgtgaagaagctgatcaacgagaaaaaggaggatggcaaggtgttttggcagaatctggctggctacaagagacaggaagccctgagaccatacctgagcagcgaggaagatcggaagaagggaaagaaattcgctcggtaccagctgggcgacctgctgctgcacctggaaaagaagcacggcgaggactggggaaaggtgtacgacgaggcctgggagcggattgacaagaaagtggaaggcctgagcaagcacatcaagctggaagaggaacggagaagcgaggacgcccagagcaaggccgccctgaccgactggctgcgggctaaggccagcttcgtgatcgagggcctgaaggaggccgacaaggacgagttctgcagatgcgagctgaagctgcagaagtggtacggggacctgcggggaaagcccttcgccatcgaagccgagaacagcatcctggacatcagcggcttcagcaagcagtacaactgtgccttcatctggcagaaggacggcgtgaagaagctgaacctgtacctgatcatcaactacttcaagggcggcaagctgcggttcaagaagatcaaacctgaagccttcgaagccaacagattctacaccgtgatcaacaaaaagagcggcgagatcgtgcccatggaggtgaacttcaacttcgacgaccccaacctgatcatcctgcctctggcctttggcaagagacagggcagagaattcatctggaacgacctgctgtccctggaaaccggcagcctgaagctggccaacggaagagtgatcgagaagacactgtacaacagaagaacccggcaggatgagcctgccctgttcgtggccctgaccttcgagcggcgggaggtcctggactcctccaatatcaaaccaatgaacctgatcggcgtggcaagaggcgaaaacatccccgccgtgatcgccctgaccgaccccgagggctgcccactgagccggtttaaggatagcctgggaaacccaacccacatcctgagaatcggcgagagctataaggagaagcagcggaccatccaggccaagaaggaggtggagcagcggagagccggcggctacagccggaagtacgccagcaaagccaagaatctggcagacgatatggtgagaaacaccgctagagatctgctgtactacgccgtgacccaggatgccatgctgatcttcgccaacctgagccggggcttcggccggcagggcaagcggaccttcatggccgagagacagtacacacggatggaggactggctgaccgccaagctggcctacgagggcctgagcaagacctacctgtccaagacactggcccagtacacctccaagacatgcagcaactgtgggtttaccatcaccagcgccgactacgacagggtgctggagaagctgaagaagacagcaacaggctggatgaccacaattaacggcaaggagctgaaggtggagggccagattacctactacaacagatacaagagacagaacgtagtcaaggacctgtccgtcgagctggatagactgagcgaagaatctgtgaacaacgacatctcctcctggacaaagggcagaagcggagaagctctgagcctcctgaagaaaagattctcccatagacccgtgcaggagaagttcgtgtgcctgaactgcggcttcgagacacacgcagccgagcaagccgccctgaacatcgccagatcctggctgttcctgcggagccaggagtacaagaaataccagacaaacaagacaaccggcaacaccgataagagagccttcgtcgagacctggcagtccttttaccggaagaagcttaaggaggtgtggaaacctgccgtgcggtctggcggatctggcggaggctccaccagccccaagaaaaagagaaaagtctaagctgccttctgcggggcttgccttctggccatgcccttcttctctcccttgcacctgtacctcttggtctttgaataaagcctgagtaggaaggctagcaaaaaaaaaaaaaaaaaaaaaaaaaaaaaaaaaaaaaaaaaaaaaaaaaaaaaaaaaaaaaaaaaaaaaaaaaaaaaaaa

SEQ ID NO: 12117 - RNA, 5785 nt, synthetic construct
  source 1..5785: mol_type = other RNA
aggaaataagagagaaaagaagagtaagaagaaatataagagccaccatggcccctaagaagaagcgtaaagtgagccggatggaacgcctcgtctacgaggtgcggcagaagtgcagaaacatcgaggacatctgcatctcctgcggatctctgaacgtgaccctggagcacccactgttcatcggcggcatgtgccagaactgtaaaaactgttttctggagtgtgcctatcaatacgacgatgacggctaccagagctactgcaccatctgttgcggcggaagagaggtgctgatgtgtggaaataacaactgctgccggtgcttctgcgtggaatgcgtggacctgctggtgggccccggcgccgcccaggccgctattaaggaagatccttggaactgctacatgtgcggccacaagggcacatacggcctgctgagacggagagaggactggcctagcagactgcagatgttcttcgccaataaccacgaccaggagttcgacccccctaaggtgtaccctcccgtccccgccgagaagagaaagcccatccgggtcctgagcctgttcgatggcatcgccaccggtctgctggtgctgaaggacctgggcatccaggtggataggtacattgcctccgaggtgtgcgaggactccatcaccgtgggaatggtgcgtcatcagggcaagatcatgtacgtgggcgacgtgcggagcgtgacacagaagcatatccaggagtggggccctttcgacctggtgatcggcggcagcccttgcaatgacctgagcatcgtgaacccagcccggaagggcctgtacgagggaaccggcagactgttcttcgagttttacagactgctgcacgacgcccggcctaaggaaggcgacgaccggcccttcttttggctgttcgagaatgtggtggccatgggagtcagcgacaagcgggatattagccggttcctggagagcaaccccgtgatgatcgatgccaaggaagtgagcgccgcccaccgggccagatacttctggggcaatctgcctggcatgaacagacccctggccagcaccgtgaacgacaagctggagctgcaggagtgcctggagcacggccggatcgccaagttcagcaaggtgagaaccatcaccacccgaagcaacagcatcaaacaaggcaaggaccagcactttcctgtgttcatgaacgagaaggaggacatcctgtggtgtaccgagatggagagagtgttcgggttcccagtccactacacagatgtcagcaacatgtctagactggccagacagagactgctgggaagaagctggtccgtccctgtgatcagacacctgttcgcccctctgaaggagtacttcgcctgcgtgagcagcggcaacagcaacgccaacagccggggccccagcttctctagcggcctggtgccactgtccctgagagggagccacatgggccccatggagatctacaaaaccgtgagcgcctggaagcggcagcctgtgcgcgtgctgagcctgtttcggaatatcgataaagtcctgaaaagcctgggattcctggagagcggctctggctccggcggtggcaccctgaagtacgtggaggatgtgacaaacgtggtcagacgggatgtggagaagtggggccccttcgatctggtgtacggcagcacccaacccctgggcagctcttgtgaccggtgccctggctggtacatgtttcagttccaccggatcctgcagtacgccctgccgagacaggagtcccagcggccattcttttggattttcatggacaacttgctgctgaccgaggatgaccaggaaactaccactcggttcctgcagaccgaagccgtgaccctgcaggacgtgagaggccgggactaccagaacgccatgcgggtgtggtccaacatccctggactgaaaagcaagcacgcacctctgacccctaaagaagaggagtacctgcaggcccaggtgcggagcagaagcaagctggacgcccctaaggtggatctgctggtgaagaattgcctcctgcccctgagagagtacttcaagtatttcagccagaatagtctgcccctgggaggcagcggcggcggcatggccttcgaggacgtggccgtgtacttcagccaggaggagtggggcctgctggacaccgcccagagggccctgtacaggagggtgatgctggagaacttcaccctggtgaccagcctgggcctgagcaccagcaggccccacgtggtgatccagctggagaggggcgaggagccctgggtgcccagcggcaaggacatgaccctggccaggaacacctacaggaggctgaacgccggcgagggcggcccaagcagcggcgcccctcctcccagcggcggcagcccagccggctccccaacctctaccgaggagggcacctctgagtccgccacccccgagagcggccctggcacctccaccgagcccagcgagggcagcgcacccggcagccctgccggcagccccacctccacagaggagggaaccagcaccgagcccagcgaaggcagcgccccaggcaccagcaccgagcctagtgagcaggagattaaacggatcaacaagatcagaagaagacttgtgaaagacagcaacaccaagaaggccggcaagacaggccccatgaaaaccctgctggttagagtgatgacacccgatctgagagagcggctggaaaacctgagaaagaagcctgaaaatatcccccagcccatcagcaatacatctagagccaacctgaataagctgctgaccgattacaccgaaatgaagaaggcgatcctgcatgtgtactgggaagagttccagaaggaccctgtgggcctgatgagccgggtggcccagcctgccagcaagaagatcgatcagaacaagctgaaacctgagatggacgagaagggcaacctgaccaccgccggctttgcctgctctcagtgtggccagcccctgttcgtgtacaagctggagcaggtgtctgagaagggcaaggcttacaccaactacttcggacggtgcaatgtggccgagcacgaaaagctgatcctgctggcccagctgaagcccgagaaggatagcgacgaagccgtgacatatagcctgggaaagtttgggcagagggccctggatttctacagcattcatgtgaccaaggagtccacccaccccgtgaagcccctggcccagatcgccggaaacagatacgcctccggacctgtgggaaaggccctgagcgacgcatgtatgggcacaatcgcctccttcctgtctaagtaccaggacatcatcatcgaacaccagaaggtggtgaagggcaaccagaagagactggagagcctgcgggagctggccggcaaggaaaacctggaataccctagcgtgaccctgccacctcagcctcacaccaaggagggcgttgatgcctacaacgaagtgatcgcccgggtgcgaatgtgggtgaacctgaacctgtggcagaagctgaagctaagcagagatgatgccaagcctctgctgagactgaagggattcccttcctttcctctggtcgagagacaggccaacgaagtggactggtgggacatggtgtgtaacgtgaagaagctgatcaacgagaaaaaggaggatggcaaggtgttttggcagaatctggctggctacaagagacaggaagccctgagaccatacctgagcagcgaggaagatcggaagaagggaaagaaattcgctcggtaccagctgggcgacctgctgctgcacctggaaaagaagcacggcgaggactggggaaaggtgtacgacgaggcctgggagcggattgacaagaaagtggaaggcctgagcaagcacatcaagctggaagaggaacggagaagcgaggacgcccagagcaaggccgccctgaccgactggctgcgggctaaggccagcttcgtgatcgagggcctgaaggaggccgacaaggacgagttctgcagatgcgagctgaagctgcagaagtggtacggggacctgcggggaaagcccttcgccatcgaagccgagaacagcatcctggacatcagcggcttcagcaagcagtacaactgtgccttcatctggcagaaggacggcgtgaagaagctgaacctgtacctgatcatcaactacttcaagggcggcaagctgcggttcaagaagatcaaacctgaagccttcgaagccaacagattctacaccgtgatcaacaaaaagagcggcgagatcgtgcccatggaggtgaacttcaacttcgacgaccccaacctgatcatcctgcctctggcctttggcaagagacagggcagagaattcatctggaacgacctgctgtccctggaaaccggcagcctgaagctggccaacggaagagtgatcgagaagacactgtacaacagaagaacccggcaggatgagcctgccctgttcgtggccctgaccttcgagcggcgggaggtcctggactcctccaatatcaaaccaatgaacctgatcggcgtggcaagaggcgaaaacatccccgccgtgatcgccctgaccgaccccgagggctgcccactgagccggtttaaggatagcctgggaaacccaacccacatcctgagaatcggcgagagctataaggagaagcagcggaccatccaggccaagaaggaggtggagcagcggagagccggcggctacagccggaagtacgccagcaaagccaagaatctggcagacgatatggtgagaaacaccgctagagatctgctgtactacgccgtgacccaggatgccatgctgatcttcgccaacctgagccggggcttcggccggcagggcaagcggaccttcatggccgagagacagtacacacggatggaggactggctgaccgccaagctggcctacgagggcctgagcaagacctacctgtccaagacactggcccagtacacctccaagacatgcagcaactgtgggtttaccatcaccagcgccgactacgacagggtgctggagaagctgaagaagacagcaacaggctggatgaccacaattaacggcaaggagctgaaggtggagggccagattacctactacaacagatacaagagacagaacgtagtcaaggacctgtccgtcgagctggatagactgagcgaagaatctgtgaacaacgacatctcctcctggacaaagggcagaagcggagaagctctgagcctcctgaagaaaagattctcccatagacccgtgcaggagaagttcgtgtgcctgaactgcggcttcgagacacacgcagccgagcaagccgccctgaacatcgccagatcctggctgttcctgcggagccaggagtacaagaaataccagacaaacaagacaaccggcaacaccgataagagagccttcgtcgagacctggcagtccttttaccggaagaagcttaaggaggtgtggaaacctgccgtgcggtctggcggatctggcggaggctccaccagccccaagaaaaagagaaaagtctaagctgccttctgcggggcttgccttctggccatgcccttcttctctcccttgcacctgtacctcttggtctttgaataaagcctgagtaggaaggctagcaaaaaaaaaaaaaaaaaaaaaaaaaaaaaaaaaaaaaaaaaaaaaaaaaaaaaaaaaaaaaaaaaaaaaaaaaaaaaaaa

SEQ ID NO: 12118 - RNA, 5785 nt, synthetic construct
  source 1..5785: mol_type = other RNA
aggaaataagagagaaaagaagagtaagaagaaatataagagccaccatggcccctaagaagaagcgtaaagtgagccggatggaacgcctcgtctacgaggtgcggcagaagtgcagaaacatcgaggacatctgcatctcctgcggatctctgaacgtgaccctggagcacccactgttcatcggcggcatgtgccagaactgtaaaaactgttttctggagtgtgcctatcaatacgacgatgacggctaccagagctactgcaccatctgttgcggcggaagagaggtgctgatgtgtggaaataacaactgctgccggtgcttctgcgtggaatgcgtggacctgctggtgggccccggcgccgcccaggccgctattaaggaagatccttggaactgctacatgtgcggccacaagggcacatacggcctgctgagacggagagaggactggcctagcagactgcagatgttcttcgccaataaccacgaccaggagttcgacccccctaaggtgtaccctcccgtccccgccgagaagagaaagcccatccgggtcctgagcctgttcgatggcatcgccaccggtctgctggtgctgaaggacctgggcatccaggtggataggtacattgcctccgaggtgtgcgaggactccatcaccgtgggaatggtgcgtcatcagggcaagatcatgtacgtgggcgacgtgcggagcgtgacacagaagcatatccaggagtggggccctttcgacctggtgatcggcggcagcccttgcaatgacctgagcatcgtgaacccagcccggaagggcctgtacgagggaaccggcagactgttcttcgagttttacagactgctgcacgacgcccggcctaaggaaggcgacgaccggcccttcttttggctgttcgagaatgtggtggccatgggagtcagcgacaagcgggatattagccggttcctggagagcaaccccgtgatgatcgatgccaaggaagtgagcgccgcccaccgggccagatacttctggggcaatctgcctggcatgaacagacccctggccagcaccgtgaacgacaagctggagctgcaggagtgcctggagcacggccggatcgccaagttcagcaaggtgagaaccatcaccacccgaagcaacagcatcaaacaaggcaaggaccagcactttcctgtgttcatgaacgagaaggaggacatcctgtggtgtaccgagatggagagagtgttcgggttcccagtccactacacagatgtcagcaacatgtctagactggccagacagagactgctgggaagaagctggtccgtccctgtgatcagacacctgttcgcccctctgaaggagtacttcgcctgcgtgagcagcggcaacagcaacgccaacagccggggccccagcttctctagcggcctggtgccactgtccctgagagggagccacatgggccccatggagatctacaaaaccgtgagcgcctggaagcggcagcctgtgcgcgtgctgagcctgtttcggaatatcgataaagtcctgaaaagcctgggattcctggagagcggctctggctccggcggtggcaccctgaagtacgtggaggatgtgacaaacgtggtcagacgggatgtggagaagtggggccccttcgatctggtgtacggcagcacccaacccctgggcagctcttgtgaccggtgccctggctggtacatgtttcagttccaccggatcctgcagtacgccctgccgagacaggagtcccagcggccattcttttggattttcatggacaacttgctgctgaccgaggatgaccaggaaactaccactcggttcctgcagaccgaagccgtgaccctgcaggacgtgagaggccgggactaccagaacgccatgcgggtgtggtccaacatccctggactgaaaagcaagcacgcacctctgacccctaaagaagaggagtacctgcaggcccaggtgcggagcagaagcaagctggacgcccctaaggtggatctgctggtgaagaattgcctcctgcccctgagagagtacttcaagtatttcagccagaatagtctgcccctgggaggcagcggcggcggcatggccttcgaggacgtggccgtgtacttcagccaggaggagtggggcctgctggacaccgcccagagggccctgtacaggagggtgatgctggacaacttcgccctggtggccagcctgggcctgagcaccagcaggcccagggtggtgatccagctggagaggggcgaggagccctgggtgcccagcggcaccgacaccgtgctgagcaggaacacctacaggaggaggaaccccggcagcggcggcccaagcagcggcgcccctcctcccagcggcggcagcccagccggctccccaacctctaccgaggagggcacctctgagtccgccacccccgagagcggccctggcacctccaccgagcccagcgagggcagcgcacccggcagccctgccggcagccccacctccacagaggagggaaccagcaccgagcccagcgaaggcagcgccccaggcaccagcaccgagcctagtgagcaggagattaaacggatcaacaagatcagaagaagacttgtgaaagacagcaacaccaagaaggccggcaagacaggccccatgaaaaccctgctggttagagtgatgacacccgatctgagagagcggctggaaaacctgagaaagaagcctgaaaatatcccccagcccatcagcaatacatctagagccaacctgaataagctgctgaccgattacaccgaaatgaagaaggcgatcctgcatgtgtactgggaagagttccagaaggaccctgtgggcctgatgagccgggtggcccagcctgccagcaagaagatcgatcagaacaagctgaaacctgagatggacgagaagggcaacctgaccaccgccggctttgcctgctctcagtgtggccagcccctgttcgtgtacaagctggagcaggtgtctgagaagggcaaggcttacaccaactacttcggacggtgcaatgtggccgagcacgaaaagctgatcctgctggcccagctgaagcccgagaaggatagcgacgaagccgtgacatatagcctgggaaagtttgggcagagggccctggatttctacagcattcatgtgaccaaggagtccacccaccccgtgaagcccctggcccagatcgccggaaacagatacgcctccggacctgtgggaaaggccctgagcgacgcatgtatgggcacaatcgcctccttcctgtctaagtaccaggacatcatcatcgaacaccagaaggtggtgaagggcaaccagaagagactggagagcctgcgggagctggccggcaaggaaaacctggaataccctagcgtgaccctgccacctcagcctcacaccaaggagggcgttgatgcctacaacgaagtgatcgcccgggtgcgaatgtgggtgaacctgaacctgtggcagaagctgaagctaagcagagatgatgccaagcctctgctgagactgaagggattcccttcctttcctctggtcgagagacaggccaacgaagtggactggtgggacatggtgtgtaacgtgaagaagctgatcaacgagaaaaaggaggatggcaaggtgttttggcagaatctggctggctacaagagacaggaagccctgagaccatacctgagcagcgaggaagatcggaagaagggaaagaaattcgctcggtaccagctgggcgacctgctgctgcacctggaaaagaagcacggcgaggactggggaaaggtgtacgacgaggcctgggagcggattgacaagaaagtggaaggcctgagcaagcacatcaagctggaagaggaacggagaagcgaggacgcccagagcaaggccgccctgaccgactggctgcgggctaaggccagcttcgtgatcgagggcctgaaggaggccgacaaggacgagttctgcagatgcgagctgaagctgcagaagtggtacggggacctgcggggaaagcccttcgccatcgaagccgagaacagcatcctggacatcagcggcttcagcaagcagtacaactgtgccttcatctggcagaaggacggcgtgaagaagctgaacctgtacctgatcatcaactacttcaagggcggcaagctgcggttcaagaagatcaaacctgaagccttcgaagccaacagattctacaccgtgatcaacaaaaagagcggcgagatcgtgcccatggaggtgaacttcaacttcgacgaccccaacctgatcatcctgcctctggcctttggcaagagacagggcagagaattcatctggaacgacctgctgtccctggaaaccggcagcctgaagctggccaacggaagagtgatcgagaagacactgtacaacagaagaacccggcaggatgagcctgccctgttcgtggccctgaccttcgagcggcgggaggtcctggactcctccaatatcaaaccaatgaacctgatcggcgtggcaagaggcgaaaacatccccgccgtgatcgccctgaccgaccccgagggctgcccactgagccggtttaaggatagcctgggaaacccaacccacatcctgagaatcggcgagagctataaggagaagcagcggaccatccaggccaagaaggaggtggagcagcggagagccggcggctacagccggaagtacgccagcaaagccaagaatctggcagacgatatggtgagaaacaccgctagagatctgctgtactacgccgtgacccaggatgccatgctgatcttcgccaacctgagccggggcttcggccggcagggcaagcggaccttcatggccgagagacagtacacacggatggaggactggctgaccgccaagctggcctacgagggcctgagcaagacctacctgtccaagacactggcccagtacacctccaagacatgcagcaactgtgggtttaccatcaccagcgccgactacgacagggtgctggagaagctgaagaagacagcaacaggctggatgaccacaattaacggcaaggagctgaaggtggagggccagattacctactacaacagatacaagagacagaacgtagtcaaggacctgtccgtcgagctggatagactgagcgaagaatctgtgaacaacgacatctcctcctggacaaagggcagaagcggagaagctctgagcctcctgaagaaaagattctcccatagacccgtgcaggagaagttcgtgtgcctgaactgcggcttcgagacacacgcagccgagcaagccgccctgaacatcgccagatcctggctgttcctgcggagccaggagtacaagaaataccagacaaacaagacaaccggcaacaccgataagagagccttcgtcgagacctggcagtccttttaccggaagaagcttaaggaggtgtggaaacctgccgtgcggtctggcggatctggcggaggctccaccagccccaagaaaaagagaaaagtctaagctgccttctgcggggcttgccttctggccatgcccttcttctctcccttgcacctgtacctcttggtctttgaataaagcctgagtaggaaggctagcaaaaaaaaaaaaaaaaaaaaaaaaaaaaaaaaaaaaaaaaaaaaaaaaaaaaaaaaaaaaaaaaaaaaaaaaaaaaaaaa

SEQ ID NO: 12119 - RNA, 5785 nt, synthetic construct
  source 1..5785: mol_type = other RNA
aggaaataagagagaaaagaagagtaagaagaaatataagagccaccatggcccctaagaagaagcgtaaagtgagccggatggaacgcctcgtctacgaggtgcggcagaagtgcagaaacatcgaggacatctgcatctcctgcggatctctgaacgtgaccctggagcacccactgttcatcggcggcatgtgccagaactgtaaaaactgttttctggagtgtgcctatcaatacgacgatgacggctaccagagctactgcaccatctgttgcggcggaagagaggtgctgatgtgtggaaataacaactgctgccggtgcttctgcgtggaatgcgtggacctgctggtgggccccggcgccgcccaggccgctattaaggaagatccttggaactgctacatgtgcggccacaagggcacatacggcctgctgagacggagagaggactggcctagcagactgcagatgttcttcgccaataaccacgaccaggagttcgacccccctaaggtgtaccctcccgtccccgccgagaagagaaagcccatccgggtcctgagcctgttcgatggcatcgccaccggtctgctggtgctgaaggacctgggcatccaggtggataggtacattgcctccgaggtgtgcgaggactccatcaccgtgggaatggtgcgtcatcagggcaagatcatgtacgtgggcgacgtgcggagcgtgacacagaagcatatccaggagtggggccctttcgacctggtgatcggcggcagcccttgcaatgacctgagcatcgtgaacccagcccggaagggcctgtacgagggaaccggcagactgttcttcgagttttacagactgctgcacgacgcccggcctaaggaaggcgacgaccggcccttcttttggctgttcgagaatgtggtggccatgggagtcagcgacaagcgggatattagccggttcctggagagcaaccccgtgatgatcgatgccaaggaagtgagcgccgcccaccgggccagatacttctggggcaatctgcctggcatgaacagacccctggccagcaccgtgaacgacaagctggagctgcaggagtgcctggagcacggccggatcgccaagttcagcaaggtgagaaccatcaccacccgaagcaacagcatcaaacaaggcaaggaccagcactttcctgtgttcatgaacgagaaggaggacatcctgtggtgtaccgagatggagagagtgttcgggttcccagtccactacacagatgtcagcaacatgtctagactggccagacagagactgctgggaagaagctggtccgtccctgtgatcagacacctgttcgcccctctgaaggagtacttcgcctgcgtgagcagcggcaacagcaacgccaacagccggggccccagcttctctagcggcctggtgccactgtccctgagagggagccacatgggccccatggagatctacaaaaccgtgagcgcctggaagcggcagcctgtgcgcgtgctgagcctgtttcggaatatcgataaagtcctgaaaagcctgggattcctggagagcggctctggctccggcggtggcaccctgaagtacgtggaggatgtgacaaacgtggtcagacgggatgtggagaagtggggccccttcgatctggtgtacggcagcacccaacccctgggcagctcttgtgaccggtgccctggctggtacatgtttcagttccaccggatcctgcagtacgccctgccgagacaggagtcccagcggccattcttttggattttcatggacaacttgctgctgaccgaggatgaccaggaaactaccactcggttcctgcagaccgaagccgtgaccctgcaggacgtgagaggccgggactaccagaacgccatgcgggtgtggtccaacatccctggactgaaaagcaagcacgcacctctgacccctaaagaagaggagtacctgcaggcccaggtgcggagcagaagcaagctggacgcccctaaggtggatctgctggtgaagaattgcctcctgcccctgagagagtacttcaagtatttcagccagaatagtctgcccctgggaggcagcggcggcggcaagcccggcgccgtgagcttcgccgacgtggccgtgtacttcagccccgaggagtggggctgcctgaggcccgcccagagggccctgtacagggacgtgatgagggagacctacggccacctgggcgccctgggcttccccggccccaagcccgccctgatcagctggatggagcaggagaccgaggcctggagccccgccgcccaggaccccgagaagggcgagaggctgggcggcgccaggggcggcccaagcagcggcgcccctcctcccagcggcggcagcccagccggctccccaacctctaccgaggagggcacctctgagtccgccacccccgagagcggccctggcacctccaccgagcccagcgagggcagcgcacccggcagccctgccggcagccccacctccacagaggagggaaccagcaccgagcccagcgaaggcagcgccccaggcaccagcaccgagcctagtgagcaggagattaaacggatcaacaagatcagaagaagacttgtgaaagacagcaacaccaagaaggccggcaagacaggccccatgaaaaccctgctggttagagtgatgacacccgatctgagagagcggctggaaaacctgagaaagaagcctgaaaatatcccccagcccatcagcaatacatctagagccaacctgaataagctgctgaccgattacaccgaaatgaagaaggcgatcctgcatgtgtactgggaagagttccagaaggaccctgtgggcctgatgagccgggtggcccagcctgccagcaagaagatcgatcagaacaagctgaaacctgagatggacgagaagggcaacctgaccaccgccggctttgcctgctctcagtgtggccagcccctgttcgtgtacaagctggagcaggtgtctgagaagggcaaggcttacaccaactacttcggacggtgcaatgtggccgagcacgaaaagctgatcctgctggcccagctgaagcccgagaaggatagcgacgaagccgtgacatatagcctgggaaagtttgggcagagggccctggatttctacagcattcatgtgaccaaggagtccacccaccccgtgaagcccctggcccagatcgccggaaacagatacgcctccggacctgtgggaaaggccctgagcgacgcatgtatgggcacaatcgcctccttcctgtctaagtaccaggacatcatcatcgaacaccagaaggtggtgaagggcaaccagaagagactggagagcctgcgggagctggccggcaaggaaaacctggaataccctagcgtgaccctgccacctcagcctcacaccaaggagggcgttgatgcctacaacgaagtgatcgcccgggtgcgaatgtgggtgaacctgaacctgtggcagaagctgaagctaagcagagatgatgccaagcctctgctgagactgaagggattcccttcctttcctctggtcgagagacaggccaacgaagtggactggtgggacatggtgtgtaacgtgaagaagctgatcaacgagaaaaaggaggatggcaaggtgttttggcagaatctggctggctacaagagacaggaagccctgagaccatacctgagcagcgaggaagatcggaagaagggaaagaaattcgctcggtaccagctgggcgacctgctgctgcacctggaaaagaagcacggcgaggactggggaaaggtgtacgacgaggcctgggagcggattgacaagaaagtggaaggcctgagcaagcacatcaagctggaagaggaacggagaagcgaggacgcccagagcaaggccgccctgaccgactggctgcgggctaaggccagcttcgtgatcgagggcctgaaggaggccgacaaggacgagttctgcagatgcgagctgaagctgcagaagtggtacggggacctgcggggaaagcccttcgccatcgaagccgagaacagcatcctggacatcagcggcttcagcaagcagtacaactgtgccttcatctggcagaaggacggcgtgaagaagctgaacctgtacctgatcatcaactacttcaagggcggcaagctgcggttcaagaagatcaaacctgaagccttcgaagccaacagattctacaccgtgatcaacaaaaagagcggcgagatcgtgcccatggaggtgaacttcaacttcgacgaccccaacctgatcatcctgcctctggcctttggcaagagacagggcagagaattcatctggaacgacctgctgtccctggaaaccggcagcctgaagctggccaacggaagagtgatcgagaagacactgtacaacagaagaacccggcaggatgagcctgccctgttcgtggccctgaccttcgagcggcgggaggtcctggactcctccaatatcaaaccaatgaacctgatcggcgtggcaagaggcgaaaacatccccgccgtgatcgccctgaccgaccccgagggctgcccactgagccggtttaaggatagcctgggaaacccaacccacatcctgagaatcggcgagagctataaggagaagcagcggaccatccaggccaagaaggaggtggagcagcggagagccggcggctacagccggaagtacgccagcaaagccaagaatctggcagacgatatggtgagaaacaccgctagagatctgctgtactacgccgtgacccaggatgccatgctgatcttcgccaacctgagccggggcttcggccggcagggcaagcggaccttcatggccgagagacagtacacacggatggaggactggctgaccgccaagctggcctacgagggcctgagcaagacctacctgtccaagacactggcccagtacacctccaagacatgcagcaactgtgggtttaccatcaccagcgccgactacgacagggtgctggagaagctgaagaagacagcaacaggctggatgaccacaattaacggcaaggagctgaaggtggagggccagattacctactacaacagatacaagagacagaacgtagtcaaggacctgtccgtcgagctggatagactgagcgaagaatctgtgaacaacgacatctcctcctggacaaagggcagaagcggagaagctctgagcctcctgaagaaaagattctcccatagacccgtgcaggagaagttcgtgtgcctgaactgcggcttcgagacacacgcagccgagcaagccgccctgaacatcgccagatcctggctgttcctgcggagccaggagtacaagaaataccagacaaacaagacaaccggcaacaccgataagagagccttcgtcgagacctggcagtccttttaccggaagaagcttaaggaggtgtggaaacctgccgtgcggtctggcggatctggcggaggctccaccagccccaagaaaaagagaaaagtctaagctgccttctgcggggcttgccttctggccatgcccttcttctctcccttgcacctgtacctcttggtctttgaataaagcctgagtaggaaggctagcaaaaaaaaaaaaaaaaaaaaaaaaaaaaaaaaaaaaaaaaaaaaaaaaaaaaaaaaaaaaaaaaaaaaaaaaaaaaaaaa

SEQ ID NO: 12120 - RNA, 5785 nt, synthetic construct
  source 1..5785: mol_type = other RNA
aggaaataagagagaaaagaagagtaagaagaaatataagagccaccatggcccctaagaagaagcgtaaagtgagccggatggaacgcctcgtctacgaggtgcggcagaagtgcagaaacatcgaggacatctgcatctcctgcggatctctgaacgtgaccctggagcacccactgttcatcggcggcatgtgccagaactgtaaaaactgttttctggagtgtgcctatcaatacgacgatgacggctaccagagctactgcaccatctgttgcggcggaagagaggtgctgatgtgtggaaataacaactgctgccggtgcttctgcgtggaatgcgtggacctgctggtgggccccggcgccgcccaggccgctattaaggaagatccttggaactgctacatgtgcggccacaagggcacatacggcctgctgagacggagagaggactggcctagcagactgcagatgttcttcgccaataaccacgaccaggagttcgacccccctaaggtgtaccctcccgtccccgccgagaagagaaagcccatccgggtcctgagcctgttcgatggcatcgccaccggtctgctggtgctgaaggacctgggcatccaggtggataggtacattgcctccgaggtgtgcgaggactccatcaccgtgggaatggtgcgtcatcagggcaagatcatgtacgtgggcgacgtgcggagcgtgacacagaagcatatccaggagtggggccctttcgacctggtgatcggcggcagcccttgcaatgacctgagcatcgtgaacccagcccggaagggcctgtacgagggaaccggcagactgttcttcgagttttacagactgctgcacgacgcccggcctaaggaaggcgacgaccggcccttcttttggctgttcgagaatgtggtggccatgggagtcagcgacaagcgggatattagccggttcctggagagcaaccccgtgatgatcgatgccaaggaagtgagcgccgcccaccgggccagatacttctggggcaatctgcctggcatgaacagacccctggccagcaccgtgaacgacaagctggagctgcaggagtgcctggagcacggccggatcgccaagttcagcaaggtgagaaccatcaccacccgaagcaacagcatcaaacaaggcaaggaccagcactttcctgtgttcatgaacgagaaggaggacatcctgtggtgtaccgagatggagagagtgttcgggttcccagtccactacacagatgtcagcaacatgtctagactggccagacagagactgctgggaagaagctggtccgtccctgtgatcagacacctgttcgcccctctgaaggagtacttcgcctgcgtgagcagcggcaacagcaacgccaacagccggggccccagcttctctagcggcctggtgccactgtccctgagagggagccacatgggccccatggagatctacaaaaccgtgagcgcctggaagcggcagcctgtgcgcgtgctgagcctgtttcggaatatcgataaagtcctgaaaagcctgggattcctggagagcggctctggctccggcggtggcaccctgaagtacgtggaggatgtgacaaacgtggtcagacgggatgtggagaagtggggccccttcgatctggtgtacggcagcacccaacccctgggcagctcttgtgaccggtgccctggctggtacatgtttcagttccaccggatcctgcagtacgccctgccgagacaggagtcccagcggccattcttttggattttcatggacaacttgctgctgaccgaggatgaccaggaaactaccactcggttcctgcagaccgaagccgtgaccctgcaggacgtgagaggccgggactaccagaacgccatgcgggtgtggtccaacatccctggactgaaaagcaagcacgcacctctgacccctaaagaagaggagtacctgcaggcccaggtgcggagcagaagcaagctggacgcccctaaggtggatctgctggtgaagaattgcctcctgcccctgagagagtacttcaagtatttcagccagaatagtctgcccctgggaggcagcggcggcggcatggccttcgaggacgtggccgtgtacttcagccaggaggagtggggcctgctggacaccgcccagagggccctgtacaggagggtgatgctggacaacttcgccctggtggccagcctgggcctgagcaccagcaggcccagggtggtgatccagctggagaggggcgaggagccctgggtgcccagcggcaaggacatgaccctggccaggaacacctacggcaggctgaacagcggcagcggcggcccaagcagcggcgcccctcctcccagcggcggcagcccagccggctccccaacctctaccgaggagggcacctctgagtccgccacccccgagagcggccctggcacctccaccgagcccagcgagggcagcgcacccggcagccctgccggcagccccacctccacagaggagggaaccagcaccgagcccagcgaaggcagcgccccaggcaccagcaccgagcctagtgagcaggagattaaacggatcaacaagatcagaagaagacttgtgaaagacagcaacaccaagaaggccggcaagacaggccccatgaaaaccctgctggttagagtgatgacacccgatctgagagagcggctggaaaacctgagaaagaagcctgaaaatatcccccagcccatcagcaatacatctagagccaacctgaataagctgctgaccgattacaccgaaatgaagaaggcgatcctgcatgtgtactgggaagagttccagaaggaccctgtgggcctgatgagccgggtggcccagcctgccagcaagaagatcgatcagaacaagctgaaacctgagatggacgagaagggcaacctgaccaccgccggctttgcctgctctcagtgtggccagcccctgttcgtgtacaagctggagcaggtgtctgagaagggcaaggcttacaccaactacttcggacggtgcaatgtggccgagcacgaaaagctgatcctgctggcccagctgaagcccgagaaggatagcgacgaagccgtgacatatagcctgggaaagtttgggcagagggccctggatttctacagcattcatgtgaccaaggagtccacccaccccgtgaagcccctggcccagatcgccggaaacagatacgcctccggacctgtgggaaaggccctgagcgacgcatgtatgggcacaatcgcctccttcctgtctaagtaccaggacatcatcatcgaacaccagaaggtggtgaagggcaaccagaagagactggagagcctgcgggagctggccggcaaggaaaacctggaataccctagcgtgaccctgccacctcagcctcacaccaaggagggcgttgatgcctacaacgaagtgatcgcccgggtgcgaatgtgggtgaacctgaacctgtggcagaagctgaagctaagcagagatgatgccaagcctctgctgagactgaagggattcccttcctttcctctggtcgagagacaggccaacgaagtggactggtgggacatggtgtgtaacgtgaagaagctgatcaacgagaaaaaggaggatggcaaggtgttttggcagaatctggctggctacaagagacaggaagccctgagaccatacctgagcagcgaggaagatcggaagaagggaaagaaattcgctcggtaccagctgggcgacctgctgctgcacctggaaaagaagcacggcgaggactggggaaaggtgtacgacgaggcctgggagcggattgacaagaaagtggaaggcctgagcaagcacatcaagctggaagaggaacggagaagcgaggacgcccagagcaaggccgccctgaccgactggctgcgggctaaggccagcttcgtgatcgagggcctgaaggaggccgacaaggacgagttctgcagatgcgagctgaagctgcagaagtggtacggggacctgcggggaaagcccttcgccatcgaagccgagaacagcatcctggacatcagcggcttcagcaagcagtacaactgtgccttcatctggcagaaggacggcgtgaagaagctgaacctgtacctgatcatcaactacttcaagggcggcaagctgcggttcaagaagatcaaacctgaagccttcgaagccaacagattctacaccgtgatcaacaaaaagagcggcgagatcgtgcccatggaggtgaacttcaacttcgacgaccccaacctgatcatcctgcctctggcctttggcaagagacagggcagagaattcatctggaacgacctgctgtccctggaaaccggcagcctgaagctggccaacggaagagtgatcgagaagacactgtacaacagaagaacccggcaggatgagcctgccctgttcgtggccctgaccttcgagcggcgggaggtcctggactcctccaatatcaaaccaatgaacctgatcggcgtggcaagaggcgaaaacatccccgccgtgatcgccctgaccgaccccgagggctgcccactgagccggtttaaggatagcctgggaaacccaacccacatcctgagaatcggcgagagctataaggagaagcagcggaccatccaggccaagaaggaggtggagcagcggagagccggcggctacagccggaagtacgccagcaaagccaagaatctggcagacgatatggtgagaaacaccgctagagatctgctgtactacgccgtgacccaggatgccatgctgatcttcgccaacctgagccggggcttcggccggcagggcaagcggaccttcatggccgagagacagtacacacggatggaggactggctgaccgccaagctggcctacgagggcctgagcaagacctacctgtccaagacactggcccagtacacctccaagacatgcagcaactgtgggtttaccatcaccagcgccgactacgacagggtgctggagaagctgaagaagacagcaacaggctggatgaccacaattaacggcaaggagctgaaggtggagggccagattacctactacaacagatacaagagacagaacgtagtcaaggacctgtccgtcgagctggatagactgagcgaagaatctgtgaacaacgacatctcctcctggacaaagggcagaagcggagaagctctgagcctcctgaagaaaagattctcccatagacccgtgcaggagaagttcgtgtgcctgaactgcggcttcgagacacacgcagccgagcaagccgccctgaacatcgccagatcctggctgttcctgcggagccaggagtacaagaaataccagacaaacaagacaaccggcaacaccgataagagagccttcgtcgagacctggcagtccttttaccggaagaagcttaaggaggtgtggaaacctgccgtgcggtctggcggatctggcggaggctccaccagccccaagaaaaagagaaaagtctaagctgccttctgcggggcttgccttctggccatgcccttcttctctcccttgcacctgtacctcttggtctttgaataaagcctgagtaggaaggctagcaaaaaaaaaaaaaaaaaaaaaaaaaaaaaaaaaaaaaaaaaaaaaaaaaaaaaaaaaaaaaaaaaaaaaaaaaaaaaaaa

SEQ ID NO: 12121 - RNA, 5785 nt, synthetic construct
  source 1..5785: mol_type = other RNA
aggaaataagagagaaaagaagagtaagaagaaatataagagccaccatggcccctaagaagaagcgtaaagtgagccggatggaacgcctcgtctacgaggtgcggcagaagtgcagaaacatcgaggacatctgcatctcctgcggatctctgaacgtgaccctggagcacccactgttcatcggcggcatgtgccagaactgtaaaaactgttttctggagtgtgcctatcaatacgacgatgacggctaccagagctactgcaccatctgttgcggcggaagagaggtgctgatgtgtggaaataacaactgctgccggtgcttctgcgtggaatgcgtggacctgctggtgggccccggcgccgcccaggccgctattaaggaagatccttggaactgctacatgtgcggccacaagggcacatacggcctgctgagacggagagaggactggcctagcagactgcagatgttcttcgccaataaccacgaccaggagttcgacccccctaaggtgtaccctcccgtccccgccgagaagagaaagcccatccgggtcctgagcctgttcgatggcatcgccaccggtctgctggtgctgaaggacctgggcatccaggtggataggtacattgcctccgaggtgtgcgaggactccatcaccgtgggaatggtgcgtcatcagggcaagatcatgtacgtgggcgacgtgcggagcgtgacacagaagcatatccaggagtggggccctttcgacctggtgatcggcggcagcccttgcaatgacctgagcatcgtgaacccagcccggaagggcctgtacgagggaaccggcagactgttcttcgagttttacagactgctgcacgacgcccggcctaaggaaggcgacgaccggcccttcttttggctgttcgagaatgtggtggccatgggagtcagcgacaagcgggatattagccggttcctggagagcaaccccgtgatgatcgatgccaaggaagtgagcgccgcccaccgggccagatacttctggggcaatctgcctggcatgaacagacccctggccagcaccgtgaacgacaagctggagctgcaggagtgcctggagcacggccggatcgccaagttcagcaaggtgagaaccatcaccacccgaagcaacagcatcaaacaaggcaaggaccagcactttcctgtgttcatgaacgagaaggaggacatcctgtggtgtaccgagatggagagagtgttcgggttcccagtccactacacagatgtcagcaacatgtctagactggccagacagagactgctgggaagaagctggtccgtccctgtgatcagacacctgttcgcccctctgaaggagtacttcgcctgcgtgagcagcggcaacagcaacgccaacagccggggccccagcttctctagcggcctggtgccactgtccctgagagggagccacatgggccccatggagatctacaaaaccgtgagcgcctggaagcggcagcctgtgcgcgtgctgagcctgtttcggaatatcgataaagtcctgaaaagcctgggattcctggagagcggctctggctccggcggtggcaccctgaagtacgtggaggatgtgacaaacgtggtcagacgggatgtggagaagtggggccccttcgatctggtgtacggcagcacccaacccctgggcagctcttgtgaccggtgccctggctggtacatgtttcagttccaccggatcctgcagtacgccctgccgagacaggagtcccagcggccattcttttggattttcatggacaacttgctgctgaccgaggatgaccaggaaactaccactcggttcctgcagaccgaagccgtgaccctgcaggacgtgagaggccgggactaccagaacgccatgcgggtgtggtccaacatccctggactgaaaagcaagcacgcacctctgacccctaaagaagaggagtacctgcaggcccaggtgcggagcagaagcaagctggacgcccctaaggtggatctgctggtgaagaattgcctcctgcccctgagagagtacttcaagtatttcagccagaatagtctgcccctgggaggcagcggcggcggcagccagagccccctgaccttcggcgacgtggccgtggagttcagcggcgaggagtgggcctggctggacagcgcccagaggagcctgcacaggagcgtgatgctggagaactacaggaacctggccagcctgggcctgtgcctgagcaagcccgagatgatcagcagcctggagcagaggaaggagccctgggccgtgaagaggaagctgaccggcggcgagtgccccgacagccagaccctgggcggcccaagcagcggcgcccctcctcccagcggcggcagcccagccggctccccaacctctaccgaggagggcacctctgagtccgccacccccgagagcggccctggcacctccaccgagcccagcgagggcagcgcacccggcagccctgccggcagccccacctccacagaggagggaaccagcaccgagcccagcgaaggcagcgccccaggcaccagcaccgagcctagtgagcaggagattaaacggatcaacaagatcagaagaagacttgtgaaagacagcaacaccaagaaggccggcaagacaggccccatgaaaaccctgctggttagagtgatgacacccgatctgagagagcggctggaaaacctgagaaagaagcctgaaaatatcccccagcccatcagcaatacatctagagccaacctgaataagctgctgaccgattacaccgaaatgaagaaggcgatcctgcatgtgtactgggaagagttccagaaggaccctgtgggcctgatgagccgggtggcccagcctgccagcaagaagatcgatcagaacaagctgaaacctgagatggacgagaagggcaacctgaccaccgccggctttgcctgctctcagtgtggccagcccctgttcgtgtacaagctggagcaggtgtctgagaagggcaaggcttacaccaactacttcggacggtgcaatgtggccgagcacgaaaagctgatcctgctggcccagctgaagcccgagaaggatagcgacgaagccgtgacatatagcctgggaaagtttgggcagagggccctggatttctacagcattcatgtgaccaaggagtccacccaccccgtgaagcccctggcccagatcgccggaaacagatacgcctccggacctgtgggaaaggccctgagcgacgcatgtatgggcacaatcgcctccttcctgtctaagtaccaggacatcatcatcgaacaccagaaggtggtgaagggcaaccagaagagactggagagcctgcgggagctggccggcaaggaaaacctggaataccctagcgtgaccctgccacctcagcctcacaccaaggagggcgttgatgcctacaacgaagtgatcgcccgggtgcgaatgtgggtgaacctgaacctgtggcagaagctgaagctaagcagagatgatgccaagcctctgctgagactgaagggattcccttcctttcctctggtcgagagacaggccaacgaagtggactggtgggacatggtgtgtaacgtgaagaagctgatcaacgagaaaaaggaggatggcaaggtgttttggcagaatctggctggctacaagagacaggaagccctgagaccatacctgagcagcgaggaagatcggaagaagggaaagaaattcgctcggtaccagctgggcgacctgctgctgcacctggaaaagaagcacggcgaggactggggaaaggtgtacgacgaggcctgggagcggattgacaagaaagtggaaggcctgagcaagcacatcaagctggaagaggaacggagaagcgaggacgcccagagcaaggccgccctgaccgactggctgcgggctaaggccagcttcgtgatcgagggcctgaaggaggccgacaaggacgagttctgcagatgcgagctgaagctgcagaagtggtacggggacctgcggggaaagcccttcgccatcgaagccgagaacagcatcctggacatcagcggcttcagcaagcagtacaactgtgccttcatctggcagaaggacggcgtgaagaagctgaacctgtacctgatcatcaactacttcaagggcggcaagctgcggttcaagaagatcaaacctgaagccttcgaagccaacagattctacaccgtgatcaacaaaaagagcggcgagatcgtgcccatggaggtgaacttcaacttcgacgaccccaacctgatcatcctgcctctggcctttggcaagagacagggcagagaattcatctggaacgacctgctgtccctggaaaccggcagcctgaagctggccaacggaagagtgatcgagaagacactgtacaacagaagaacccggcaggatgagcctgccctgttcgtggccctgaccttcgagcggcgggaggtcctggactcctccaatatcaaaccaatgaacctgatcggcgtggcaagaggcgaaaacatccccgccgtgatcgccctgaccgaccccgagggctgcccactgagccggtttaaggatagcctgggaaacccaacccacatcctgagaatcggcgagagctataaggagaagcagcggaccatccaggccaagaaggaggtggagcagcggagagccggcggctacagccggaagtacgccagcaaagccaagaatctggcagacgatatggtgagaaacaccgctagagatctgctgtactacgccgtgacccaggatgccatgctgatcttcgccaacctgagccggggcttcggccggcagggcaagcggaccttcatggccgagagacagtacacacggatggaggactggctgaccgccaagctggcctacgagggcctgagcaagacctacctgtccaagacactggcccagtacacctccaagacatgcagcaactgtgggtttaccatcaccagcgccgactacgacagggtgctggagaagctgaagaagacagcaacaggctggatgaccacaattaacggcaaggagctgaaggtggagggccagattacctactacaacagatacaagagacagaacgtagtcaaggacctgtccgtcgagctggatagactgagcgaagaatctgtgaacaacgacatctcctcctggacaaagggcagaagcggagaagctctgagcctcctgaagaaaagattctcccatagacccgtgcaggagaagttcgtgtgcctgaactgcggcttcgagacacacgcagccgagcaagccgccctgaacatcgccagatcctggctgttcctgcggagccaggagtacaagaaataccagacaaacaagacaaccggcaacaccgataagagagccttcgtcgagacctggcagtccttttaccggaagaagcttaaggaggtgtggaaacctgccgtgcggtctggcggatctggcggaggctccaccagccccaagaaaaagagaaaagtctaagctgccttctgcggggcttgccttctggccatgcccttcttctctcccttgcacctgtacctcttggtctttgaataaagcctgagtaggaaggctagcaaaaaaaaaaaaaaaaaaaaaaaaaaaaaaaaaaaaaaaaaaaaaaaaaaaaaaaaaaaaaaaaaaaaaaaaaaaaaaaa

SEQ ID NO: 12122 - RNA, 5785 nt, synthetic construct
  source 1..5785: mol_type = other RNA
aggaaataagagagaaaagaagagtaagaagaaatataagagccaccatggcccctaagaagaagcgtaaagtgagccggatggaacgcctcgtctacgaggtgcggcagaagtgcagaaacatcgaggacatctgcatctcctgcggatctctgaacgtgaccctggagcacccactgttcatcggcggcatgtgccagaactgtaaaaactgttttctggagtgtgcctatcaatacgacgatgacggctaccagagctactgcaccatctgttgcggcggaagagaggtgctgatgtgtggaaataacaactgctgccggtgcttctgcgtggaatgcgtggacctgctggtgggccccggcgccgcccaggccgctattaaggaagatccttggaactgctacatgtgcggccacaagggcacatacggcctgctgagacggagagaggactggcctagcagactgcagatgttcttcgccaataaccacgaccaggagttcgacccccctaaggtgtaccctcccgtccccgccgagaagagaaagcccatccgggtcctgagcctgttcgatggcatcgccaccggtctgctggtgctgaaggacctgggcatccaggtggataggtacattgcctccgaggtgtgcgaggactccatcaccgtgggaatggtgcgtcatcagggcaagatcatgtacgtgggcgacgtgcggagcgtgacacagaagcatatccaggagtggggccctttcgacctggtgatcggcggcagcccttgcaatgacctgagcatcgtgaacccagcccggaagggcctgtacgagggaaccggcagactgttcttcgagttttacagactgctgcacgacgcccggcctaaggaaggcgacgaccggcccttcttttggctgttcgagaatgtggtggccatgggagtcagcgacaagcgggatattagccggttcctggagagcaaccccgtgatgatcgatgccaaggaagtgagcgccgcccaccgggccagatacttctggggcaatctgcctggcatgaacagacccctggccagcaccgtgaacgacaagctggagctgcaggagtgcctggagcacggccggatcgccaagttcagcaaggtgagaaccatcaccacccgaagcaacagcatcaaacaaggcaaggaccagcactttcctgtgttcatgaacgagaaggaggacatcctgtggtgtaccgagatggagagagtgttcgggttcccagtccactacacagatgtcagcaacatgtctagactggccagacagagactgctgggaagaagctggtccgtccctgtgatcagacacctgttcgcccctctgaaggagtacttcgcctgcgtgagcagcggcaacagcaacgccaacagccggggccccagcttctctagcggcctggtgccactgtccctgagagggagccacatgggccccatggagatctacaaaaccgtgagcgcctggaagcggcagcctgtgcgcgtgctgagcctgtttcggaatatcgataaagtcctgaaaagcctgggattcctggagagcggctctggctccggcggtggcaccctgaagtacgtggaggatgtgacaaacgtggtcagacgggatgtggagaagtggggccccttcgatctggtgtacggcagcacccaacccctgggcagctcttgtgaccggtgccctggctggtacatgtttcagttccaccggatcctgcagtacgccctgccgagacaggagtcccagcggccattcttttggattttcatggacaacttgctgctgaccgaggatgaccaggaaactaccactcggttcctgcagaccgaagccgtgaccctgcaggacgtgagaggccgggactaccagaacgccatgcgggtgtggtccaacatccctggactgaaaagcaagcacgcacctctgacccctaaagaagaggagtacctgcaggcccaggtgcggagcagaagcaagctggacgcccctaaggtggatctgctggtgaagaattgcctcctgcccctgagagagtacttcaagtatttcagccagaatagtctgcccctgggaggcagcggcggcggcagccagagccccctgaccttcggcgacgtggccgtggagttcagcggcgaggagtgggcctggctggacagcgcccagaggagcctgcacaggagcgtgatgctggagaactacaggaacctggccagcctgggcctgtgcctgagcaagcccgagatgatcagcagcctggagcagaggaaggagccctgggccgtgaagaggaagagcaccggcggcgagtgcgccgacagccagaccctgggcggcccaagcagcggcgcccctcctcccagcggcggcagcccagccggctccccaacctctaccgaggagggcacctctgagtccgccacccccgagagcggccctggcacctccaccgagcccagcgagggcagcgcacccggcagccctgccggcagccccacctccacagaggagggaaccagcaccgagcccagcgaaggcagcgccccaggcaccagcaccgagcctagtgagcaggagattaaacggatcaacaagatcagaagaagacttgtgaaagacagcaacaccaagaaggccggcaagacaggccccatgaaaaccctgctggttagagtgatgacacccgatctgagagagcggctggaaaacctgagaaagaagcctgaaaatatcccccagcccatcagcaatacatctagagccaacctgaataagctgctgaccgattacaccgaaatgaagaaggcgatcctgcatgtgtactgggaagagttccagaaggaccctgtgggcctgatgagccgggtggcccagcctgccagcaagaagatcgatcagaacaagctgaaacctgagatggacgagaagggcaacctgaccaccgccggctttgcctgctctcagtgtggccagcccctgttcgtgtacaagctggagcaggtgtctgagaagggcaaggcttacaccaactacttcggacggtgcaatgtggccgagcacgaaaagctgatcctgctggcccagctgaagcccgagaaggatagcgacgaagccgtgacatatagcctgggaaagtttgggcagagggccctggatttctacagcattcatgtgaccaaggagtccacccaccccgtgaagcccctggcccagatcgccggaaacagatacgcctccggacctgtgggaaaggccctgagcgacgcatgtatgggcacaatcgcctccttcctgtctaagtaccaggacatcatcatcgaacaccagaaggtggtgaagggcaaccagaagagactggagagcctgcgggagctggccggcaaggaaaacctggaataccctagcgtgaccctgccacctcagcctcacaccaaggagggcgttgatgcctacaacgaagtgatcgcccgggtgcgaatgtgggtgaacctgaacctgtggcagaagctgaagctaagcagagatgatgccaagcctctgctgagactgaagggattcccttcctttcctctggtcgagagacaggccaacgaagtggactggtgggacatggtgtgtaacgtgaagaagctgatcaacgagaaaaaggaggatggcaaggtgttttggcagaatctggctggctacaagagacaggaagccctgagaccatacctgagcagcgaggaagatcggaagaagggaaagaaattcgctcggtaccagctgggcgacctgctgctgcacctggaaaagaagcacggcgaggactggggaaaggtgtacgacgaggcctgggagcggattgacaagaaagtggaaggcctgagcaagcacatcaagctggaagaggaacggagaagcgaggacgcccagagcaaggccgccctgaccgactggctgcgggctaaggccagcttcgtgatcgagggcctgaaggaggccgacaaggacgagttctgcagatgcgagctgaagctgcagaagtggtacggggacctgcggggaaagcccttcgccatcgaagccgagaacagcatcctggacatcagcggcttcagcaagcagtacaactgtgccttcatctggcagaaggacggcgtgaagaagctgaacctgtacctgatcatcaactacttcaagggcggcaagctgcggttcaagaagatcaaacctgaagccttcgaagccaacagattctacaccgtgatcaacaaaaagagcggcgagatcgtgcccatggaggtgaacttcaacttcgacgaccccaacctgatcatcctgcctctggcctttggcaagagacagggcagagaattcatctggaacgacctgctgtccctggaaaccggcagcctgaagctggccaacggaagagtgatcgagaagacactgtacaacagaagaacccggcaggatgagcctgccctgttcgtggccctgaccttcgagcggcgggaggtcctggactcctccaatatcaaaccaatgaacctgatcggcgtggcaagaggcgaaaacatccccgccgtgatcgccctgaccgaccccgagggctgcccactgagccggtttaaggatagcctgggaaacccaacccacatcctgagaatcggcgagagctataaggagaagcagcggaccatccaggccaagaaggaggtggagcagcggagagccggcggctacagccggaagtacgccagcaaagccaagaatctggcagacgatatggtgagaaacaccgctagagatctgctgtactacgccgtgacccaggatgccatgctgatcttcgccaacctgagccggggcttcggccggcagggcaagcggaccttcatggccgagagacagtacacacggatggaggactggctgaccgccaagctggcctacgagggcctgagcaagacctacctgtccaagacactggcccagtacacctccaagacatgcagcaactgtgggtttaccatcaccagcgccgactacgacagggtgctggagaagctgaagaagacagcaacaggctggatgaccacaattaacggcaaggagctgaaggtggagggccagattacctactacaacagatacaagagacagaacgtagtcaaggacctgtccgtcgagctggatagactgagcgaagaatctgtgaacaacgacatctcctcctggacaaagggcagaagcggagaagctctgagcctcctgaagaaaagattctcccatagacccgtgcaggagaagttcgtgtgcctgaactgcggcttcgagacacacgcagccgagcaagccgccctgaacatcgccagatcctggctgttcctgcggagccaggagtacaagaaataccagacaaacaagacaaccggcaacaccgataagagagccttcgtcgagacctggcagtccttttaccggaagaagcttaaggaggtgtggaaacctgccgtgcggtctggcggatctggcggaggctccaccagccccaagaaaaagagaaaagtctaagctgccttctgcggggcttgccttctggccatgcccttcttctctcccttgcacctgtacctcttggtctttgaataaagcctgagtaggaaggctagcaaaaaaaaaaaaaaaaaaaaaaaaaaaaaaaaaaaaaaaaaaaaaaaaaaaaaaaaaaaaaaaaaaaaaaaaaaaaaaaa

SEQ ID NO: 12123 - RNA, 5785 nt, synthetic construct
  source 1..5785: mol_type = other RNA
aggaaataagagagaaaagaagagtaagaagaaatataagagccaccatggcccctaagaagaagcgtaaagtgagccggatggaacgcctcgtctacgaggtgcggcagaagtgcagaaacatcgaggacatctgcatctcctgcggatctctgaacgtgaccctggagcacccactgttcatcggcggcatgtgccagaactgtaaaaactgttttctggagtgtgcctatcaatacgacgatgacggctaccagagctactgcaccatctgttgcggcggaagagaggtgctgatgtgtggaaataacaactgctgccggtgcttctgcgtggaatgcgtggacctgctggtgggccccggcgccgcccaggccgctattaaggaagatccttggaactgctacatgtgcggccacaagggcacatacggcctgctgagacggagagaggactggcctagcagactgcagatgttcttcgccaataaccacgaccaggagttcgacccccctaaggtgtaccctcccgtccccgccgagaagagaaagcccatccgggtcctgagcctgttcgatggcatcgccaccggtctgctggtgctgaaggacctgggcatccaggtggataggtacattgcctccgaggtgtgcgaggactccatcaccgtgggaatggtgcgtcatcagggcaagatcatgtacgtgggcgacgtgcggagcgtgacacagaagcatatccaggagtggggccctttcgacctggtgatcggcggcagcccttgcaatgacctgagcatcgtgaacccagcccggaagggcctgtacgagggaaccggcagactgttcttcgagttttacagactgctgcacgacgcccggcctaaggaaggcgacgaccggcccttcttttggctgttcgagaatgtggtggccatgggagtcagcgacaagcgggatattagccggttcctggagagcaaccccgtgatgatcgatgccaaggaagtgagcgccgcccaccgggccagatacttctggggcaatctgcctggcatgaacagacccctggccagcaccgtgaacgacaagctggagctgcaggagtgcctggagcacggccggatcgccaagttcagcaaggtgagaaccatcaccacccgaagcaacagcatcaaacaaggcaaggaccagcactttcctgtgttcatgaacgagaaggaggacatcctgtggtgtaccgagatggagagagtgttcgggttcccagtccactacacagatgtcagcaacatgtctagactggccagacagagactgctgggaagaagctggtccgtccctgtgatcagacacctgttcgcccctctgaaggagtacttcgcctgcgtgagcagcggcaacagcaacgccaacagccggggccccagcttctctagcggcctggtgccactgtccctgagagggagccacatgggccccatggagatctacaaaaccgtgagcgcctggaagcggcagcctgtgcgcgtgctgagcctgtttcggaatatcgataaagtcctgaaaagcctgggattcctggagagcggctctggctccggcggtggcaccctgaagtacgtggaggatgtgacaaacgtggtcagacgggatgtggagaagtggggccccttcgatctggtgtacggcagcacccaacccctgggcagctcttgtgaccggtgccctggctggtacatgtttcagttccaccggatcctgcagtacgccctgccgagacaggagtcccagcggccattcttttggattttcatggacaacttgctgctgaccgaggatgaccaggaaactaccactcggttcctgcagaccgaagccgtgaccctgcaggacgtgagaggccgggactaccagaacgccatgcgggtgtggtccaacatccctggactgaaaagcaagcacgcacctctgacccctaaagaagaggagtacctgcaggcccaggtgcggagcagaagcaagctggacgcccctaaggtggatctgctggtgaagaattgcctcctgcccctgagagagtacttcaagtatttcagccagaatagtctgcccctgggaggcagcggcggcggcgacagggtgaagttcaccttcagcgacgtggccgtgtacttcagcgaggaggagtggcagctgctggaggagcagcagaaggagctgtaccagaacgtgatgaaggagaactacaccaccctgatgagcctgggctacaccaccgtgaagcccgacgtgatcagcaagatcgagcagggcaagcagcccctggtgagcagccccagcggcagcaagggcaggagggccatcggcaggcccagcggcggcccaagcagcggcgcccctcctcccagcggcggcagcccagccggctccccaacctctaccgaggagggcacctctgagtccgccacccccgagagcggccctggcacctccaccgagcccagcgagggcagcgcacccggcagccctgccggcagccccacctccacagaggagggaaccagcaccgagcccagcgaaggcagcgccccaggcaccagcaccgagcctagtgagcaggagattaaacggatcaacaagatcagaagaagacttgtgaaagacagcaacaccaagaaggccggcaagacaggccccatgaaaaccctgctggttagagtgatgacacccgatctgagagagcggctggaaaacctgagaaagaagcctgaaaatatcccccagcccatcagcaatacatctagagccaacctgaataagctgctgaccgattacaccgaaatgaagaaggcgatcctgcatgtgtactgggaagagttccagaaggaccctgtgggcctgatgagccgggtggcccagcctgccagcaagaagatcgatcagaacaagctgaaacctgagatggacgagaagggcaacctgaccaccgccggctttgcctgctctcagtgtggccagcccctgttcgtgtacaagctggagcaggtgtctgagaagggcaaggcttacaccaactacttcggacggtgcaatgtggccgagcacgaaaagctgatcctgctggcccagctgaagcccgagaaggatagcgacgaagccgtgacatatagcctgggaaagtttgggcagagggccctggatttctacagcattcatgtgaccaaggagtccacccaccccgtgaagcccctggcccagatcgccggaaacagatacgcctccggacctgtgggaaaggccctgagcgacgcatgtatgggcacaatcgcctccttcctgtctaagtaccaggacatcatcatcgaacaccagaaggtggtgaagggcaaccagaagagactggagagcctgcgggagctggccggcaaggaaaacctggaataccctagcgtgaccctgccacctcagcctcacaccaaggagggcgttgatgcctacaacgaagtgatcgcccgggtgcgaatgtgggtgaacctgaacctgtggcagaagctgaagctaagcagagatgatgccaagcctctgctgagactgaagggattcccttcctttcctctggtcgagagacaggccaacgaagtggactggtgggacatggtgtgtaacgtgaagaagctgatcaacgagaaaaaggaggatggcaaggtgttttggcagaatctggctggctacaagagacaggaagccctgagaccatacctgagcagcgaggaagatcggaagaagggaaagaaattcgctcggtaccagctgggcgacctgctgctgcacctggaaaagaagcacggcgaggactggggaaaggtgtacgacgaggcctgggagcggattgacaagaaagtggaaggcctgagcaagcacatcaagctggaagaggaacggagaagcgaggacgcccagagcaaggccgccctgaccgactggctgcgggctaaggccagcttcgtgatcgagggcctgaaggaggccgacaaggacgagttctgcagatgcgagctgaagctgcagaagtggtacggggacctgcggggaaagcccttcgccatcgaagccgagaacagcatcctggacatcagcggcttcagcaagcagtacaactgtgccttcatctggcagaaggacggcgtgaagaagctgaacctgtacctgatcatcaactacttcaagggcggcaagctgcggttcaagaagatcaaacctgaagccttcgaagccaacagattctacaccgtgatcaacaaaaagagcggcgagatcgtgcccatggaggtgaacttcaacttcgacgaccccaacctgatcatcctgcctctggcctttggcaagagacagggcagagaattcatctggaacgacctgctgtccctggaaaccggcagcctgaagctggccaacggaagagtgatcgagaagacactgtacaacagaagaacccggcaggatgagcctgccctgttcgtggccctgaccttcgagcggcgggaggtcctggactcctccaatatcaaaccaatgaacctgatcggcgtggcaagaggcgaaaacatccccgccgtgatcgccctgaccgaccccgagggctgcccactgagccggtttaaggatagcctgggaaacccaacccacatcctgagaatcggcgagagctataaggagaagcagcggaccatccaggccaagaaggaggtggagcagcggagagccggcggctacagccggaagtacgccagcaaagccaagaatctggcagacgatatggtgagaaacaccgctagagatctgctgtactacgccgtgacccaggatgccatgctgatcttcgccaacctgagccggggcttcggccggcagggcaagcggaccttcatggccgagagacagtacacacggatggaggactggctgaccgccaagctggcctacgagggcctgagcaagacctacctgtccaagacactggcccagtacacctccaagacatgcagcaactgtgggtttaccatcaccagcgccgactacgacagggtgctggagaagctgaagaagacagcaacaggctggatgaccacaattaacggcaaggagctgaaggtggagggccagattacctactacaacagatacaagagacagaacgtagtcaaggacctgtccgtcgagctggatagactgagcgaagaatctgtgaacaacgacatctcctcctggacaaagggcagaagcggagaagctctgagcctcctgaagaaaagattctcccatagacccgtgcaggagaagttcgtgtgcctgaactgcggcttcgagacacacgcagccgagcaagccgccctgaacatcgccagatcctggctgttcctgcggagccaggagtacaagaaataccagacaaacaagacaaccggcaacaccgataagagagccttcgtcgagacctggcagtccttttaccggaagaagcttaaggaggtgtggaaacctgccgtgcggtctggcggatctggcggaggctccaccagccccaagaaaaagagaaaagtctaagctgccttctgcggggcttgccttctggccatgcccttcttctctcccttgcacctgtacctcttggtctttgaataaagcctgagtaggaaggctagcaaaaaaaaaaaaaaaaaaaaaaaaaaaaaaaaaaaaaaaaaaaaaaaaaaaaaaaaaaaaaaaaaaaaaaaaaaaaaaaa

SEQ ID NO: 12124 - RNA, 5785 nt, synthetic construct
  source 1..5785: mol_type = other RNA
aggaaataagagagaaaagaagagtaagaagaaatataagagccaccatggcccctaagaagaagcgtaaagtgagccggatggaacgcctcgtctacgaggtgcggcagaagtgcagaaacatcgaggacatctgcatctcctgcggatctctgaacgtgaccctggagcacccactgttcatcggcggcatgtgccagaactgtaaaaactgttttctggagtgtgcctatcaatacgacgatgacggctaccagagctactgcaccatctgttgcggcggaagagaggtgctgatgtgtggaaataacaactgctgccggtgcttctgcgtggaatgcgtggacctgctggtgggccccggcgccgcccaggccgctattaaggaagatccttggaactgctacatgtgcggccacaagggcacatacggcctgctgagacggagagaggactggcctagcagactgcagatgttcttcgccaataaccacgaccaggagttcgacccccctaaggtgtaccctcccgtccccgccgagaagagaaagcccatccgggtcctgagcctgttcgatggcatcgccaccggtctgctggtgctgaaggacctgggcatccaggtggataggtacattgcctccgaggtgtgcgaggactccatcaccgtgggaatggtgcgtcatcagggcaagatcatgtacgtgggcgacgtgcggagcgtgacacagaagcatatccaggagtggggccctttcgacctggtgatcggcggcagcccttgcaatgacctgagcatcgtgaacccagcccggaagggcctgtacgagggaaccggcagactgttcttcgagttttacagactgctgcacgacgcccggcctaaggaaggcgacgaccggcccttcttttggctgttcgagaatgtggtggccatgggagtcagcgacaagcgggatattagccggttcctggagagcaaccccgtgatgatcgatgccaaggaagtgagcgccgcccaccgggccagatacttctggggcaatctgcctggcatgaacagacccctggccagcaccgtgaacgacaagctggagctgcaggagtgcctggagcacggccggatcgccaagttcagcaaggtgagaaccatcaccacccgaagcaacagcatcaaacaaggcaaggaccagcactttcctgtgttcatgaacgagaaggaggacatcctgtggtgtaccgagatggagagagtgttcgggttcccagtccactacacagatgtcagcaacatgtctagactggccagacagagactgctgggaagaagctggtccgtccctgtgatcagacacctgttcgcccctctgaaggagtacttcgcctgcgtgagcagcggcaacagcaacgccaacagccggggccccagcttctctagcggcctggtgccactgtccctgagagggagccacatgggccccatggagatctacaaaaccgtgagcgcctggaagcggcagcctgtgcgcgtgctgagcctgtttcggaatatcgataaagtcctgaaaagcctgggattcctggagagcggctctggctccggcggtggcaccctgaagtacgtggaggatgtgacaaacgtggtcagacgggatgtggagaagtggggccccttcgatctggtgtacggcagcacccaacccctgggcagctcttgtgaccggtgccctggctggtacatgtttcagttccaccggatcctgcagtacgccctgccgagacaggagtcccagcggccattcttttggattttcatggacaacttgctgctgaccgaggatgaccaggaaactaccactcggttcctgcagaccgaagccgtgaccctgcaggacgtgagaggccgggactaccagaacgccatgcgggtgtggtccaacatccctggactgaaaagcaagcacgcacctctgacccctaaagaagaggagtacctgcaggcccaggtgcggagcagaagcaagctggacgcccctaaggtggatctgctggtgaagaattgcctcctgcccctgagagagtacttcaagtatttcagccagaatagtctgcccctgggaggcagcggcggcggcgccctgaggagcgtgatgttcagcgacatcagcatcgacttcagccccgaggagtgggactgcctggacctggagcagaaggacctgtacagggacgtgatgctggagaactacagcaacctggtgagcctgggctgcttcatcagcaagcccgacgtgatcagcctgctggagcagggcaaggagccctggaaggtggtgaggaagaggaggggccagtgccccgacctgcagaccaagtacggcggcccaagcagcggcgcccctcctcccagcggcggcagcccagccggctccccaacctctaccgaggagggcacctctgagtccgccacccccgagagcggccctggcacctccaccgagcccagcgagggcagcgcacccggcagccctgccggcagccccacctccacagaggagggaaccagcaccgagcccagcgaaggcagcgccccaggcaccagcaccgagcctagtgagcaggagattaaacggatcaacaagatcagaagaagacttgtgaaagacagcaacaccaagaaggccggcaagacaggccccatgaaaaccctgctggttagagtgatgacacccgatctgagagagcggctggaaaacctgagaaagaagcctgaaaatatcccccagcccatcagcaatacatctagagccaacctgaataagctgctgaccgattacaccgaaatgaagaaggcgatcctgcatgtgtactgggaagagttccagaaggaccctgtgggcctgatgagccgggtggcccagcctgccagcaagaagatcgatcagaacaagctgaaacctgagatggacgagaagggcaacctgaccaccgccggctttgcctgctctcagtgtggccagcccctgttcgtgtacaagctggagcaggtgtctgagaagggcaaggcttacaccaactacttcggacggtgcaatgtggccgagcacgaaaagctgatcctgctggcccagctgaagcccgagaaggatagcgacgaagccgtgacatatagcctgggaaagtttgggcagagggccctggatttctacagcattcatgtgaccaaggagtccacccaccccgtgaagcccctggcccagatcgccggaaacagatacgcctccggacctgtgggaaaggccctgagcgacgcatgtatgggcacaatcgcctccttcctgtctaagtaccaggacatcatcatcgaacaccagaaggtggtgaagggcaaccagaagagactggagagcctgcgggagctggccggcaaggaaaacctggaataccctagcgtgaccctgccacctcagcctcacaccaaggagggcgttgatgcctacaacgaagtgatcgcccgggtgcgaatgtgggtgaacctgaacctgtggcagaagctgaagctaagcagagatgatgccaagcctctgctgagactgaagggattcccttcctttcctctggtcgagagacaggccaacgaagtggactggtgggacatggtgtgtaacgtgaagaagctgatcaacgagaaaaaggaggatggcaaggtgttttggcagaatctggctggctacaagagacaggaagccctgagaccatacctgagcagcgaggaagatcggaagaagggaaagaaattcgctcggtaccagctgggcgacctgctgctgcacctggaaaagaagcacggcgaggactggggaaaggtgtacgacgaggcctgggagcggattgacaagaaagtggaaggcctgagcaagcacatcaagctggaagaggaacggagaagcgaggacgcccagagcaaggccgccctgaccgactggctgcgggctaaggccagcttcgtgatcgagggcctgaaggaggccgacaaggacgagttctgcagatgcgagctgaagctgcagaagtggtacggggacctgcggggaaagcccttcgccatcgaagccgagaacagcatcctggacatcagcggcttcagcaagcagtacaactgtgccttcatctggcagaaggacggcgtgaagaagctgaacctgtacctgatcatcaactacttcaagggcggcaagctgcggttcaagaagatcaaacctgaagccttcgaagccaacagattctacaccgtgatcaacaaaaagagcggcgagatcgtgcccatggaggtgaacttcaacttcgacgaccccaacctgatcatcctgcctctggcctttggcaagagacagggcagagaattcatctggaacgacctgctgtccctggaaaccggcagcctgaagctggccaacggaagagtgatcgagaagacactgtacaacagaagaacccggcaggatgagcctgccctgttcgtggccctgaccttcgagcggcgggaggtcctggactcctccaatatcaaaccaatgaacctgatcggcgtggcaagaggcgaaaacatccccgccgtgatcgccctgaccgaccccgagggctgcccactgagccggtttaaggatagcctgggaaacccaacccacatcctgagaatcggcgagagctataaggagaagcagcggaccatccaggccaagaaggaggtggagcagcggagagccggcggctacagccggaagtacgccagcaaagccaagaatctggcagacgatatggtgagaaacaccgctagagatctgctgtactacgccgtgacccaggatgccatgctgatcttcgccaacctgagccggggcttcggccggcagggcaagcggaccttcatggccgagagacagtacacacggatggaggactggctgaccgccaagctggcctacgagggcctgagcaagacctacctgtccaagacactggcccagtacacctccaagacatgcagcaactgtgggtttaccatcaccagcgccgactacgacagggtgctggagaagctgaagaagacagcaacaggctggatgaccacaattaacggcaaggagctgaaggtggagggccagattacctactacaacagatacaagagacagaacgtagtcaaggacctgtccgtcgagctggatagactgagcgaagaatctgtgaacaacgacatctcctcctggacaaagggcagaagcggagaagctctgagcctcctgaagaaaagattctcccatagacccgtgcaggagaagttcgtgtgcctgaactgcggcttcgagacacacgcagccgagcaagccgccctgaacatcgccagatcctggctgttcctgcggagccaggagtacaagaaataccagacaaacaagacaaccggcaacaccgataagagagccttcgtcgagacctggcagtccttttaccggaagaagcttaaggaggtgtggaaacctgccgtgcggtctggcggatctggcggaggctccaccagccccaagaaaaagagaaaagtctaagctgccttctgcggggcttgccttctggccatgcccttcttctctcccttgcacctgtacctcttggtctttgaataaagcctgagtaggaaggctagcaaaaaaaaaaaaaaaaaaaaaaaaaaaaaaaaaaaaaaaaaaaaaaaaaaaaaaaaaaaaaaaaaaaaaaaaaaaaaaaa

SEQ ID NO: 12125 - RNA, 5785 nt, synthetic construct
  source 1..5785: mol_type = other RNA
aggaaataagagagaaaagaagagtaagaagaaatataagagccaccatggcccctaagaagaagcgtaaagtgagccggatggaacgcctcgtctacgaggtgcggcagaagtgcagaaacatcgaggacatctgcatctcctgcggatctctgaacgtgaccctggagcacccactgttcatcggcggcatgtgccagaactgtaaaaactgttttctggagtgtgcctatcaatacgacgatgacggctaccagagctactgcaccatctgttgcggcggaagagaggtgctgatgtgtggaaataacaactgctgccggtgcttctgcgtggaatgcgtggacctgctggtgggccccggcgccgcccaggccgctattaaggaagatccttggaactgctacatgtgcggccacaagggcacatacggcctgctgagacggagagaggactggcctagcagactgcagatgttcttcgccaataaccacgaccaggagttcgacccccctaaggtgtaccctcccgtccccgccgagaagagaaagcccatccgggtcctgagcctgttcgatggcatcgccaccggtctgctggtgctgaaggacctgggcatccaggtggataggtacattgcctccgaggtgtgcgaggactccatcaccgtgggaatggtgcgtcatcagggcaagatcatgtacgtgggcgacgtgcggagcgtgacacagaagcatatccaggagtggggccctttcgacctggtgatcggcggcagcccttgcaatgacctgagcatcgtgaacccagcccggaagggcctgtacgagggaaccggcagactgttcttcgagttttacagactgctgcacgacgcccggcctaaggaaggcgacgaccggcccttcttttggctgttcgagaatgtggtggccatgggagtcagcgacaagcgggatattagccggttcctggagagcaaccccgtgatgatcgatgccaaggaagtgagcgccgcccaccgggccagatacttctggggcaatctgcctggcatgaacagacccctggccagcaccgtgaacgacaagctggagctgcaggagtgcctggagcacggccggatcgccaagttcagcaaggtgagaaccatcaccacccgaagcaacagcatcaaacaaggcaaggaccagcactttcctgtgttcatgaacgagaaggaggacatcctgtggtgtaccgagatggagagagtgttcgggttcccagtccactacacagatgtcagcaacatgtctagactggccagacagagactgctgggaagaagctggtccgtccctgtgatcagacacctgttcgcccctctgaaggagtacttcgcctgcgtgagcagcggcaacagcaacgccaacagccggggccccagcttctctagcggcctggtgccactgtccctgagagggagccacatgggccccatggagatctacaaaaccgtgagcgcctggaagcggcagcctgtgcgcgtgctgagcctgtttcggaatatcgataaagtcctgaaaagcctgggattcctggagagcggctctggctccggcggtggcaccctgaagtacgtggaggatgtgacaaacgtggtcagacgggatgtggagaagtggggccccttcgatctggtgtacggcagcacccaacccctgggcagctcttgtgaccggtgccctggctggtacatgtttcagttccaccggatcctgcagtacgccctgccgagacaggagtcccagcggccattcttttggattttcatggacaacttgctgctgaccgaggatgaccaggaaactaccactcggttcctgcagaccgaagccgtgaccctgcaggacgtgagaggccgggactaccagaacgccatgcgggtgtggtccaacatccctggactgaaaagcaagcacgcacctctgacccctaaagaagaggagtacctgcaggcccaggtgcggagcagaagcaagctggacgcccctaaggtggatctgctggtgaagaattgcctcctgcccctgagagagtacttcaagtatttcagccagaatagtctgcccctgggaggcagcggcggcggcgccagggtggccgtgatgttcagcgacgtgagcatcgccttcagccaggaggagtgggagtacctggacctggcccagagggacctgtacaaggacgtgatgatggagaactacaggaacgtggccagcctggccggctgcttcatcagcaagcccgacgtgatcagcctgctggagcagggcaaggagccctggaaggtggtgaggaagaggaggaggaaccccgacctggagaccaaggacggcggcccaagcagcggcgcccctcctcccagcggcggcagcccagccggctccccaacctctaccgaggagggcacctctgagtccgccacccccgagagcggccctggcacctccaccgagcccagcgagggcagcgcacccggcagccctgccggcagccccacctccacagaggagggaaccagcaccgagcccagcgaaggcagcgccccaggcaccagcaccgagcctagtgagcaggagattaaacggatcaacaagatcagaagaagacttgtgaaagacagcaacaccaagaaggccggcaagacaggccccatgaaaaccctgctggttagagtgatgacacccgatctgagagagcggctggaaaacctgagaaagaagcctgaaaatatcccccagcccatcagcaatacatctagagccaacctgaataagctgctgaccgattacaccgaaatgaagaaggcgatcctgcatgtgtactgggaagagttccagaaggaccctgtgggcctgatgagccgggtggcccagcctgccagcaagaagatcgatcagaacaagctgaaacctgagatggacgagaagggcaacctgaccaccgccggctttgcctgctctcagtgtggccagcccctgttcgtgtacaagctggagcaggtgtctgagaagggcaaggcttacaccaactacttcggacggtgcaatgtggccgagcacgaaaagctgatcctgctggcccagctgaagcccgagaaggatagcgacgaagccgtgacatatagcctgggaaagtttgggcagagggccctggatttctacagcattcatgtgaccaaggagtccacccaccccgtgaagcccctggcccagatcgccggaaacagatacgcctccggacctgtgggaaaggccctgagcgacgcatgtatgggcacaatcgcctccttcctgtctaagtaccaggacatcatcatcgaacaccagaaggtggtgaagggcaaccagaagagactggagagcctgcgggagctggccggcaaggaaaacctggaataccctagcgtgaccctgccacctcagcctcacaccaaggagggcgttgatgcctacaacgaagtgatcgcccgggtgcgaatgtgggtgaacctgaacctgtggcagaagctgaagctaagcagagatgatgccaagcctctgctgagactgaagggattcccttcctttcctctggtcgagagacaggccaacgaagtggactggtgggacatggtgtgtaacgtgaagaagctgatcaacgagaaaaaggaggatggcaaggtgttttggcagaatctggctggctacaagagacaggaagccctgagaccatacctgagcagcgaggaagatcggaagaagggaaagaaattcgctcggtaccagctgggcgacctgctgctgcacctggaaaagaagcacggcgaggactggggaaaggtgtacgacgaggcctgggagcggattgacaagaaagtggaaggcctgagcaagcacatcaagctggaagaggaacggagaagcgaggacgcccagagcaaggccgccctgaccgactggctgcgggctaaggccagcttcgtgatcgagggcctgaaggaggccgacaaggacgagttctgcagatgcgagctgaagctgcagaagtggtacggggacctgcggggaaagcccttcgccatcgaagccgagaacagcatcctggacatcagcggcttcagcaagcagtacaactgtgccttcatctggcagaaggacggcgtgaagaagctgaacctgtacctgatcatcaactacttcaagggcggcaagctgcggttcaagaagatcaaacctgaagccttcgaagccaacagattctacaccgtgatcaacaaaaagagcggcgagatcgtgcccatggaggtgaacttcaacttcgacgaccccaacctgatcatcctgcctctggcctttggcaagagacagggcagagaattcatctggaacgacctgctgtccctggaaaccggcagcctgaagctggccaacggaagagtgatcgagaagacactgtacaacagaagaacccggcaggatgagcctgccctgttcgtggccctgaccttcgagcggcgggaggtcctggactcctccaatatcaaaccaatgaacctgatcggcgtggcaagaggcgaaaacatccccgccgtgatcgccctgaccgaccccgagggctgcccactgagccggtttaaggatagcctgggaaacccaacccacatcctgagaatcggcgagagctataaggagaagcagcggaccatccaggccaagaaggaggtggagcagcggagagccggcggctacagccggaagtacgccagcaaagccaagaatctggcagacgatatggtgagaaacaccgctagagatctgctgtactacgccgtgacccaggatgccatgctgatcttcgccaacctgagccggggcttcggccggcagggcaagcggaccttcatggccgagagacagtacacacggatggaggactggctgaccgccaagctggcctacgagggcctgagcaagacctacctgtccaagacactggcccagtacacctccaagacatgcagcaactgtgggtttaccatcaccagcgccgactacgacagggtgctggagaagctgaagaagacagcaacaggctggatgaccacaattaacggcaaggagctgaaggtggagggccagattacctactacaacagatacaagagacagaacgtagtcaaggacctgtccgtcgagctggatagactgagcgaagaatctgtgaacaacgacatctcctcctggacaaagggcagaagcggagaagctctgagcctcctgaagaaaagattctcccatagacccgtgcaggagaagttcgtgtgcctgaactgcggcttcgagacacacgcagccgagcaagccgccctgaacatcgccagatcctggctgttcctgcggagccaggagtacaagaaataccagacaaacaagacaaccggcaacaccgataagagagccttcgtcgagacctggcagtccttttaccggaagaagcttaaggaggtgtggaaacctgccgtgcggtctggcggatctggcggaggctccaccagccccaagaaaaagagaaaagtctaagctgccttctgcggggcttgccttctggccatgcccttcttctctcccttgcacctgtacctcttggtctttgaataaagcctgagtaggaaggctagcaaaaaaaaaaaaaaaaaaaaaaaaaaaaaaaaaaaaaaaaaaaaaaaaaaaaaaaaaaaaaaaaaaaaaaaaaaaaaaaa

SEQ ID NO: 12126 - RNA, 5785 nt, synthetic construct
  source 1..5785: mol_type = other RNA
aggaaataagagagaaaagaagagtaagaagaaatataagagccaccatggcccctaagaagaagcgtaaagtgagccggatggaacgcctcgtctacgaggtgcggcagaagtgcagaaacatcgaggacatctgcatctcctgcggatctctgaacgtgaccctggagcacccactgttcatcggcggcatgtgccagaactgtaaaaactgttttctggagtgtgcctatcaatacgacgatgacggctaccagagctactgcaccatctgttgcggcggaagagaggtgctgatgtgtggaaataacaactgctgccggtgcttctgcgtggaatgcgtggacctgctggtgggccccggcgccgcccaggccgctattaaggaagatccttggaactgctacatgtgcggccacaagggcacatacggcctgctgagacggagagaggactggcctagcagactgcagatgttcttcgccaataaccacgaccaggagttcgacccccctaaggtgtaccctcccgtccccgccgagaagagaaagcccatccgggtcctgagcctgttcgatggcatcgccaccggtctgctggtgctgaaggacctgggcatccaggtggataggtacattgcctccgaggtgtgcgaggactccatcaccgtgggaatggtgcgtcatcagggcaagatcatgtacgtgggcgacgtgcggagcgtgacacagaagcatatccaggagtggggccctttcgacctggtgatcggcggcagcccttgcaatgacctgagcatcgtgaacccagcccggaagggcctgtacgagggaaccggcagactgttcttcgagttttacagactgctgcacgacgcccggcctaaggaaggcgacgaccggcccttcttttggctgttcgagaatgtggtggccatgggagtcagcgacaagcgggatattagccggttcctggagagcaaccccgtgatgatcgatgccaaggaagtgagcgccgcccaccgggccagatacttctggggcaatctgcctggcatgaacagacccctggccagcaccgtgaacgacaagctggagctgcaggagtgcctggagcacggccggatcgccaagttcagcaaggtgagaaccatcaccacccgaagcaacagcatcaaacaaggcaaggaccagcactttcctgtgttcatgaacgagaaggaggacatcctgtggtgtaccgagatggagagagtgttcgggttcccagtccactacacagatgtcagcaacatgtctagactggccagacagagactgctgggaagaagctggtccgtccctgtgatcagacacctgttcgcccctctgaaggagtacttcgcctgcgtgagcagcggcaacagcaacgccaacagccggggccccagcttctctagcggcctggtgccactgtccctgagagggagccacatgggccccatggagatctacaaaaccgtgagcgcctggaagcggcagcctgtgcgcgtgctgagcctgtttcggaatatcgataaagtcctgaaaagcctgggattcctggagagcggctctggctccggcggtggcaccctgaagtacgtggaggatgtgacaaacgtggtcagacgggatgtggagaagtggggccccttcgatctggtgtacggcagcacccaacccctgggcagctcttgtgaccggtgccctggctggtacatgtttcagttccaccggatcctgcagtacgccctgccgagacaggagtcccagcggccattcttttggattttcatggacaacttgctgctgaccgaggatgaccaggaaactaccactcggttcctgcagaccgaagccgtgaccctgcaggacgtgagaggccgggactaccagaacgccatgcgggtgtggtccaacatccctggactgaaaagcaagcacgcacctctgacccctaaagaagaggagtacctgcaggcccaggtgcggagcagaagcaagctggacgcccctaaggtggatctgctggtgaagaattgcctcctgcccctgagagagtacttcaagtatttcagccagaatagtctgcccctgggaggcagcggcggcggcccccagaagagcgtgaccttcgaggacgtggccgtgtacttcacccagaccgagtgggacggcctgagccccgcccagagggccctgtacagggacgtgatgctggagaactacggcaacgtggccagcctgggcttcagcctgctgaagcccgccgtgatcagccagctggagggcgccggcgagctgggcggccccagccccctggtggacggcaccgagaccggcccccagggcctgtggggcggcccaagcagcggcgcccctcctcccagcggcggcagcccagccggctccccaacctctaccgaggagggcacctctgagtccgccacccccgagagcggccctggcacctccaccgagcccagcgagggcagcgcacccggcagccctgccggcagccccacctccacagaggagggaaccagcaccgagcccagcgaaggcagcgccccaggcaccagcaccgagcctagtgagcaggagattaaacggatcaacaagatcagaagaagacttgtgaaagacagcaacaccaagaaggccggcaagacaggccccatgaaaaccctgctggttagagtgatgacacccgatctgagagagcggctggaaaacctgagaaagaagcctgaaaatatcccccagcccatcagcaatacatctagagccaacctgaataagctgctgaccgattacaccgaaatgaagaaggcgatcctgcatgtgtactgggaagagttccagaaggaccctgtgggcctgatgagccgggtggcccagcctgccagcaagaagatcgatcagaacaagctgaaacctgagatggacgagaagggcaacctgaccaccgccggctttgcctgctctcagtgtggccagcccctgttcgtgtacaagctggagcaggtgtctgagaagggcaaggcttacaccaactacttcggacggtgcaatgtggccgagcacgaaaagctgatcctgctggcccagctgaagcccgagaaggatagcgacgaagccgtgacatatagcctgggaaagtttgggcagagggccctggatttctacagcattcatgtgaccaaggagtccacccaccccgtgaagcccctggcccagatcgccggaaacagatacgcctccggacctgtgggaaaggccctgagcgacgcatgtatgggcacaatcgcctccttcctgtctaagtaccaggacatcatcatcgaacaccagaaggtggtgaagggcaaccagaagagactggagagcctgcgggagctggccggcaaggaaaacctggaataccctagcgtgaccctgccacctcagcctcacaccaaggagggcgttgatgcctacaacgaagtgatcgcccgggtgcgaatgtgggtgaacctgaacctgtggcagaagctgaagctaagcagagatgatgccaagcctctgctgagactgaagggattcccttcctttcctctggtcgagagacaggccaacgaagtggactggtgggacatggtgtgtaacgtgaagaagctgatcaacgagaaaaaggaggatggcaaggtgttttggcagaatctggctggctacaagagacaggaagccctgagaccatacctgagcagcgaggaagatcggaagaagggaaagaaattcgctcggtaccagctgggcgacctgctgctgcacctggaaaagaagcacggcgaggactggggaaaggtgtacgacgaggcctgggagcggattgacaagaaagtggaaggcctgagcaagcacatcaagctggaagaggaacggagaagcgaggacgcccagagcaaggccgccctgaccgactggctgcgggctaaggccagcttcgtgatcgagggcctgaaggaggccgacaaggacgagttctgcagatgcgagctgaagctgcagaagtggtacggggacctgcggggaaagcccttcgccatcgaagccgagaacagcatcctggacatcagcggcttcagcaagcagtacaactgtgccttcatctggcagaaggacggcgtgaagaagctgaacctgtacctgatcatcaactacttcaagggcggcaagctgcggttcaagaagatcaaacctgaagccttcgaagccaacagattctacaccgtgatcaacaaaaagagcggcgagatcgtgcccatggaggtgaacttcaacttcgacgaccccaacctgatcatcctgcctctggcctttggcaagagacagggcagagaattcatctggaacgacctgctgtccctggaaaccggcagcctgaagctggccaacggaagagtgatcgagaagacactgtacaacagaagaacccggcaggatgagcctgccctgttcgtggccctgaccttcgagcggcgggaggtcctggactcctccaatatcaaaccaatgaacctgatcggcgtggcaagaggcgaaaacatccccgccgtgatcgccctgaccgaccccgagggctgcccactgagccggtttaaggatagcctgggaaacccaacccacatcctgagaatcggcgagagctataaggagaagcagcggaccatccaggccaagaaggaggtggagcagcggagagccggcggctacagccggaagtacgccagcaaagccaagaatctggcagacgatatggtgagaaacaccgctagagatctgctgtactacgccgtgacccaggatgccatgctgatcttcgccaacctgagccggggcttcggccggcagggcaagcggaccttcatggccgagagacagtacacacggatggaggactggctgaccgccaagctggcctacgagggcctgagcaagacctacctgtccaagacactggcccagtacacctccaagacatgcagcaactgtgggtttaccatcaccagcgccgactacgacagggtgctggagaagctgaagaagacagcaacaggctggatgaccacaattaacggcaaggagctgaaggtggagggccagattacctactacaacagatacaagagacagaacgtagtcaaggacctgtccgtcgagctggatagactgagcgaagaatctgtgaacaacgacatctcctcctggacaaagggcagaagcggagaagctctgagcctcctgaagaaaagattctcccatagacccgtgcaggagaagttcgtgtgcctgaactgcggcttcgagacacacgcagccgagcaagccgccctgaacatcgccagatcctggctgttcctgcggagccaggagtacaagaaataccagacaaacaagacaaccggcaacaccgataagagagccttcgtcgagacctggcagtccttttaccggaagaagcttaaggaggtgtggaaacctgccgtgcggtctggcggatctggcggaggctccaccagccccaagaaaaagagaaaagtctaagctgccttctgcggggcttgccttctggccatgcccttcttctctcccttgcacctgtacctcttggtctttgaataaagcctgagtaggaaggctagcaaaaaaaaaaaaaaaaaaaaaaaaaaaaaaaaaaaaaaaaaaaaaaaaaaaaaaaaaaaaaaaaaaaaaaaaaaaaaaaa

SEQ ID NO: 12127 - RNA, 5785 nt, synthetic construct
  source 1..5785: mol_type = other RNA
aggaaataagagagaaaagaagagtaagaagaaatataagagccaccatggcccctaagaagaagcgtaaagtgagccggatggaacgcctcgtctacgaggtgcggcagaagtgcagaaacatcgaggacatctgcatctcctgcggatctctgaacgtgaccctggagcacccactgttcatcggcggcatgtgccagaactgtaaaaactgttttctggagtgtgcctatcaatacgacgatgacggctaccagagctactgcaccatctgttgcggcggaagagaggtgctgatgtgtggaaataacaactgctgccggtgcttctgcgtggaatgcgtggacctgctggtgggccccggcgccgcccaggccgctattaaggaagatccttggaactgctacatgtgcggccacaagggcacatacggcctgctgagacggagagaggactggcctagcagactgcagatgttcttcgccaataaccacgaccaggagttcgacccccctaaggtgtaccctcccgtccccgccgagaagagaaagcccatccgggtcctgagcctgttcgatggcatcgccaccggtctgctggtgctgaaggacctgggcatccaggtggataggtacattgcctccgaggtgtgcgaggactccatcaccgtgggaatggtgcgtcatcagggcaagatcatgtacgtgggcgacgtgcggagcgtgacacagaagcatatccaggagtggggccctttcgacctggtgatcggcggcagcccttgcaatgacctgagcatcgtgaacccagcccggaagggcctgtacgagggaaccggcagactgttcttcgagttttacagactgctgcacgacgcccggcctaaggaaggcgacgaccggcccttcttttggctgttcgagaatgtggtggccatgggagtcagcgacaagcgggatattagccggttcctggagagcaaccccgtgatgatcgatgccaaggaagtgagcgccgcccaccgggccagatacttctggggcaatctgcctggcatgaacagacccctggccagcaccgtgaacgacaagctggagctgcaggagtgcctggagcacggccggatcgccaagttcagcaaggtgagaaccatcaccacccgaagcaacagcatcaaacaaggcaaggaccagcactttcctgtgttcatgaacgagaaggaggacatcctgtggtgtaccgagatggagagagtgttcgggttcccagtccactacacagatgtcagcaacatgtctagactggccagacagagactgctgggaagaagctggtccgtccctgtgatcagacacctgttcgcccctctgaaggagtacttcgcctgcgtgagcagcggcaacagcaacgccaacagccggggccccagcttctctagcggcctggtgccactgtccctgagagggagccacatgggccccatggagatctacaaaaccgtgagcgcctggaagcggcagcctgtgcgcgtgctgagcctgtttcggaatatcgataaagtcctgaaaagcctgggattcctggagagcggctctggctccggcggtggcaccctgaagtacgtggaggatgtgacaaacgtggtcagacgggatgtggagaagtggggccccttcgatctggtgtacggcagcacccaacccctgggcagctcttgtgaccggtgccctggctggtacatgtttcagttccaccggatcctgcagtacgccctgccgagacaggagtcccagcggccattcttttggattttcatggacaacttgctgctgaccgaggatgaccaggaaactaccactcggttcctgcagaccgaagccgtgaccctgcaggacgtgagaggccgggactaccagaacgccatgcgggtgtggtccaacatccctggactgaaaagcaagcacgcacctctgacccctaaagaagaggagtacctgcaggcccaggtgcggagcagaagcaagctggacgcccctaaggtggatctgctggtgaagaattgcctcctgcccctgagagagtacttcaagtatttcagccagaatagtctgcccctgggaggcagcggcggcggcttccaggcccccgtgaccttcggcgacctggccatctacttcagccaggaggagtgggagtgcctgagccccatccagaaggacctgtacgaggacgtgatgctggagaactaccagaacctggtgagcctgggcctgagcttcaggaggcccaacgtgatcaccctgctggagaagggcaaggccccctggatggtggagcccgtgaagaggaggaggggcctggacctgggcagcaagtgcggcggcccaagcagcggcgcccctcctcccagcggcggcagcccagccggctccccaacctctaccgaggagggcacctctgagtccgccacccccgagagcggccctggcacctccaccgagcccagcgagggcagcgcacccggcagccctgccggcagccccacctccacagaggagggaaccagcaccgagcccagcgaaggcagcgccccaggcaccagcaccgagcctagtgagcaggagattaaacggatcaacaagatcagaagaagacttgtgaaagacagcaacaccaagaaggccggcaagacaggccccatgaaaaccctgctggttagagtgatgacacccgatctgagagagcggctggaaaacctgagaaagaagcctgaaaatatcccccagcccatcagcaatacatctagagccaacctgaataagctgctgaccgattacaccgaaatgaagaaggcgatcctgcatgtgtactgggaagagttccagaaggaccctgtgggcctgatgagccgggtggcccagcctgccagcaagaagatcgatcagaacaagctgaaacctgagatggacgagaagggcaacctgaccaccgccggctttgcctgctctcagtgtggccagcccctgttcgtgtacaagctggagcaggtgtctgagaagggcaaggcttacaccaactacttcggacggtgcaatgtggccgagcacgaaaagctgatcctgctggcccagctgaagcccgagaaggatagcgacgaagccgtgacatatagcctgggaaagtttgggcagagggccctggatttctacagcattcatgtgaccaaggagtccacccaccccgtgaagcccctggcccagatcgccggaaacagatacgcctccggacctgtgggaaaggccctgagcgacgcatgtatgggcacaatcgcctccttcctgtctaagtaccaggacatcatcatcgaacaccagaaggtggtgaagggcaaccagaagagactggagagcctgcgggagctggccggcaaggaaaacctggaataccctagcgtgaccctgccacctcagcctcacaccaaggagggcgttgatgcctacaacgaagtgatcgcccgggtgcgaatgtgggtgaacctgaacctgtggcagaagctgaagctaagcagagatgatgccaagcctctgctgagactgaagggattcccttcctttcctctggtcgagagacaggccaacgaagtggactggtgggacatggtgtgtaacgtgaagaagctgatcaacgagaaaaaggaggatggcaaggtgttttggcagaatctggctggctacaagagacaggaagccctgagaccatacctgagcagcgaggaagatcggaagaagggaaagaaattcgctcggtaccagctgggcgacctgctgctgcacctggaaaagaagcacggcgaggactggggaaaggtgtacgacgaggcctgggagcggattgacaagaaagtggaaggcctgagcaagcacatcaagctggaagaggaacggagaagcgaggacgcccagagcaaggccgccctgaccgactggctgcgggctaaggccagcttcgtgatcgagggcctgaaggaggccgacaaggacgagttctgcagatgcgagctgaagctgcagaagtggtacggggacctgcggggaaagcccttcgccatcgaagccgagaacagcatcctggacatcagcggcttcagcaagcagtacaactgtgccttcatctggcagaaggacggcgtgaagaagctgaacctgtacctgatcatcaactacttcaagggcggcaagctgcggttcaagaagatcaaacctgaagccttcgaagccaacagattctacaccgtgatcaacaaaaagagcggcgagatcgtgcccatggaggtgaacttcaacttcgacgaccccaacctgatcatcctgcctctggcctttggcaagagacagggcagagaattcatctggaacgacctgctgtccctggaaaccggcagcctgaagctggccaacggaagagtgatcgagaagacactgtacaacagaagaacccggcaggatgagcctgccctgttcgtggccctgaccttcgagcggcgggaggtcctggactcctccaatatcaaaccaatgaacctgatcggcgtggcaagaggcgaaaacatccccgccgtgatcgccctgaccgaccccgagggctgcccactgagccggtttaaggatagcctgggaaacccaacccacatcctgagaatcggcgagagctataaggagaagcagcggaccatccaggccaagaaggaggtggagcagcggagagccggcggctacagccggaagtacgccagcaaagccaagaatctggcagacgatatggtgagaaacaccgctagagatctgctgtactacgccgtgacccaggatgccatgctgatcttcgccaacctgagccggggcttcggccggcagggcaagcggaccttcatggccgagagacagtacacacggatggaggactggctgaccgccaagctggcctacgagggcctgagcaagacctacctgtccaagacactggcccagtacacctccaagacatgcagcaactgtgggtttaccatcaccagcgccgactacgacagggtgctggagaagctgaagaagacagcaacaggctggatgaccacaattaacggcaaggagctgaaggtggagggccagattacctactacaacagatacaagagacagaacgtagtcaaggacctgtccgtcgagctggatagactgagcgaagaatctgtgaacaacgacatctcctcctggacaaagggcagaagcggagaagctctgagcctcctgaagaaaagattctcccatagacccgtgcaggagaagttcgtgtgcctgaactgcggcttcgagacacacgcagccgagcaagccgccctgaacatcgccagatcctggctgttcctgcggagccaggagtacaagaaataccagacaaacaagacaaccggcaacaccgataagagagccttcgtcgagacctggcagtccttttaccggaagaagcttaaggaggtgtggaaacctgccgtgcggtctggcggatctggcggaggctccaccagccccaagaaaaagagaaaagtctaagctgccttctgcggggcttgccttctggccatgcccttcttctctcccttgcacctgtacctcttggtctttgaataaagcctgagtaggaaggctagcaaaaaaaaaaaaaaaaaaaaaaaaaaaaaaaaaaaaaaaaaaaaaaaaaaaaaaaaaaaaaaaaaaaaaaaaaaaaaaaa

SEQ ID NO: 12128 - RNA, 5785 nt, synthetic construct
  source 1..5785: mol_type = other RNA
aggaaataagagagaaaagaagagtaagaagaaatataagagccaccatggcccctaagaagaagcgtaaagtgagccggatggaacgcctcgtctacgaggtgcggcagaagtgcagaaacatcgaggacatctgcatctcctgcggatctctgaacgtgaccctggagcacccactgttcatcggcggcatgtgccagaactgtaaaaactgttttctggagtgtgcctatcaatacgacgatgacggctaccagagctactgcaccatctgttgcggcggaagagaggtgctgatgtgtggaaataacaactgctgccggtgcttctgcgtggaatgcgtggacctgctggtgggccccggcgccgcccaggccgctattaaggaagatccttggaactgctacatgtgcggccacaagggcacatacggcctgctgagacggagagaggactggcctagcagactgcagatgttcttcgccaataaccacgaccaggagttcgacccccctaaggtgtaccctcccgtccccgccgagaagagaaagcccatccgggtcctgagcctgttcgatggcatcgccaccggtctgctggtgctgaaggacctgggcatccaggtggataggtacattgcctccgaggtgtgcgaggactccatcaccgtgggaatggtgcgtcatcagggcaagatcatgtacgtgggcgacgtgcggagcgtgacacagaagcatatccaggagtggggccctttcgacctggtgatcggcggcagcccttgcaatgacctgagcatcgtgaacccagcccggaagggcctgtacgagggaaccggcagactgttcttcgagttttacagactgctgcacgacgcccggcctaaggaaggcgacgaccggcccttcttttggctgttcgagaatgtggtggccatgggagtcagcgacaagcgggatattagccggttcctggagagcaaccccgtgatgatcgatgccaaggaagtgagcgccgcccaccgggccagatacttctggggcaatctgcctggcatgaacagacccctggccagcaccgtgaacgacaagctggagctgcaggagtgcctggagcacggccggatcgccaagttcagcaaggtgagaaccatcaccacccgaagcaacagcatcaaacaaggcaaggaccagcactttcctgtgttcatgaacgagaaggaggacatcctgtggtgtaccgagatggagagagtgttcgggttcccagtccactacacagatgtcagcaacatgtctagactggccagacagagactgctgggaagaagctggtccgtccctgtgatcagacacctgttcgcccctctgaaggagtacttcgcctgcgtgagcagcggcaacagcaacgccaacagccggggccccagcttctctagcggcctggtgccactgtccctgagagggagccacatgggccccatggagatctacaaaaccgtgagcgcctggaagcggcagcctgtgcgcgtgctgagcctgtttcggaatatcgataaagtcctgaaaagcctgggattcctggagagcggctctggctccggcggtggcaccctgaagtacgtggaggatgtgacaaacgtggtcagacgggatgtggagaagtggggccccttcgatctggtgtacggcagcacccaacccctgggcagctcttgtgaccggtgccctggctggtacatgtttcagttccaccggatcctgcagtacgccctgccgagacaggagtcccagcggccattcttttggattttcatggacaacttgctgctgaccgaggatgaccaggaaactaccactcggttcctgcagaccgaagccgtgaccctgcaggacgtgagaggccgggactaccagaacgccatgcgggtgtggtccaacatccctggactgaaaagcaagcacgcacctctgacccctaaagaagaggagtacctgcaggcccaggtgcggagcagaagcaagctggacgcccctaaggtggatctgctggtgaagaattgcctcctgcccctgagagagtacttcaagtatttcagccagaatagtctgcccctgggaggcagcggcggcggcatggccctgaggagcgtgatcttcagcgacatcagcatcgacttcagccccgaggagtgggagtacctggacctggagcagaaggacctgtacagggacgtgatgctggagaactacagcaacctggtgagcctgggctgcttcatcagcaagcccgacgtgatcagcctgctggagcagggcaaggagccctggaaggtggtgaggaagaggaggaggcagtaccccgacctggagaccaagggcggcccaagcagcggcgcccctcctcccagcggcggcagcccagccggctccccaacctctaccgaggagggcacctctgagtccgccacccccgagagcggccctggcacctccaccgagcccagcgagggcagcgcacccggcagccctgccggcagccccacctccacagaggagggaaccagcaccgagcccagcgaaggcagcgccccaggcaccagcaccgagcctagtgagcaggagattaaacggatcaacaagatcagaagaagacttgtgaaagacagcaacaccaagaaggccggcaagacaggccccatgaaaaccctgctggttagagtgatgacacccgatctgagagagcggctggaaaacctgagaaagaagcctgaaaatatcccccagcccatcagcaatacatctagagccaacctgaataagctgctgaccgattacaccgaaatgaagaaggcgatcctgcatgtgtactgggaagagttccagaaggaccctgtgggcctgatgagccgggtggcccagcctgccagcaagaagatcgatcagaacaagctgaaacctgagatggacgagaagggcaacctgaccaccgccggctttgcctgctctcagtgtggccagcccctgttcgtgtacaagctggagcaggtgtctgagaagggcaaggcttacaccaactacttcggacggtgcaatgtggccgagcacgaaaagctgatcctgctggcccagctgaagcccgagaaggatagcgacgaagccgtgacatatagcctgggaaagtttgggcagagggccctggatttctacagcattcatgtgaccaaggagtccacccaccccgtgaagcccctggcccagatcgccggaaacagatacgcctccggacctgtgggaaaggccctgagcgacgcatgtatgggcacaatcgcctccttcctgtctaagtaccaggacatcatcatcgaacaccagaaggtggtgaagggcaaccagaagagactggagagcctgcgggagctggccggcaaggaaaacctggaataccctagcgtgaccctgccacctcagcctcacaccaaggagggcgttgatgcctacaacgaagtgatcgcccgggtgcgaatgtgggtgaacctgaacctgtggcagaagctgaagctaagcagagatgatgccaagcctctgctgagactgaagggattcccttcctttcctctggtcgagagacaggccaacgaagtggactggtgggacatggtgtgtaacgtgaagaagctgatcaacgagaaaaaggaggatggcaaggtgttttggcagaatctggctggctacaagagacaggaagccctgagaccatacctgagcagcgaggaagatcggaagaagggaaagaaattcgctcggtaccagctgggcgacctgctgctgcacctggaaaagaagcacggcgaggactggggaaaggtgtacgacgaggcctgggagcggattgacaagaaagtggaaggcctgagcaagcacatcaagctggaagaggaacggagaagcgaggacgcccagagcaaggccgccctgaccgactggctgcgggctaaggccagcttcgtgatcgagggcctgaaggaggccgacaaggacgagttctgcagatgcgagctgaagctgcagaagtggtacggggacctgcggggaaagcccttcgccatcgaagccgagaacagcatcctggacatcagcggcttcagcaagcagtacaactgtgccttcatctggcagaaggacggcgtgaagaagctgaacctgtacctgatcatcaactacttcaagggcggcaagctgcggttcaagaagatcaaacctgaagccttcgaagccaacagattctacaccgtgatcaacaaaaagagcggcgagatcgtgcccatggaggtgaacttcaacttcgacgaccccaacctgatcatcctgcctctggcctttggcaagagacagggcagagaattcatctggaacgacctgctgtccctggaaaccggcagcctgaagctggccaacggaagagtgatcgagaagacactgtacaacagaagaacccggcaggatgagcctgccctgttcgtggccctgaccttcgagcggcgggaggtcctggactcctccaatatcaaaccaatgaacctgatcggcgtggcaagaggcgaaaacatccccgccgtgatcgccctgaccgaccccgagggctgcccactgagccggtttaaggatagcctgggaaacccaacccacatcctgagaatcggcgagagctataaggagaagcagcggaccatccaggccaagaaggaggtggagcagcggagagccggcggctacagccggaagtacgccagcaaagccaagaatctggcagacgatatggtgagaaacaccgctagagatctgctgtactacgccgtgacccaggatgccatgctgatcttcgccaacctgagccggggcttcggccggcagggcaagcggaccttcatggccgagagacagtacacacggatggaggactggctgaccgccaagctggcctacgagggcctgagcaagacctacctgtccaagacactggcccagtacacctccaagacatgcagcaactgtgggtttaccatcaccagcgccgactacgacagggtgctggagaagctgaagaagacagcaacaggctggatgaccacaattaacggcaaggagctgaaggtggagggccagattacctactacaacagatacaagagacagaacgtagtcaaggacctgtccgtcgagctggatagactgagcgaagaatctgtgaacaacgacatctcctcctggacaaagggcagaagcggagaagctctgagcctcctgaagaaaagattctcccatagacccgtgcaggagaagttcgtgtgcctgaactgcggcttcgagacacacgcagccgagcaagccgccctgaacatcgccagatcctggctgttcctgcggagccaggagtacaagaaataccagacaaacaagacaaccggcaacaccgataagagagccttcgtcgagacctggcagtccttttaccggaagaagcttaaggaggtgtggaaacctgccgtgcggtctggcggatctggcggaggctccaccagccccaagaaaaagagaaaagtctaagctgccttctgcggggcttgccttctggccatgcccttcttctctcccttgcacctgtacctcttggtctttgaataaagcctgagtaggaaggctagcaaaaaaaaaaaaaaaaaaaaaaaaaaaaaaaaaaaaaaaaaaaaaaaaaaaaaaaaaaaaaaaaaaaaaaaaaaaaaaaa

SEQ ID NO: 12129 - RNA, 5785 nt, synthetic construct
  source 1..5785: mol_type = other RNA
aggaaataagagagaaaagaagagtaagaagaaatataagagccaccatggcccctaagaagaagcgtaaagtgagccggatggaacgcctcgtctacgaggtgcggcagaagtgcagaaacatcgaggacatctgcatctcctgcggatctctgaacgtgaccctggagcacccactgttcatcggcggcatgtgccagaactgtaaaaactgttttctggagtgtgcctatcaatacgacgatgacggctaccagagctactgcaccatctgttgcggcggaagagaggtgctgatgtgtggaaataacaactgctgccggtgcttctgcgtggaatgcgtggacctgctggtgggccccggcgccgcccaggccgctattaaggaagatccttggaactgctacatgtgcggccacaagggcacatacggcctgctgagacggagagaggactggcctagcagactgcagatgttcttcgccaataaccacgaccaggagttcgacccccctaaggtgtaccctcccgtccccgccgagaagagaaagcccatccgggtcctgagcctgttcgatggcatcgccaccggtctgctggtgctgaaggacctgggcatccaggtggataggtacattgcctccgaggtgtgcgaggactccatcaccgtgggaatggtgcgtcatcagggcaagatcatgtacgtgggcgacgtgcggagcgtgacacagaagcatatccaggagtggggccctttcgacctggtgatcggcggcagcccttgcaatgacctgagcatcgtgaacccagcccggaagggcctgtacgagggaaccggcagactgttcttcgagttttacagactgctgcacgacgcccggcctaaggaaggcgacgaccggcccttcttttggctgttcgagaatgtggtggccatgggagtcagcgacaagcgggatattagccggttcctggagagcaaccccgtgatgatcgatgccaaggaagtgagcgccgcccaccgggccagatacttctggggcaatctgcctggcatgaacagacccctggccagcaccgtgaacgacaagctggagctgcaggagtgcctggagcacggccggatcgccaagttcagcaaggtgagaaccatcaccacccgaagcaacagcatcaaacaaggcaaggaccagcactttcctgtgttcatgaacgagaaggaggacatcctgtggtgtaccgagatggagagagtgttcgggttcccagtccactacacagatgtcagcaacatgtctagactggccagacagagactgctgggaagaagctggtccgtccctgtgatcagacacctgttcgcccctctgaaggagtacttcgcctgcgtgagcagcggcaacagcaacgccaacagccggggccccagcttctctagcggcctggtgccactgtccctgagagggagccacatgggccccatggagatctacaaaaccgtgagcgcctggaagcggcagcctgtgcgcgtgctgagcctgtttcggaatatcgataaagtcctgaaaagcctgggattcctggagagcggctctggctccggcggtggcaccctgaagtacgtggaggatgtgacaaacgtggtcagacgggatgtggagaagtggggccccttcgatctggtgtacggcagcacccaacccctgggcagctcttgtgaccggtgccctggctggtacatgtttcagttccaccggatcctgcagtacgccctgccgagacaggagtcccagcggccattcttttggattttcatggacaacttgctgctgaccgaggatgaccaggaaactaccactcggttcctgcagaccgaagccgtgaccctgcaggacgtgagaggccgggactaccagaacgccatgcgggtgtggtccaacatccctggactgaaaagcaagcacgcacctctgacccctaaagaagaggagtacctgcaggcccaggtgcggagcagaagcaagctggacgcccctaaggtggatctgctggtgaagaattgcctcctgcccctgagagagtacttcaagtatttcagccagaatagtctgcccctgggaggcagcggcggcggcgcccacaggagcgtgatgttcaacgacgtgagcatcgacttcagcagggaggagtgggagtacctgaacctggagcagagggacctgtacagggacgtgatgctggagaactacagcaacctggtgagcctgggctacttcatcagcaagcccgacgtgatcagcctgctggagcagggcgaggagccctggaaggtggtgaggaagggcaggaggaggtaccccgacctgaagaccaactacggcggcccaagcagcggcgcccctcctcccagcggcggcagcccagccggctccccaacctctaccgaggagggcacctctgagtccgccacccccgagagcggccctggcacctccaccgagcccagcgagggcagcgcacccggcagccctgccggcagccccacctccacagaggagggaaccagcaccgagcccagcgaaggcagcgccccaggcaccagcaccgagcctagtgagcaggagattaaacggatcaacaagatcagaagaagacttgtgaaagacagcaacaccaagaaggccggcaagacaggccccatgaaaaccctgctggttagagtgatgacacccgatctgagagagcggctggaaaacctgagaaagaagcctgaaaatatcccccagcccatcagcaatacatctagagccaacctgaataagctgctgaccgattacaccgaaatgaagaaggcgatcctgcatgtgtactgggaagagttccagaaggaccctgtgggcctgatgagccgggtggcccagcctgccagcaagaagatcgatcagaacaagctgaaacctgagatggacgagaagggcaacctgaccaccgccggctttgcctgctctcagtgtggccagcccctgttcgtgtacaagctggagcaggtgtctgagaagggcaaggcttacaccaactacttcggacggtgcaatgtggccgagcacgaaaagctgatcctgctggcccagctgaagcccgagaaggatagcgacgaagccgtgacatatagcctgggaaagtttgggcagagggccctggatttctacagcattcatgtgaccaaggagtccacccaccccgtgaagcccctggcccagatcgccggaaacagatacgcctccggacctgtgggaaaggccctgagcgacgcatgtatgggcacaatcgcctccttcctgtctaagtaccaggacatcatcatcgaacaccagaaggtggtgaagggcaaccagaagagactggagagcctgcgggagctggccggcaaggaaaacctggaataccctagcgtgaccctgccacctcagcctcacaccaaggagggcgttgatgcctacaacgaagtgatcgcccgggtgcgaatgtgggtgaacctgaacctgtggcagaagctgaagctaagcagagatgatgccaagcctctgctgagactgaagggattcccttcctttcctctggtcgagagacaggccaacgaagtggactggtgggacatggtgtgtaacgtgaagaagctgatcaacgagaaaaaggaggatggcaaggtgttttggcagaatctggctggctacaagagacaggaagccctgagaccatacctgagcagcgaggaagatcggaagaagggaaagaaattcgctcggtaccagctgggcgacctgctgctgcacctggaaaagaagcacggcgaggactggggaaaggtgtacgacgaggcctgggagcggattgacaagaaagtggaaggcctgagcaagcacatcaagctggaagaggaacggagaagcgaggacgcccagagcaaggccgccctgaccgactggctgcgggctaaggccagcttcgtgatcgagggcctgaaggaggccgacaaggacgagttctgcagatgcgagctgaagctgcagaagtggtacggggacctgcggggaaagcccttcgccatcgaagccgagaacagcatcctggacatcagcggcttcagcaagcagtacaactgtgccttcatctggcagaaggacggcgtgaagaagctgaacctgtacctgatcatcaactacttcaagggcggcaagctgcggttcaagaagatcaaacctgaagccttcgaagccaacagattctacaccgtgatcaacaaaaagagcggcgagatcgtgcccatggaggtgaacttcaacttcgacgaccccaacctgatcatcctgcctctggcctttggcaagagacagggcagagaattcatctggaacgacctgctgtccctggaaaccggcagcctgaagctggccaacggaagagtgatcgagaagacactgtacaacagaagaacccggcaggatgagcctgccctgttcgtggccctgaccttcgagcggcgggaggtcctggactcctccaatatcaaaccaatgaacctgatcggcgtggcaagaggcgaaaacatccccgccgtgatcgccctgaccgaccccgagggctgcccactgagccggtttaaggatagcctgggaaacccaacccacatcctgagaatcggcgagagctataaggagaagcagcggaccatccaggccaagaaggaggtggagcagcggagagccggcggctacagccggaagtacgccagcaaagccaagaatctggcagacgatatggtgagaaacaccgctagagatctgctgtactacgccgtgacccaggatgccatgctgatcttcgccaacctgagccggggcttcggccggcagggcaagcggaccttcatggccgagagacagtacacacggatggaggactggctgaccgccaagctggcctacgagggcctgagcaagacctacctgtccaagacactggcccagtacacctccaagacatgcagcaactgtgggtttaccatcaccagcgccgactacgacagggtgctggagaagctgaagaagacagcaacaggctggatgaccacaattaacggcaaggagctgaaggtggagggccagattacctactacaacagatacaagagacagaacgtagtcaaggacctgtccgtcgagctggatagactgagcgaagaatctgtgaacaacgacatctcctcctggacaaagggcagaagcggagaagctctgagcctcctgaagaaaagattctcccatagacccgtgcaggagaagttcgtgtgcctgaactgcggcttcgagacacacgcagccgagcaagccgccctgaacatcgccagatcctggctgttcctgcggagccaggagtacaagaaataccagacaaacaagacaaccggcaacaccgataagagagccttcgtcgagacctggcagtccttttaccggaagaagcttaaggaggtgtggaaacctgccgtgcggtctggcggatctggcggaggctccaccagccccaagaaaaagagaaaagtctaagctgccttctgcggggcttgccttctggccatgcccttcttctctcccttgcacctgtacctcttggtctttgaataaagcctgagtaggaaggctagcaaaaaaaaaaaaaaaaaaaaaaaaaaaaaaaaaaaaaaaaaaaaaaaaaaaaaaaaaaaaaaaaaaaaaaaaaaaaaaaa

SEQ ID NO: 12130 - RNA, 5785 nt, synthetic construct
  source 1..5785: mol_type = other RNA
aggaaataagagagaaaagaagagtaagaagaaatataagagccaccatggcccctaagaagaagcgtaaagtgagccggatggaacgcctcgtctacgaggtgcggcagaagtgcagaaacatcgaggacatctgcatctcctgcggatctctgaacgtgaccctggagcacccactgttcatcggcggcatgtgccagaactgtaaaaactgttttctggagtgtgcctatcaatacgacgatgacggctaccagagctactgcaccatctgttgcggcggaagagaggtgctgatgtgtggaaataacaactgctgccggtgcttctgcgtggaatgcgtggacctgctggtgggccccggcgccgcccaggccgctattaaggaagatccttggaactgctacatgtgcggccacaagggcacatacggcctgctgagacggagagaggactggcctagcagactgcagatgttcttcgccaataaccacgaccaggagttcgacccccctaaggtgtaccctcccgtccccgccgagaagagaaagcccatccgggtcctgagcctgttcgatggcatcgccaccggtctgctggtgctgaaggacctgggcatccaggtggataggtacattgcctccgaggtgtgcgaggactccatcaccgtgggaatggtgcgtcatcagggcaagatcatgtacgtgggcgacgtgcggagcgtgacacagaagcatatccaggagtggggccctttcgacctggtgatcggcggcagcccttgcaatgacctgagcatcgtgaacccagcccggaagggcctgtacgagggaaccggcagactgttcttcgagttttacagactgctgcacgacgcccggcctaaggaaggcgacgaccggcccttcttttggctgttcgagaatgtggtggccatgggagtcagcgacaagcgggatattagccggttcctggagagcaaccccgtgatgatcgatgccaaggaagtgagcgccgcccaccgggccagatacttctggggcaatctgcctggcatgaacagacccctggccagcaccgtgaacgacaagctggagctgcaggagtgcctggagcacggccggatcgccaagttcagcaaggtgagaaccatcaccacccgaagcaacagcatcaaacaaggcaaggaccagcactttcctgtgttcatgaacgagaaggaggacatcctgtggtgtaccgagatggagagagtgttcgggttcccagtccactacacagatgtcagcaacatgtctagactggccagacagagactgctgggaagaagctggtccgtccctgtgatcagacacctgttcgcccctctgaaggagtacttcgcctgcgtgagcagcggcaacagcaacgccaacagccggggccccagcttctctagcggcctggtgccactgtccctgagagggagccacatgggccccatggagatctacaaaaccgtgagcgcctggaagcggcagcctgtgcgcgtgctgagcctgtttcggaatatcgataaagtcctgaaaagcctgggattcctggagagcggctctggctccggcggtggcaccctgaagtacgtggaggatgtgacaaacgtggtcagacgggatgtggagaagtggggccccttcgatctggtgtacggcagcacccaacccctgggcagctcttgtgaccggtgccctggctggtacatgtttcagttccaccggatcctgcagtacgccctgccgagacaggagtcccagcggccattcttttggattttcatggacaacttgctgctgaccgaggatgaccaggaaactaccactcggttcctgcagaccgaagccgtgaccctgcaggacgtgagaggccgggactaccagaacgccatgcgggtgtggtccaacatccctggactgaaaagcaagcacgcacctctgacccctaaagaagaggagtacctgcaggcccaggtgcggagcagaagcaagctggacgcccctaaggtggatctgctggtgaagaattgcctcctgcccctgagagagtacttcaagtatttcagccagaatagtctgcccctgggaggcagcggcggcggcccccaggtgctggtgagcttcgaggaggtggccgtgctgctgagccaggaggagtggggccacctgggccccgcccagaagaggctgtacagggacgtgatgctggagacctacggcaacctggtgagcctgggcctgcagggcagcaagcccgacgtgatcagcaagctggagcagggcgaggagccctgggccccccacagccccaggatcgagggcagctggatctggaggaggaggaggggcggcccaagcagcggcgcccctcctcccagcggcggcagcccagccggctccccaacctctaccgaggagggcacctctgagtccgccacccccgagagcggccctggcacctccaccgagcccagcgagggcagcgcacccggcagccctgccggcagccccacctccacagaggagggaaccagcaccgagcccagcgaaggcagcgccccaggcaccagcaccgagcctagtgagcaggagattaaacggatcaacaagatcagaagaagacttgtgaaagacagcaacaccaagaaggccggcaagacaggccccatgaaaaccctgctggttagagtgatgacacccgatctgagagagcggctggaaaacctgagaaagaagcctgaaaatatcccccagcccatcagcaatacatctagagccaacctgaataagctgctgaccgattacaccgaaatgaagaaggcgatcctgcatgtgtactgggaagagttccagaaggaccctgtgggcctgatgagccgggtggcccagcctgccagcaagaagatcgatcagaacaagctgaaacctgagatggacgagaagggcaacctgaccaccgccggctttgcctgctctcagtgtggccagcccctgttcgtgtacaagctggagcaggtgtctgagaagggcaaggcttacaccaactacttcggacggtgcaatgtggccgagcacgaaaagctgatcctgctggcccagctgaagcccgagaaggatagcgacgaagccgtgacatatagcctgggaaagtttgggcagagggccctggatttctacagcattcatgtgaccaaggagtccacccaccccgtgaagcccctggcccagatcgccggaaacagatacgcctccggacctgtgggaaaggccctgagcgacgcatgtatgggcacaatcgcctccttcctgtctaagtaccaggacatcatcatcgaacaccagaaggtggtgaagggcaaccagaagagactggagagcctgcgggagctggccggcaaggaaaacctggaataccctagcgtgaccctgccacctcagcctcacaccaaggagggcgttgatgcctacaacgaagtgatcgcccgggtgcgaatgtgggtgaacctgaacctgtggcagaagctgaagctaagcagagatgatgccaagcctctgctgagactgaagggattcccttcctttcctctggtcgagagacaggccaacgaagtggactggtgggacatggtgtgtaacgtgaagaagctgatcaacgagaaaaaggaggatggcaaggtgttttggcagaatctggctggctacaagagacaggaagccctgagaccatacctgagcagcgaggaagatcggaagaagggaaagaaattcgctcggtaccagctgggcgacctgctgctgcacctggaaaagaagcacggcgaggactggggaaaggtgtacgacgaggcctgggagcggattgacaagaaagtggaaggcctgagcaagcacatcaagctggaagaggaacggagaagcgaggacgcccagagcaaggccgccctgaccgactggctgcgggctaaggccagcttcgtgatcgagggcctgaaggaggccgacaaggacgagttctgcagatgcgagctgaagctgcagaagtggtacggggacctgcggggaaagcccttcgccatcgaagccgagaacagcatcctggacatcagcggcttcagcaagcagtacaactgtgccttcatctggcagaaggacggcgtgaagaagctgaacctgtacctgatcatcaactacttcaagggcggcaagctgcggttcaagaagatcaaacctgaagccttcgaagccaacagattctacaccgtgatcaacaaaaagagcggcgagatcgtgcccatggaggtgaacttcaacttcgacgaccccaacctgatcatcctgcctctggcctttggcaagagacagggcagagaattcatctggaacgacctgctgtccctggaaaccggcagcctgaagctggccaacggaagagtgatcgagaagacactgtacaacagaagaacccggcaggatgagcctgccctgttcgtggccctgaccttcgagcggcgggaggtcctggactcctccaatatcaaaccaatgaacctgatcggcgtggcaagaggcgaaaacatccccgccgtgatcgccctgaccgaccccgagggctgcccactgagccggtttaaggatagcctgggaaacccaacccacatcctgagaatcggcgagagctataaggagaagcagcggaccatccaggccaagaaggaggtggagcagcggagagccggcggctacagccggaagtacgccagcaaagccaagaatctggcagacgatatggtgagaaacaccgctagagatctgctgtactacgccgtgacccaggatgccatgctgatcttcgccaacctgagccggggcttcggccggcagggcaagcggaccttcatggccgagagacagtacacacggatggaggactggctgaccgccaagctggcctacgagggcctgagcaagacctacctgtccaagacactggcccagtacacctccaagacatgcagcaactgtgggtttaccatcaccagcgccgactacgacagggtgctggagaagctgaagaagacagcaacaggctggatgaccacaattaacggcaaggagctgaaggtggagggccagattacctactacaacagatacaagagacagaacgtagtcaaggacctgtccgtcgagctggatagactgagcgaagaatctgtgaacaacgacatctcctcctggacaaagggcagaagcggagaagctctgagcctcctgaagaaaagattctcccatagacccgtgcaggagaagttcgtgtgcctgaactgcggcttcgagacacacgcagccgagcaagccgccctgaacatcgccagatcctggctgttcctgcggagccaggagtacaagaaataccagacaaacaagacaaccggcaacaccgataagagagccttcgtcgagacctggcagtccttttaccggaagaagcttaaggaggtgtggaaacctgccgtgcggtctggcggatctggcggaggctccaccagccccaagaaaaagagaaaagtctaagctgccttctgcggggcttgccttctggccatgcccttcttctctcccttgcacctgtacctcttggtctttgaataaagcctgagtaggaaggctagcaaaaaaaaaaaaaaaaaaaaaaaaaaaaaaaaaaaaaaaaaaaaaaaaaaaaaaaaaaaaaaaaaaaaaaaaaaaaaaaa

SEQ ID NO: 12131 - RNA, 5785 nt, synthetic construct
  source 1..5785: mol_type = other RNA
aggaaataagagagaaaagaagagtaagaagaaatataagagccaccatggcccctaagaagaagcgtaaagtgagccggatggaacgcctcgtctacgaggtgcggcagaagtgcagaaacatcgaggacatctgcatctcctgcggatctctgaacgtgaccctggagcacccactgttcatcggcggcatgtgccagaactgtaaaaactgttttctggagtgtgcctatcaatacgacgatgacggctaccagagctactgcaccatctgttgcggcggaagagaggtgctgatgtgtggaaataacaactgctgccggtgcttctgcgtggaatgcgtggacctgctggtgggccccggcgccgcccaggccgctattaaggaagatccttggaactgctacatgtgcggccacaagggcacatacggcctgctgagacggagagaggactggcctagcagactgcagatgttcttcgccaataaccacgaccaggagttcgacccccctaaggtgtaccctcccgtccccgccgagaagagaaagcccatccgggtcctgagcctgttcgatggcatcgccaccggtctgctggtgctgaaggacctgggcatccaggtggataggtacattgcctccgaggtgtgcgaggactccatcaccgtgggaatggtgcgtcatcagggcaagatcatgtacgtgggcgacgtgcggagcgtgacacagaagcatatccaggagtggggccctttcgacctggtgatcggcggcagcccttgcaatgacctgagcatcgtgaacccagcccggaagggcctgtacgagggaaccggcagactgttcttcgagttttacagactgctgcacgacgcccggcctaaggaaggcgacgaccggcccttcttttggctgttcgagaatgtggtggccatgggagtcagcgacaagcgggatattagccggttcctggagagcaaccccgtgatgatcgatgccaaggaagtgagcgccgcccaccgggccagatacttctggggcaatctgcctggcatgaacagacccctggccagcaccgtgaacgacaagctggagctgcaggagtgcctggagcacggccggatcgccaagttcagcaaggtgagaaccatcaccacccgaagcaacagcatcaaacaaggcaaggaccagcactttcctgtgttcatgaacgagaaggaggacatcctgtggtgtaccgagatggagagagtgttcgggttcccagtccactacacagatgtcagcaacatgtctagactggccagacagagactgctgggaagaagctggtccgtccctgtgatcagacacctgttcgcccctctgaaggagtacttcgcctgcgtgagcagcggcaacagcaacgccaacagccggggccccagcttctctagcggcctggtgccactgtccctgagagggagccacatgggccccatggagatctacaaaaccgtgagcgcctggaagcggcagcctgtgcgcgtgctgagcctgtttcggaatatcgataaagtcctgaaaagcctgggattcctggagagcggctctggctccggcggtggcaccctgaagtacgtggaggatgtgacaaacgtggtcagacgggatgtggagaagtggggccccttcgatctggtgtacggcagcacccaacccctgggcagctcttgtgaccggtgccctggctggtacatgtttcagttccaccggatcctgcagtacgccctgccgagacaggagtcccagcggccattcttttggattttcatggacaacttgctgctgaccgaggatgaccaggaaactaccactcggttcctgcagaccgaagccgtgaccctgcaggacgtgagaggccgggactaccagaacgccatgcgggtgtggtccaacatccctggactgaaaagcaagcacgcacctctgacccctaaagaagaggagtacctgcaggcccaggtgcggagcagaagcaagctggacgcccctaaggtggatctgctggtgaagaattgcctcctgcccctgagagagtacttcaagtatttcagccagaatagtctgcccctgggaggcagcggcggcggcagcaaggcccccatcaccttcggcgacctggccatctacttcagccaggaggagtgggagtggctgagccccatccagaaggacctgtacgaggacgtgatgctggagaactacaggaacctggtgagcctgggcctgagcttcaggaggcccaacgtgatcaccctgctggagaagggcaaggccccctggatggtggagcccgccaggaggaggaggggccccgacagcggcagcaaggtgggcggcccaagcagcggcgcccctcctcccagcggcggcagcccagccggctccccaacctctaccgaggagggcacctctgagtccgccacccccgagagcggccctggcacctccaccgagcccagcgagggcagcgcacccggcagccctgccggcagccccacctccacagaggagggaaccagcaccgagcccagcgaaggcagcgccccaggcaccagcaccgagcctagtgagcaggagattaaacggatcaacaagatcagaagaagacttgtgaaagacagcaacaccaagaaggccggcaagacaggccccatgaaaaccctgctggttagagtgatgacacccgatctgagagagcggctggaaaacctgagaaagaagcctgaaaatatcccccagcccatcagcaatacatctagagccaacctgaataagctgctgaccgattacaccgaaatgaagaaggcgatcctgcatgtgtactgggaagagttccagaaggaccctgtgggcctgatgagccgggtggcccagcctgccagcaagaagatcgatcagaacaagctgaaacctgagatggacgagaagggcaacctgaccaccgccggctttgcctgctctcagtgtggccagcccctgttcgtgtacaagctggagcaggtgtctgagaagggcaaggcttacaccaactacttcggacggtgcaatgtggccgagcacgaaaagctgatcctgctggcccagctgaagcccgagaaggatagcgacgaagccgtgacatatagcctgggaaagtttgggcagagggccctggatttctacagcattcatgtgaccaaggagtccacccaccccgtgaagcccctggcccagatcgccggaaacagatacgcctccggacctgtgggaaaggccctgagcgacgcatgtatgggcacaatcgcctccttcctgtctaagtaccaggacatcatcatcgaacaccagaaggtggtgaagggcaaccagaagagactggagagcctgcgggagctggccggcaaggaaaacctggaataccctagcgtgaccctgccacctcagcctcacaccaaggagggcgttgatgcctacaacgaagtgatcgcccgggtgcgaatgtgggtgaacctgaacctgtggcagaagctgaagctaagcagagatgatgccaagcctctgctgagactgaagggattcccttcctttcctctggtcgagagacaggccaacgaagtggactggtgggacatggtgtgtaacgtgaagaagctgatcaacgagaaaaaggaggatggcaaggtgttttggcagaatctggctggctacaagagacaggaagccctgagaccatacctgagcagcgaggaagatcggaagaagggaaagaaattcgctcggtaccagctgggcgacctgctgctgcacctggaaaagaagcacggcgaggactggggaaaggtgtacgacgaggcctgggagcggattgacaagaaagtggaaggcctgagcaagcacatcaagctggaagaggaacggagaagcgaggacgcccagagcaaggccgccctgaccgactggctgcgggctaaggccagcttcgtgatcgagggcctgaaggaggccgacaaggacgagttctgcagatgcgagctgaagctgcagaagtggtacggggacctgcggggaaagcccttcgccatcgaagccgagaacagcatcctggacatcagcggcttcagcaagcagtacaactgtgccttcatctggcagaaggacggcgtgaagaagctgaacctgtacctgatcatcaactacttcaagggcggcaagctgcggttcaagaagatcaaacctgaagccttcgaagccaacagattctacaccgtgatcaacaaaaagagcggcgagatcgtgcccatggaggtgaacttcaacttcgacgaccccaacctgatcatcctgcctctggcctttggcaagagacagggcagagaattcatctggaacgacctgctgtccctggaaaccggcagcctgaagctggccaacggaagagtgatcgagaagacactgtacaacagaagaacccggcaggatgagcctgccctgttcgtggccctgaccttcgagcggcgggaggtcctggactcctccaatatcaaaccaatgaacctgatcggcgtggcaagaggcgaaaacatccccgccgtgatcgccctgaccgaccccgagggctgcccactgagccggtttaaggatagcctgggaaacccaacccacatcctgagaatcggcgagagctataaggagaagcagcggaccatccaggccaagaaggaggtggagcagcggagagccggcggctacagccggaagtacgccagcaaagccaagaatctggcagacgatatggtgagaaacaccgctagagatctgctgtactacgccgtgacccaggatgccatgctgatcttcgccaacctgagccggggcttcggccggcagggcaagcggaccttcatggccgagagacagtacacacggatggaggactggctgaccgccaagctggcctacgagggcctgagcaagacctacctgtccaagacactggcccagtacacctccaagacatgcagcaactgtgggtttaccatcaccagcgccgactacgacagggtgctggagaagctgaagaagacagcaacaggctggatgaccacaattaacggcaaggagctgaaggtggagggccagattacctactacaacagatacaagagacagaacgtagtcaaggacctgtccgtcgagctggatagactgagcgaagaatctgtgaacaacgacatctcctcctggacaaagggcagaagcggagaagctctgagcctcctgaagaaaagattctcccatagacccgtgcaggagaagttcgtgtgcctgaactgcggcttcgagacacacgcagccgagcaagccgccctgaacatcgccagatcctggctgttcctgcggagccaggagtacaagaaataccagacaaacaagacaaccggcaacaccgataagagagccttcgtcgagacctggcagtccttttaccggaagaagcttaaggaggtgtggaaacctgccgtgcggtctggcggatctggcggaggctccaccagccccaagaaaaagagaaaagtctaagctgccttctgcggggcttgccttctggccatgcccttcttctctcccttgcacctgtacctcttggtctttgaataaagcctgagtaggaaggctagcaaaaaaaaaaaaaaaaaaaaaaaaaaaaaaaaaaaaaaaaaaaaaaaaaaaaaaaaaaaaaaaaaaaaaaaaaaaaaaaa

SEQ ID NO: 12132 - RNA, 5785 nt, synthetic construct
  source 1..5785: mol_type = other RNA
aggaaataagagagaaaagaagagtaagaagaaatataagagccaccatggcccctaagaagaagcgtaaagtgagccggatggaacgcctcgtctacgaggtgcggcagaagtgcagaaacatcgaggacatctgcatctcctgcggatctctgaacgtgaccctggagcacccactgttcatcggcggcatgtgccagaactgtaaaaactgttttctggagtgtgcctatcaatacgacgatgacggctaccagagctactgcaccatctgttgcggcggaagagaggtgctgatgtgtggaaataacaactgctgccggtgcttctgcgtggaatgcgtggacctgctggtgggccccggcgccgcccaggccgctattaaggaagatccttggaactgctacatgtgcggccacaagggcacatacggcctgctgagacggagagaggactggcctagcagactgcagatgttcttcgccaataaccacgaccaggagttcgacccccctaaggtgtaccctcccgtccccgccgagaagagaaagcccatccgggtcctgagcctgttcgatggcatcgccaccggtctgctggtgctgaaggacctgggcatccaggtggataggtacattgcctccgaggtgtgcgaggactccatcaccgtgggaatggtgcgtcatcagggcaagatcatgtacgtgggcgacgtgcggagcgtgacacagaagcatatccaggagtggggccctttcgacctggtgatcggcggcagcccttgcaatgacctgagcatcgtgaacccagcccggaagggcctgtacgagggaaccggcagactgttcttcgagttttacagactgctgcacgacgcccggcctaaggaaggcgacgaccggcccttcttttggctgttcgagaatgtggtggccatgggagtcagcgacaagcgggatattagccggttcctggagagcaaccccgtgatgatcgatgccaaggaagtgagcgccgcccaccgggccagatacttctggggcaatctgcctggcatgaacagacccctggccagcaccgtgaacgacaagctggagctgcaggagtgcctggagcacggccggatcgccaagttcagcaaggtgagaaccatcaccacccgaagcaacagcatcaaacaaggcaaggaccagcactttcctgtgttcatgaacgagaaggaggacatcctgtggtgtaccgagatggagagagtgttcgggttcccagtccactacacagatgtcagcaacatgtctagactggccagacagagactgctgggaagaagctggtccgtccctgtgatcagacacctgttcgcccctctgaaggagtacttcgcctgcgtgagcagcggcaacagcaacgccaacagccggggccccagcttctctagcggcctggtgccactgtccctgagagggagccacatgggccccatggagatctacaaaaccgtgagcgcctggaagcggcagcctgtgcgcgtgctgagcctgtttcggaatatcgataaagtcctgaaaagcctgggattcctggagagcggctctggctccggcggtggcaccctgaagtacgtggaggatgtgacaaacgtggtcagacgggatgtggagaagtggggccccttcgatctggtgtacggcagcacccaacccctgggcagctcttgtgaccggtgccctggctggtacatgtttcagttccaccggatcctgcagtacgccctgccgagacaggagtcccagcggccattcttttggattttcatggacaacttgctgctgaccgaggatgaccaggaaactaccactcggttcctgcagaccgaagccgtgaccctgcaggacgtgagaggccgggactaccagaacgccatgcgggtgtggtccaacatccctggactgaaaagcaagcacgcacctctgacccctaaagaagaggagtacctgcaggcccaggtgcggagcagaagcaagctggacgcccctaaggtggatctgctggtgaagaattgcctcctgcccctgagagagtacttcaagtatttcagccagaatagtctgcccctgggaggcagcggcggcggcttccaggagagcgtggtgttcagcgacgtgagcatcgccttcagccaggaggagtgggcccacctggacctggagcagaaggacctgtacagggacgtgatgctggagaactacagcaacctggtgagcctgggctgcttcgtgagcaagcccgacgtgatcagcctgctggagcagggcaaggagccctggaagatcgtgaggaagggcaggaggaggtaccccgacctggagaccaggtacggcggcccaagcagcggcgcccctcctcccagcggcggcagcccagccggctccccaacctctaccgaggagggcacctctgagtccgccacccccgagagcggccctggcacctccaccgagcccagcgagggcagcgcacccggcagccctgccggcagccccacctccacagaggagggaaccagcaccgagcccagcgaaggcagcgccccaggcaccagcaccgagcctagtgagcaggagattaaacggatcaacaagatcagaagaagacttgtgaaagacagcaacaccaagaaggccggcaagacaggccccatgaaaaccctgctggttagagtgatgacacccgatctgagagagcggctggaaaacctgagaaagaagcctgaaaatatcccccagcccatcagcaatacatctagagccaacctgaataagctgctgaccgattacaccgaaatgaagaaggcgatcctgcatgtgtactgggaagagttccagaaggaccctgtgggcctgatgagccgggtggcccagcctgccagcaagaagatcgatcagaacaagctgaaacctgagatggacgagaagggcaacctgaccaccgccggctttgcctgctctcagtgtggccagcccctgttcgtgtacaagctggagcaggtgtctgagaagggcaaggcttacaccaactacttcggacggtgcaatgtggccgagcacgaaaagctgatcctgctggcccagctgaagcccgagaaggatagcgacgaagccgtgacatatagcctgggaaagtttgggcagagggccctggatttctacagcattcatgtgaccaaggagtccacccaccccgtgaagcccctggcccagatcgccggaaacagatacgcctccggacctgtgggaaaggccctgagcgacgcatgtatgggcacaatcgcctccttcctgtctaagtaccaggacatcatcatcgaacaccagaaggtggtgaagggcaaccagaagagactggagagcctgcgggagctggccggcaaggaaaacctggaataccctagcgtgaccctgccacctcagcctcacaccaaggagggcgttgatgcctacaacgaagtgatcgcccgggtgcgaatgtgggtgaacctgaacctgtggcagaagctgaagctaagcagagatgatgccaagcctctgctgagactgaagggattcccttcctttcctctggtcgagagacaggccaacgaagtggactggtgggacatggtgtgtaacgtgaagaagctgatcaacgagaaaaaggaggatggcaaggtgttttggcagaatctggctggctacaagagacaggaagccctgagaccatacctgagcagcgaggaagatcggaagaagggaaagaaattcgctcggtaccagctgggcgacctgctgctgcacctggaaaagaagcacggcgaggactggggaaaggtgtacgacgaggcctgggagcggattgacaagaaagtggaaggcctgagcaagcacatcaagctggaagaggaacggagaagcgaggacgcccagagcaaggccgccctgaccgactggctgcgggctaaggccagcttcgtgatcgagggcctgaaggaggccgacaaggacgagttctgcagatgcgagctgaagctgcagaagtggtacggggacctgcggggaaagcccttcgccatcgaagccgagaacagcatcctggacatcagcggcttcagcaagcagtacaactgtgccttcatctggcagaaggacggcgtgaagaagctgaacctgtacctgatcatcaactacttcaagggcggcaagctgcggttcaagaagatcaaacctgaagccttcgaagccaacagattctacaccgtgatcaacaaaaagagcggcgagatcgtgcccatggaggtgaacttcaacttcgacgaccccaacctgatcatcctgcctctggcctttggcaagagacagggcagagaattcatctggaacgacctgctgtccctggaaaccggcagcctgaagctggccaacggaagagtgatcgagaagacactgtacaacagaagaacccggcaggatgagcctgccctgttcgtggccctgaccttcgagcggcgggaggtcctggactcctccaatatcaaaccaatgaacctgatcggcgtggcaagaggcgaaaacatccccgccgtgatcgccctgaccgaccccgagggctgcccactgagccggtttaaggatagcctgggaaacccaacccacatcctgagaatcggcgagagctataaggagaagcagcggaccatccaggccaagaaggaggtggagcagcggagagccggcggctacagccggaagtacgccagcaaagccaagaatctggcagacgatatggtgagaaacaccgctagagatctgctgtactacgccgtgacccaggatgccatgctgatcttcgccaacctgagccggggcttcggccggcagggcaagcggaccttcatggccgagagacagtacacacggatggaggactggctgaccgccaagctggcctacgagggcctgagcaagacctacctgtccaagacactggcccagtacacctccaagacatgcagcaactgtgggtttaccatcaccagcgccgactacgacagggtgctggagaagctgaagaagacagcaacaggctggatgaccacaattaacggcaaggagctgaaggtggagggccagattacctactacaacagatacaagagacagaacgtagtcaaggacctgtccgtcgagctggatagactgagcgaagaatctgtgaacaacgacatctcctcctggacaaagggcagaagcggagaagctctgagcctcctgaagaaaagattctcccatagacccgtgcaggagaagttcgtgtgcctgaactgcggcttcgagacacacgcagccgagcaagccgccctgaacatcgccagatcctggctgttcctgcggagccaggagtacaagaaataccagacaaacaagacaaccggcaacaccgataagagagccttcgtcgagacctggcagtccttttaccggaagaagcttaaggaggtgtggaaacctgccgtgcggtctggcggatctggcggaggctccaccagccccaagaaaaagagaaaagtctaagctgccttctgcggggcttgccttctggccatgcccttcttctctcccttgcacctgtacctcttggtctttgaataaagcctgagtaggaaggctagcaaaaaaaaaaaaaaaaaaaaaaaaaaaaaaaaaaaaaaaaaaaaaaaaaaaaaaaaaaaaaaaaaaaaaaaaaaaaaaaa

SEQ ID NO: 12133 - RNA, 5785 nt, synthetic construct
  source 1..5785: mol_type = other RNA
aggaaataagagagaaaagaagagtaagaagaaatataagagccaccatggcccctaagaagaagcgtaaagtgagccggatggaacgcctcgtctacgaggtgcggcagaagtgcagaaacatcgaggacatctgcatctcctgcggatctctgaacgtgaccctggagcacccactgttcatcggcggcatgtgccagaactgtaaaaactgttttctggagtgtgcctatcaatacgacgatgacggctaccagagctactgcaccatctgttgcggcggaagagaggtgctgatgtgtggaaataacaactgctgccggtgcttctgcgtggaatgcgtggacctgctggtgggccccggcgccgcccaggccgctattaaggaagatccttggaactgctacatgtgcggccacaagggcacatacggcctgctgagacggagagaggactggcctagcagactgcagatgttcttcgccaataaccacgaccaggagttcgacccccctaaggtgtaccctcccgtccccgccgagaagagaaagcccatccgggtcctgagcctgttcgatggcatcgccaccggtctgctggtgctgaaggacctgggcatccaggtggataggtacattgcctccgaggtgtgcgaggactccatcaccgtgggaatggtgcgtcatcagggcaagatcatgtacgtgggcgacgtgcggagcgtgacacagaagcatatccaggagtggggccctttcgacctggtgatcggcggcagcccttgcaatgacctgagcatcgtgaacccagcccggaagggcctgtacgagggaaccggcagactgttcttcgagttttacagactgctgcacgacgcccggcctaaggaaggcgacgaccggcccttcttttggctgttcgagaatgtggtggccatgggagtcagcgacaagcgggatattagccggttcctggagagcaaccccgtgatgatcgatgccaaggaagtgagcgccgcccaccgggccagatacttctggggcaatctgcctggcatgaacagacccctggccagcaccgtgaacgacaagctggagctgcaggagtgcctggagcacggccggatcgccaagttcagcaaggtgagaaccatcaccacccgaagcaacagcatcaaacaaggcaaggaccagcactttcctgtgttcatgaacgagaaggaggacatcctgtggtgtaccgagatggagagagtgttcgggttcccagtccactacacagatgtcagcaacatgtctagactggccagacagagactgctgggaagaagctggtccgtccctgtgatcagacacctgttcgcccctctgaaggagtacttcgcctgcgtgagcagcggcaacagcaacgccaacagccggggccccagcttctctagcggcctggtgccactgtccctgagagggagccacatgggccccatggagatctacaaaaccgtgagcgcctggaagcggcagcctgtgcgcgtgctgagcctgtttcggaatatcgataaagtcctgaaaagcctgggattcctggagagcggctctggctccggcggtggcaccctgaagtacgtggaggatgtgacaaacgtggtcagacgggatgtggagaagtggggccccttcgatctggtgtacggcagcacccaacccctgggcagctcttgtgaccggtgccctggctggtacatgtttcagttccaccggatcctgcagtacgccctgccgagacaggagtcccagcggccattcttttggattttcatggacaacttgctgctgaccgaggatgaccaggaaactaccactcggttcctgcagaccgaagccgtgaccctgcaggacgtgagaggccgggactaccagaacgccatgcgggtgtggtccaacatccctggactgaaaagcaagcacgcacctctgacccctaaagaagaggagtacctgcaggcccaggtgcggagcagaagcaagctggacgcccctaaggtggatctgctggtgaagaattgcctcctgcccctgagagagtacttcaagtatttcagccagaatagtctgcccctgggaggcagcggcggcggcagcaaggcccccatcaccttcggcgacctggccatctacttcagccaggaggagtgggagtggctgagccccatccagaaggacctgtacgaggacgtgatgctggagaactacaggaacctggtgagcctgggcctgagcttcaggaggcccaacgtgatcaccctgctggagaagggcaaggccccctggatgatcgagcccgtgaggaggaggagggcccccgagctgaccgaggccagcggcggcccaagcagcggcgcccctcctcccagcggcggcagcccagccggctccccaacctctaccgaggagggcacctctgagtccgccacccccgagagcggccctggcacctccaccgagcccagcgagggcagcgcacccggcagccctgccggcagccccacctccacagaggagggaaccagcaccgagcccagcgaaggcagcgccccaggcaccagcaccgagcctagtgagcaggagattaaacggatcaacaagatcagaagaagacttgtgaaagacagcaacaccaagaaggccggcaagacaggccccatgaaaaccctgctggttagagtgatgacacccgatctgagagagcggctggaaaacctgagaaagaagcctgaaaatatcccccagcccatcagcaatacatctagagccaacctgaataagctgctgaccgattacaccgaaatgaagaaggcgatcctgcatgtgtactgggaagagttccagaaggaccctgtgggcctgatgagccgggtggcccagcctgccagcaagaagatcgatcagaacaagctgaaacctgagatggacgagaagggcaacctgaccaccgccggctttgcctgctctcagtgtggccagcccctgttcgtgtacaagctggagcaggtgtctgagaagggcaaggcttacaccaactacttcggacggtgcaatgtggccgagcacgaaaagctgatcctgctggcccagctgaagcccgagaaggatagcgacgaagccgtgacatatagcctgggaaagtttgggcagagggccctggatttctacagcattcatgtgaccaaggagtccacccaccccgtgaagcccctggcccagatcgccggaaacagatacgcctccggacctgtgggaaaggccctgagcgacgcatgtatgggcacaatcgcctccttcctgtctaagtaccaggacatcatcatcgaacaccagaaggtggtgaagggcaaccagaagagactggagagcctgcgggagctggccggcaaggaaaacctggaataccctagcgtgaccctgccacctcagcctcacaccaaggagggcgttgatgcctacaacgaagtgatcgcccgggtgcgaatgtgggtgaacctgaacctgtggcagaagctgaagctaagcagagatgatgccaagcctctgctgagactgaagggattcccttcctttcctctggtcgagagacaggccaacgaagtggactggtgggacatggtgtgtaacgtgaagaagctgatcaacgagaaaaaggaggatggcaaggtgttttggcagaatctggctggctacaagagacaggaagccctgagaccatacctgagcagcgaggaagatcggaagaagggaaagaaattcgctcggtaccagctgggcgacctgctgctgcacctggaaaagaagcacggcgaggactggggaaaggtgtacgacgaggcctgggagcggattgacaagaaagtggaaggcctgagcaagcacatcaagctggaagaggaacggagaagcgaggacgcccagagcaaggccgccctgaccgactggctgcgggctaaggccagcttcgtgatcgagggcctgaaggaggccgacaaggacgagttctgcagatgcgagctgaagctgcagaagtggtacggggacctgcggggaaagcccttcgccatcgaagccgagaacagcatcctggacatcagcggcttcagcaagcagtacaactgtgccttcatctggcagaaggacggcgtgaagaagctgaacctgtacctgatcatcaactacttcaagggcggcaagctgcggttcaagaagatcaaacctgaagccttcgaagccaacagattctacaccgtgatcaacaaaaagagcggcgagatcgtgcccatggaggtgaacttcaacttcgacgaccccaacctgatcatcctgcctctggcctttggcaagagacagggcagagaattcatctggaacgacctgctgtccctggaaaccggcagcctgaagctggccaacggaagagtgatcgagaagacactgtacaacagaagaacccggcaggatgagcctgccctgttcgtggccctgaccttcgagcggcgggaggtcctggactcctccaatatcaaaccaatgaacctgatcggcgtggcaagaggcgaaaacatccccgccgtgatcgccctgaccgaccccgagggctgcccactgagccggtttaaggatagcctgggaaacccaacccacatcctgagaatcggcgagagctataaggagaagcagcggaccatccaggccaagaaggaggtggagcagcggagagccggcggctacagccggaagtacgccagcaaagccaagaatctggcagacgatatggtgagaaacaccgctagagatctgctgtactacgccgtgacccaggatgccatgctgatcttcgccaacctgagccggggcttcggccggcagggcaagcggaccttcatggccgagagacagtacacacggatggaggactggctgaccgccaagctggcctacgagggcctgagcaagacctacctgtccaagacactggcccagtacacctccaagacatgcagcaactgtgggtttaccatcaccagcgccgactacgacagggtgctggagaagctgaagaagacagcaacaggctggatgaccacaattaacggcaaggagctgaaggtggagggccagattacctactacaacagatacaagagacagaacgtagtcaaggacctgtccgtcgagctggatagactgagcgaagaatctgtgaacaacgacatctcctcctggacaaagggcagaagcggagaagctctgagcctcctgaagaaaagattctcccatagacccgtgcaggagaagttcgtgtgcctgaactgcggcttcgagacacacgcagccgagcaagccgccctgaacatcgccagatcctggctgttcctgcggagccaggagtacaagaaataccagacaaacaagacaaccggcaacaccgataagagagccttcgtcgagacctggcagtccttttaccggaagaagcttaaggaggtgtggaaacctgccgtgcggtctggcggatctggcggaggctccaccagccccaagaaaaagagaaaagtctaagctgccttctgcggggcttgccttctggccatgcccttcttctctcccttgcacctgtacctcttggtctttgaataaagcctgagtaggaaggctagcaaaaaaaaaaaaaaaaaaaaaaaaaaaaaaaaaaaaaaaaaaaaaaaaaaaaaaaaaaaaaaaaaaaaaaaaaaaaaaaa

SEQ ID NO: 12134 - RNA, 5785 nt, synthetic construct
  source 1..5785: mol_type = other RNA
aggaaataagagagaaaagaagagtaagaagaaatataagagccaccatggcccctaagaagaagcgtaaagtgagccggatggaacgcctcgtctacgaggtgcggcagaagtgcagaaacatcgaggacatctgcatctcctgcggatctctgaacgtgaccctggagcacccactgttcatcggcggcatgtgccagaactgtaaaaactgttttctggagtgtgcctatcaatacgacgatgacggctaccagagctactgcaccatctgttgcggcggaagagaggtgctgatgtgtggaaataacaactgctgccggtgcttctgcgtggaatgcgtggacctgctggtgggccccggcgccgcccaggccgctattaaggaagatccttggaactgctacatgtgcggccacaagggcacatacggcctgctgagacggagagaggactggcctagcagactgcagatgttcttcgccaataaccacgaccaggagttcgacccccctaaggtgtaccctcccgtccccgccgagaagagaaagcccatccgggtcctgagcctgttcgatggcatcgccaccggtctgctggtgctgaaggacctgggcatccaggtggataggtacattgcctccgaggtgtgcgaggactccatcaccgtgggaatggtgcgtcatcagggcaagatcatgtacgtgggcgacgtgcggagcgtgacacagaagcatatccaggagtggggccctttcgacctggtgatcggcggcagcccttgcaatgacctgagcatcgtgaacccagcccggaagggcctgtacgagggaaccggcagactgttcttcgagttttacagactgctgcacgacgcccggcctaaggaaggcgacgaccggcccttcttttggctgttcgagaatgtggtggccatgggagtcagcgacaagcgggatattagccggttcctggagagcaaccccgtgatgatcgatgccaaggaagtgagcgccgcccaccgggccagatacttctggggcaatctgcctggcatgaacagacccctggccagcaccgtgaacgacaagctggagctgcaggagtgcctggagcacggccggatcgccaagttcagcaaggtgagaaccatcaccacccgaagcaacagcatcaaacaaggcaaggaccagcactttcctgtgttcatgaacgagaaggaggacatcctgtggtgtaccgagatggagagagtgttcgggttcccagtccactacacagatgtcagcaacatgtctagactggccagacagagactgctgggaagaagctggtccgtccctgtgatcagacacctgttcgcccctctgaaggagtacttcgcctgcgtgagcagcggcaacagcaacgccaacagccggggccccagcttctctagcggcctggtgccactgtccctgagagggagccacatgggccccatggagatctacaaaaccgtgagcgcctggaagcggcagcctgtgcgcgtgctgagcctgtttcggaatatcgataaagtcctgaaaagcctgggattcctggagagcggctctggctccggcggtggcaccctgaagtacgtggaggatgtgacaaacgtggtcagacgggatgtggagaagtggggccccttcgatctggtgtacggcagcacccaacccctgggcagctcttgtgaccggtgccctggctggtacatgtttcagttccaccggatcctgcagtacgccctgccgagacaggagtcccagcggccattcttttggattttcatggacaacttgctgctgaccgaggatgaccaggaaactaccactcggttcctgcagaccgaagccgtgaccctgcaggacgtgagaggccgggactaccagaacgccatgcgggtgtggtccaacatccctggactgaaaagcaagcacgcacctctgacccctaaagaagaggagtacctgcaggcccaggtgcggagcagaagcaagctggacgcccctaaggtggatctgctggtgaagaattgcctcctgcccctgagagagtacttcaagtatttcagccagaatagtctgcccctgggaggcagcggcggcggcagcaaggcccccgtgaccttcggcgacctggccatctacttcagccaggaggagtgggagtggctgagccccatccagaaggacctgtacgaggacgtgatgctggagaactacaggaacctggtgagcctgggcctgagcttcaggaggcccaacgtgatcaccctgctggagaagggcaaggccccctggatggtggagcccgtgaggaggaggagggcccccgacagcggcagcaagtgcggcggcccaagcagcggcgcccctcctcccagcggcggcagcccagccggctccccaacctctaccgaggagggcacctctgagtccgccacccccgagagcggccctggcacctccaccgagcccagcgagggcagcgcacccggcagccctgccggcagccccacctccacagaggagggaaccagcaccgagcccagcgaaggcagcgccccaggcaccagcaccgagcctagtgagcaggagattaaacggatcaacaagatcagaagaagacttgtgaaagacagcaacaccaagaaggccggcaagacaggccccatgaaaaccctgctggttagagtgatgacacccgatctgagagagcggctggaaaacctgagaaagaagcctgaaaatatcccccagcccatcagcaatacatctagagccaacctgaataagctgctgaccgattacaccgaaatgaagaaggcgatcctgcatgtgtactgggaagagttccagaaggaccctgtgggcctgatgagccgggtggcccagcctgccagcaagaagatcgatcagaacaagctgaaacctgagatggacgagaagggcaacctgaccaccgccggctttgcctgctctcagtgtggccagcccctgttcgtgtacaagctggagcaggtgtctgagaagggcaaggcttacaccaactacttcggacggtgcaatgtggccgagcacgaaaagctgatcctgctggcccagctgaagcccgagaaggatagcgacgaagccgtgacatatagcctgggaaagtttgggcagagggccctggatttctacagcattcatgtgaccaaggagtccacccaccccgtgaagcccctggcccagatcgccggaaacagatacgcctccggacctgtgggaaaggccctgagcgacgcatgtatgggcacaatcgcctccttcctgtctaagtaccaggacatcatcatcgaacaccagaaggtggtgaagggcaaccagaagagactggagagcctgcgggagctggccggcaaggaaaacctggaataccctagcgtgaccctgccacctcagcctcacaccaaggagggcgttgatgcctacaacgaagtgatcgcccgggtgcgaatgtgggtgaacctgaacctgtggcagaagctgaagctaagcagagatgatgccaagcctctgctgagactgaagggattcccttcctttcctctggtcgagagacaggccaacgaagtggactggtgggacatggtgtgtaacgtgaagaagctgatcaacgagaaaaaggaggatggcaaggtgttttggcagaatctggctggctacaagagacaggaagccctgagaccatacctgagcagcgaggaagatcggaagaagggaaagaaattcgctcggtaccagctgggcgacctgctgctgcacctggaaaagaagcacggcgaggactggggaaaggtgtacgacgaggcctgggagcggattgacaagaaagtggaaggcctgagcaagcacatcaagctggaagaggaacggagaagcgaggacgcccagagcaaggccgccctgaccgactggctgcgggctaaggccagcttcgtgatcgagggcctgaaggaggccgacaaggacgagttctgcagatgcgagctgaagctgcagaagtggtacggggacctgcggggaaagcccttcgccatcgaagccgagaacagcatcctggacatcagcggcttcagcaagcagtacaactgtgccttcatctggcagaaggacggcgtgaagaagctgaacctgtacctgatcatcaactacttcaagggcggcaagctgcggttcaagaagatcaaacctgaagccttcgaagccaacagattctacaccgtgatcaacaaaaagagcggcgagatcgtgcccatggaggtgaacttcaacttcgacgaccccaacctgatcatcctgcctctggcctttggcaagagacagggcagagaattcatctggaacgacctgctgtccctggaaaccggcagcctgaagctggccaacggaagagtgatcgagaagacactgtacaacagaagaacccggcaggatgagcctgccctgttcgtggccctgaccttcgagcggcgggaggtcctggactcctccaatatcaaaccaatgaacctgatcggcgtggcaagaggcgaaaacatccccgccgtgatcgccctgaccgaccccgagggctgcccactgagccggtttaaggatagcctgggaaacccaacccacatcctgagaatcggcgagagctataaggagaagcagcggaccatccaggccaagaaggaggtggagcagcggagagccggcggctacagccggaagtacgccagcaaagccaagaatctggcagacgatatggtgagaaacaccgctagagatctgctgtactacgccgtgacccaggatgccatgctgatcttcgccaacctgagccggggcttcggccggcagggcaagcggaccttcatggccgagagacagtacacacggatggaggactggctgaccgccaagctggcctacgagggcctgagcaagacctacctgtccaagacactggcccagtacacctccaagacatgcagcaactgtgggtttaccatcaccagcgccgactacgacagggtgctggagaagctgaagaagacagcaacaggctggatgaccacaattaacggcaaggagctgaaggtggagggccagattacctactacaacagatacaagagacagaacgtagtcaaggacctgtccgtcgagctggatagactgagcgaagaatctgtgaacaacgacatctcctcctggacaaagggcagaagcggagaagctctgagcctcctgaagaaaagattctcccatagacccgtgcaggagaagttcgtgtgcctgaactgcggcttcgagacacacgcagccgagcaagccgccctgaacatcgccagatcctggctgttcctgcggagccaggagtacaagaaataccagacaaacaagacaaccggcaacaccgataagagagccttcgtcgagacctggcagtccttttaccggaagaagcttaaggaggtgtggaaacctgccgtgcggtctggcggatctggcggaggctccaccagccccaagaaaaagagaaaagtctaagctgccttctgcggggcttgccttctggccatgcccttcttctctcccttgcacctgtacctcttggtctttgaataaagcctgagtaggaaggctagcaaaaaaaaaaaaaaaaaaaaaaaaaaaaaaaaaaaaaaaaaaaaaaaaaaaaaaaaaaaaaaaaaaaaaaaaaaaaaaaa

SEQ ID NO: 12135 - RNA, 5785 nt, synthetic construct
  source 1..5785: mol_type = other RNA
aggaaataagagagaaaagaagagtaagaagaaatataagagccaccatggcccctaagaagaagcgtaaagtgagccggatggaacgcctcgtctacgaggtgcggcagaagtgcagaaacatcgaggacatctgcatctcctgcggatctctgaacgtgaccctggagcacccactgttcatcggcggcatgtgccagaactgtaaaaactgttttctggagtgtgcctatcaatacgacgatgacggctaccagagctactgcaccatctgttgcggcggaagagaggtgctgatgtgtggaaataacaactgctgccggtgcttctgcgtggaatgcgtggacctgctggtgggccccggcgccgcccaggccgctattaaggaagatccttggaactgctacatgtgcggccacaagggcacatacggcctgctgagacggagagaggactggcctagcagactgcagatgttcttcgccaataaccacgaccaggagttcgacccccctaaggtgtaccctcccgtccccgccgagaagagaaagcccatccgggtcctgagcctgttcgatggcatcgccaccggtctgctggtgctgaaggacctgggcatccaggtggataggtacattgcctccgaggtgtgcgaggactccatcaccgtgggaatggtgcgtcatcagggcaagatcatgtacgtgggcgacgtgcggagcgtgacacagaagcatatccaggagtggggccctttcgacctggtgatcggcggcagcccttgcaatgacctgagcatcgtgaacccagcccggaagggcctgtacgagggaaccggcagactgttcttcgagttttacagactgctgcacgacgcccggcctaaggaaggcgacgaccggcccttcttttggctgttcgagaatgtggtggccatgggagtcagcgacaagcgggatattagccggttcctggagagcaaccccgtgatgatcgatgccaaggaagtgagcgccgcccaccgggccagatacttctggggcaatctgcctggcatgaacagacccctggccagcaccgtgaacgacaagctggagctgcaggagtgcctggagcacggccggatcgccaagttcagcaaggtgagaaccatcaccacccgaagcaacagcatcaaacaaggcaaggaccagcactttcctgtgttcatgaacgagaaggaggacatcctgtggtgtaccgagatggagagagtgttcgggttcccagtccactacacagatgtcagcaacatgtctagactggccagacagagactgctgggaagaagctggtccgtccctgtgatcagacacctgttcgcccctctgaaggagtacttcgcctgcgtgagcagcggcaacagcaacgccaacagccggggccccagcttctctagcggcctggtgccactgtccctgagagggagccacatgggccccatggagatctacaaaaccgtgagcgcctggaagcggcagcctgtgcgcgtgctgagcctgtttcggaatatcgataaagtcctgaaaagcctgggattcctggagagcggctctggctccggcggtggcaccctgaagtacgtggaggatgtgacaaacgtggtcagacgggatgtggagaagtggggccccttcgatctggtgtacggcagcacccaacccctgggcagctcttgtgaccggtgccctggctggtacatgtttcagttccaccggatcctgcagtacgccctgccgagacaggagtcccagcggccattcttttggattttcatggacaacttgctgctgaccgaggatgaccaggaaactaccactcggttcctgcagaccgaagccgtgaccctgcaggacgtgagaggccgggactaccagaacgccatgcgggtgtggtccaacatccctggactgaaaagcaagcacgcacctctgacccctaaagaagaggagtacctgcaggcccaggtgcggagcagaagcaagctggacgcccctaaggtggatctgctggtgaagaattgcctcctgcccctgagagagtacttcaagtatttcagccagaatagtctgcccctgggaggcagcggcggcggcatggtgagcttcgaggacgtggccgtgctgctgagccaggaggagtgggactgcctgatccccgcccagaggggcctgtacagggacgtgatgctggagacctacggcaacctggtgagcctgggcctgcaggccagcaagcccgacgtgatcagcaggctggagcagggcgacgagccctggaccacccacaccctgaggacccagggcagctggagctggaggcacaagagggagggctacggcggcccaagcagcggcgcccctcctcccagcggcggcagcccagccggctccccaacctctaccgaggagggcacctctgagtccgccacccccgagagcggccctggcacctccaccgagcccagcgagggcagcgcacccggcagccctgccggcagccccacctccacagaggagggaaccagcaccgagcccagcgaaggcagcgccccaggcaccagcaccgagcctagtgagcaggagattaaacggatcaacaagatcagaagaagacttgtgaaagacagcaacaccaagaaggccggcaagacaggccccatgaaaaccctgctggttagagtgatgacacccgatctgagagagcggctggaaaacctgagaaagaagcctgaaaatatcccccagcccatcagcaatacatctagagccaacctgaataagctgctgaccgattacaccgaaatgaagaaggcgatcctgcatgtgtactgggaagagttccagaaggaccctgtgggcctgatgagccgggtggcccagcctgccagcaagaagatcgatcagaacaagctgaaacctgagatggacgagaagggcaacctgaccaccgccggctttgcctgctctcagtgtggccagcccctgttcgtgtacaagctggagcaggtgtctgagaagggcaaggcttacaccaactacttcggacggtgcaatgtggccgagcacgaaaagctgatcctgctggcccagctgaagcccgagaaggatagcgacgaagccgtgacatatagcctgggaaagtttgggcagagggccctggatttctacagcattcatgtgaccaaggagtccacccaccccgtgaagcccctggcccagatcgccggaaacagatacgcctccggacctgtgggaaaggccctgagcgacgcatgtatgggcacaatcgcctccttcctgtctaagtaccaggacatcatcatcgaacaccagaaggtggtgaagggcaaccagaagagactggagagcctgcgggagctggccggcaaggaaaacctggaataccctagcgtgaccctgccacctcagcctcacaccaaggagggcgttgatgcctacaacgaagtgatcgcccgggtgcgaatgtgggtgaacctgaacctgtggcagaagctgaagctaagcagagatgatgccaagcctctgctgagactgaagggattcccttcctttcctctggtcgagagacaggccaacgaagtggactggtgggacatggtgtgtaacgtgaagaagctgatcaacgagaaaaaggaggatggcaaggtgttttggcagaatctggctggctacaagagacaggaagccctgagaccatacctgagcagcgaggaagatcggaagaagggaaagaaattcgctcggtaccagctgggcgacctgctgctgcacctggaaaagaagcacggcgaggactggggaaaggtgtacgacgaggcctgggagcggattgacaagaaagtggaaggcctgagcaagcacatcaagctggaagaggaacggagaagcgaggacgcccagagcaaggccgccctgaccgactggctgcgggctaaggccagcttcgtgatcgagggcctgaaggaggccgacaaggacgagttctgcagatgcgagctgaagctgcagaagtggtacggggacctgcggggaaagcccttcgccatcgaagccgagaacagcatcctggacatcagcggcttcagcaagcagtacaactgtgccttcatctggcagaaggacggcgtgaagaagctgaacctgtacctgatcatcaactacttcaagggcggcaagctgcggttcaagaagatcaaacctgaagccttcgaagccaacagattctacaccgtgatcaacaaaaagagcggcgagatcgtgcccatggaggtgaacttcaacttcgacgaccccaacctgatcatcctgcctctggcctttggcaagagacagggcagagaattcatctggaacgacctgctgtccctggaaaccggcagcctgaagctggccaacggaagagtgatcgagaagacactgtacaacagaagaacccggcaggatgagcctgccctgttcgtggccctgaccttcgagcggcgggaggtcctggactcctccaatatcaaaccaatgaacctgatcggcgtggcaagaggcgaaaacatccccgccgtgatcgccctgaccgaccccgagggctgcccactgagccggtttaaggatagcctgggaaacccaacccacatcctgagaatcggcgagagctataaggagaagcagcggaccatccaggccaagaaggaggtggagcagcggagagccggcggctacagccggaagtacgccagcaaagccaagaatctggcagacgatatggtgagaaacaccgctagagatctgctgtactacgccgtgacccaggatgccatgctgatcttcgccaacctgagccggggcttcggccggcagggcaagcggaccttcatggccgagagacagtacacacggatggaggactggctgaccgccaagctggcctacgagggcctgagcaagacctacctgtccaagacactggcccagtacacctccaagacatgcagcaactgtgggtttaccatcaccagcgccgactacgacagggtgctggagaagctgaagaagacagcaacaggctggatgaccacaattaacggcaaggagctgaaggtggagggccagattacctactacaacagatacaagagacagaacgtagtcaaggacctgtccgtcgagctggatagactgagcgaagaatctgtgaacaacgacatctcctcctggacaaagggcagaagcggagaagctctgagcctcctgaagaaaagattctcccatagacccgtgcaggagaagttcgtgtgcctgaactgcggcttcgagacacacgcagccgagcaagccgccctgaacatcgccagatcctggctgttcctgcggagccaggagtacaagaaataccagacaaacaagacaaccggcaacaccgataagagagccttcgtcgagacctggcagtccttttaccggaagaagcttaaggaggtgtggaaacctgccgtgcggtctggcggatctggcggaggctccaccagccccaagaaaaagagaaaagtctaagctgccttctgcggggcttgccttctggccatgcccttcttctctcccttgcacctgtacctcttggtctttgaataaagcctgagtaggaaggctagcaaaaaaaaaaaaaaaaaaaaaaaaaaaaaaaaaaaaaaaaaaaaaaaaaaaaaaaaaaaaaaaaaaaaaaaaaaaaaaaa

SEQ ID NO: 12136 - RNA, 5785 nt, synthetic construct
  source 1..5785: mol_type = other RNA
aggaaataagagagaaaagaagagtaagaagaaatataagagccaccatggcccctaagaagaagcgtaaagtgagccggatggaacgcctcgtctacgaggtgcggcagaagtgcagaaacatcgaggacatctgcatctcctgcggatctctgaacgtgaccctggagcacccactgttcatcggcggcatgtgccagaactgtaaaaactgttttctggagtgtgcctatcaatacgacgatgacggctaccagagctactgcaccatctgttgcggcggaagagaggtgctgatgtgtggaaataacaactgctgccggtgcttctgcgtggaatgcgtggacctgctggtgggccccggcgccgcccaggccgctattaaggaagatccttggaactgctacatgtgcggccacaagggcacatacggcctgctgagacggagagaggactggcctagcagactgcagatgttcttcgccaataaccacgaccaggagttcgacccccctaaggtgtaccctcccgtccccgccgagaagagaaagcccatccgggtcctgagcctgttcgatggcatcgccaccggtctgctggtgctgaaggacctgggcatccaggtggataggtacattgcctccgaggtgtgcgaggactccatcaccgtgggaatggtgcgtcatcagggcaagatcatgtacgtgggcgacgtgcggagcgtgacacagaagcatatccaggagtggggccctttcgacctggtgatcggcggcagcccttgcaatgacctgagcatcgtgaacccagcccggaagggcctgtacgagggaaccggcagactgttcttcgagttttacagactgctgcacgacgcccggcctaaggaaggcgacgaccggcccttcttttggctgttcgagaatgtggtggccatgggagtcagcgacaagcgggatattagccggttcctggagagcaaccccgtgatgatcgatgccaaggaagtgagcgccgcccaccgggccagatacttctggggcaatctgcctggcatgaacagacccctggccagcaccgtgaacgacaagctggagctgcaggagtgcctggagcacggccggatcgccaagttcagcaaggtgagaaccatcaccacccgaagcaacagcatcaaacaaggcaaggaccagcactttcctgtgttcatgaacgagaaggaggacatcctgtggtgtaccgagatggagagagtgttcgggttcccagtccactacacagatgtcagcaacatgtctagactggccagacagagactgctgggaagaagctggtccgtccctgtgatcagacacctgttcgcccctctgaaggagtacttcgcctgcgtgagcagcggcaacagcaacgccaacagccggggccccagcttctctagcggcctggtgccactgtccctgagagggagccacatgggccccatggagatctacaaaaccgtgagcgcctggaagcggcagcctgtgcgcgtgctgagcctgtttcggaatatcgataaagtcctgaaaagcctgggattcctggagagcggctctggctccggcggtggcaccctgaagtacgtggaggatgtgacaaacgtggtcagacgggatgtggagaagtggggccccttcgatctggtgtacggcagcacccaacccctgggcagctcttgtgaccggtgccctggctggtacatgtttcagttccaccggatcctgcagtacgccctgccgagacaggagtcccagcggccattcttttggattttcatggacaacttgctgctgaccgaggatgaccaggaaactaccactcggttcctgcagaccgaagccgtgaccctgcaggacgtgagaggccgggactaccagaacgccatgcgggtgtggtccaacatccctggactgaaaagcaagcacgcacctctgacccctaaagaagaggagtacctgcaggcccaggtgcggagcagaagcaagctggacgcccctaaggtggatctgctggtgaagaattgcctcctgcccctgagagagtacttcaagtatttcagccagaatagtctgcccctgggaggcagcggcggcggcaagcccggcgccgtgagcttcgccgacgtggccgtgtacttcagccccgaggagtggggctgcctgaggcccgcccagagggccctgtacagggacgtgatgagggagacctacggccacctgggcgccctgggcctgcccggccccaagcccgccctgatcagctggatggagggcgagagcgaggcctggaaccccgccgcccaggaccccgaggagggcgagaacctgggcggcgccctgggcggcccaagcagcggcgcccctcctcccagcggcggcagcccagccggctccccaacctctaccgaggagggcacctctgagtccgccacccccgagagcggccctggcacctccaccgagcccagcgagggcagcgcacccggcagccctgccggcagccccacctccacagaggagggaaccagcaccgagcccagcgaaggcagcgccccaggcaccagcaccgagcctagtgagcaggagattaaacggatcaacaagatcagaagaagacttgtgaaagacagcaacaccaagaaggccggcaagacaggccccatgaaaaccctgctggttagagtgatgacacccgatctgagagagcggctggaaaacctgagaaagaagcctgaaaatatcccccagcccatcagcaatacatctagagccaacctgaataagctgctgaccgattacaccgaaatgaagaaggcgatcctgcatgtgtactgggaagagttccagaaggaccctgtgggcctgatgagccgggtggcccagcctgccagcaagaagatcgatcagaacaagctgaaacctgagatggacgagaagggcaacctgaccaccgccggctttgcctgctctcagtgtggccagcccctgttcgtgtacaagctggagcaggtgtctgagaagggcaaggcttacaccaactacttcggacggtgcaatgtggccgagcacgaaaagctgatcctgctggcccagctgaagcccgagaaggatagcgacgaagccgtgacatatagcctgggaaagtttgggcagagggccctggatttctacagcattcatgtgaccaaggagtccacccaccccgtgaagcccctggcccagatcgccggaaacagatacgcctccggacctgtgggaaaggccctgagcgacgcatgtatgggcacaatcgcctccttcctgtctaagtaccaggacatcatcatcgaacaccagaaggtggtgaagggcaaccagaagagactggagagcctgcgggagctggccggcaaggaaaacctggaataccctagcgtgaccctgccacctcagcctcacaccaaggagggcgttgatgcctacaacgaagtgatcgcccgggtgcgaatgtgggtgaacctgaacctgtggcagaagctgaagctaagcagagatgatgccaagcctctgctgagactgaagggattcccttcctttcctctggtcgagagacaggccaacgaagtggactggtgggacatggtgtgtaacgtgaagaagctgatcaacgagaaaaaggaggatggcaaggtgttttggcagaatctggctggctacaagagacaggaagccctgagaccatacctgagcagcgaggaagatcggaagaagggaaagaaattcgctcggtaccagctgggcgacctgctgctgcacctggaaaagaagcacggcgaggactggggaaaggtgtacgacgaggcctgggagcggattgacaagaaagtggaaggcctgagcaagcacatcaagctggaagaggaacggagaagcgaggacgcccagagcaaggccgccctgaccgactggctgcgggctaaggccagcttcgtgatcgagggcctgaaggaggccgacaaggacgagttctgcagatgcgagctgaagctgcagaagtggtacggggacctgcggggaaagcccttcgccatcgaagccgagaacagcatcctggacatcagcggcttcagcaagcagtacaactgtgccttcatctggcagaaggacggcgtgaagaagctgaacctgtacctgatcatcaactacttcaagggcggcaagctgcggttcaagaagatcaaacctgaagccttcgaagccaacagattctacaccgtgatcaacaaaaagagcggcgagatcgtgcccatggaggtgaacttcaacttcgacgaccccaacctgatcatcctgcctctggcctttggcaagagacagggcagagaattcatctggaacgacctgctgtccctggaaaccggcagcctgaagctggccaacggaagagtgatcgagaagacactgtacaacagaagaacccggcaggatgagcctgccctgttcgtggccctgaccttcgagcggcgggaggtcctggactcctccaatatcaaaccaatgaacctgatcggcgtggcaagaggcgaaaacatccccgccgtgatcgccctgaccgaccccgagggctgcccactgagccggtttaaggatagcctgggaaacccaacccacatcctgagaatcggcgagagctataaggagaagcagcggaccatccaggccaagaaggaggtggagcagcggagagccggcggctacagccggaagtacgccagcaaagccaagaatctggcagacgatatggtgagaaacaccgctagagatctgctgtactacgccgtgacccaggatgccatgctgatcttcgccaacctgagccggggcttcggccggcagggcaagcggaccttcatggccgagagacagtacacacggatggaggactggctgaccgccaagctggcctacgagggcctgagcaagacctacctgtccaagacactggcccagtacacctccaagacatgcagcaactgtgggtttaccatcaccagcgccgactacgacagggtgctggagaagctgaagaagacagcaacaggctggatgaccacaattaacggcaaggagctgaaggtggagggccagattacctactacaacagatacaagagacagaacgtagtcaaggacctgtccgtcgagctggatagactgagcgaagaatctgtgaacaacgacatctcctcctggacaaagggcagaagcggagaagctctgagcctcctgaagaaaagattctcccatagacccgtgcaggagaagttcgtgtgcctgaactgcggcttcgagacacacgcagccgagcaagccgccctgaacatcgccagatcctggctgttcctgcggagccaggagtacaagaaataccagacaaacaagacaaccggcaacaccgataagagagccttcgtcgagacctggcagtccttttaccggaagaagcttaaggaggtgtggaaacctgccgtgcggtctggcggatctggcggaggctccaccagccccaagaaaaagagaaaagtctaagctgccttctgcggggcttgccttctggccatgcccttcttctctcccttgcacctgtacctcttggtctttgaataaagcctgagtaggaaggctagcaaaaaaaaaaaaaaaaaaaaaaaaaaaaaaaaaaaaaaaaaaaaaaaaaaaaaaaaaaaaaaaaaaaaaaaaaaaaaaaa

SEQ ID NO: 12137 - RNA, 5785 nt, synthetic construct
  source 1..5785: mol_type = other RNA
aggaaataagagagaaaagaagagtaagaagaaatataagagccaccatggcccctaagaagaagcgtaaagtgagccggatggaacgcctcgtctacgaggtgcggcagaagtgcagaaacatcgaggacatctgcatctcctgcggatctctgaacgtgaccctggagcacccactgttcatcggcggcatgtgccagaactgtaaaaactgttttctggagtgtgcctatcaatacgacgatgacggctaccagagctactgcaccatctgttgcggcggaagagaggtgctgatgtgtggaaataacaactgctgccggtgcttctgcgtggaatgcgtggacctgctggtgggccccggcgccgcccaggccgctattaaggaagatccttggaactgctacatgtgcggccacaagggcacatacggcctgctgagacggagagaggactggcctagcagactgcagatgttcttcgccaataaccacgaccaggagttcgacccccctaaggtgtaccctcccgtccccgccgagaagagaaagcccatccgggtcctgagcctgttcgatggcatcgccaccggtctgctggtgctgaaggacctgggcatccaggtggataggtacattgcctccgaggtgtgcgaggactccatcaccgtgggaatggtgcgtcatcagggcaagatcatgtacgtgggcgacgtgcggagcgtgacacagaagcatatccaggagtggggccctttcgacctggtgatcggcggcagcccttgcaatgacctgagcatcgtgaacccagcccggaagggcctgtacgagggaaccggcagactgttcttcgagttttacagactgctgcacgacgcccggcctaaggaaggcgacgaccggcccttcttttggctgttcgagaatgtggtggccatgggagtcagcgacaagcgggatattagccggttcctggagagcaaccccgtgatgatcgatgccaaggaagtgagcgccgcccaccgggccagatacttctggggcaatctgcctggcatgaacagacccctggccagcaccgtgaacgacaagctggagctgcaggagtgcctggagcacggccggatcgccaagttcagcaaggtgagaaccatcaccacccgaagcaacagcatcaaacaaggcaaggaccagcactttcctgtgttcatgaacgagaaggaggacatcctgtggtgtaccgagatggagagagtgttcgggttcccagtccactacacagatgtcagcaacatgtctagactggccagacagagactgctgggaagaagctggtccgtccctgtgatcagacacctgttcgcccctctgaaggagtacttcgcctgcgtgagcagcggcaacagcaacgccaacagccggggccccagcttctctagcggcctggtgccactgtccctgagagggagccacatgggccccatggagatctacaaaaccgtgagcgcctggaagcggcagcctgtgcgcgtgctgagcctgtttcggaatatcgataaagtcctgaaaagcctgggattcctggagagcggctctggctccggcggtggcaccctgaagtacgtggaggatgtgacaaacgtggtcagacgggatgtggagaagtggggccccttcgatctggtgtacggcagcacccaacccctgggcagctcttgtgaccggtgccctggctggtacatgtttcagttccaccggatcctgcagtacgccctgccgagacaggagtcccagcggccattcttttggattttcatggacaacttgctgctgaccgaggatgaccaggaaactaccactcggttcctgcagaccgaagccgtgaccctgcaggacgtgagaggccgggactaccagaacgccatgcgggtgtggtccaacatccctggactgaaaagcaagcacgcacctctgacccctaaagaagaggagtacctgcaggcccaggtgcggagcagaagcaagctggacgcccctaaggtggatctgctggtgaagaattgcctcctgcccctgagagagtacttcaagtatttcagccagaatagtctgcccctgggaggcagcggcggcggcttccagaggagcgtgctgttcagcgacgtgagcatcgacttcagccccgaggagtgggagtacctggacctggagcagaaggacctgtacagggacgtgatgctggagaactacagcaacctggtgagcctgggctgcttcatcagcaagcccgacgtgatcagcctgctggagcagggcaaggagccctggaaggtggtgaggaagggcaggaggcagtaccccgacctggagaccaagtacggcggcccaagcagcggcgcccctcctcccagcggcggcagcccagccggctccccaacctctaccgaggagggcacctctgagtccgccacccccgagagcggccctggcacctccaccgagcccagcgagggcagcgcacccggcagccctgccggcagccccacctccacagaggagggaaccagcaccgagcccagcgaaggcagcgccccaggcaccagcaccgagcctagtgagcaggagattaaacggatcaacaagatcagaagaagacttgtgaaagacagcaacaccaagaaggccggcaagacaggccccatgaaaaccctgctggttagagtgatgacacccgatctgagagagcggctggaaaacctgagaaagaagcctgaaaatatcccccagcccatcagcaatacatctagagccaacctgaataagctgctgaccgattacaccgaaatgaagaaggcgatcctgcatgtgtactgggaagagttccagaaggaccctgtgggcctgatgagccgggtggcccagcctgccagcaagaagatcgatcagaacaagctgaaacctgagatggacgagaagggcaacctgaccaccgccggctttgcctgctctcagtgtggccagcccctgttcgtgtacaagctggagcaggtgtctgagaagggcaaggcttacaccaactacttcggacggtgcaatgtggccgagcacgaaaagctgatcctgctggcccagctgaagcccgagaaggatagcgacgaagccgtgacatatagcctgggaaagtttgggcagagggccctggatttctacagcattcatgtgaccaaggagtccacccaccccgtgaagcccctggcccagatcgccggaaacagatacgcctccggacctgtgggaaaggccctgagcgacgcatgtatgggcacaatcgcctccttcctgtctaagtaccaggacatcatcatcgaacaccagaaggtggtgaagggcaaccagaagagactggagagcctgcgggagctggccggcaaggaaaacctggaataccctagcgtgaccctgccacctcagcctcacaccaaggagggcgttgatgcctacaacgaagtgatcgcccgggtgcgaatgtgggtgaacctgaacctgtggcagaagctgaagctaagcagagatgatgccaagcctctgctgagactgaagggattcccttcctttcctctggtcgagagacaggccaacgaagtggactggtgggacatggtgtgtaacgtgaagaagctgatcaacgagaaaaaggaggatggcaaggtgttttggcagaatctggctggctacaagagacaggaagccctgagaccatacctgagcagcgaggaagatcggaagaagggaaagaaattcgctcggtaccagctgggcgacctgctgctgcacctggaaaagaagcacggcgaggactggggaaaggtgtacgacgaggcctgggagcggattgacaagaaagtggaaggcctgagcaagcacatcaagctggaagaggaacggagaagcgaggacgcccagagcaaggccgccctgaccgactggctgcgggctaaggccagcttcgtgatcgagggcctgaaggaggccgacaaggacgagttctgcagatgcgagctgaagctgcagaagtggtacggggacctgcggggaaagcccttcgccatcgaagccgagaacagcatcctggacatcagcggcttcagcaagcagtacaactgtgccttcatctggcagaaggacggcgtgaagaagctgaacctgtacctgatcatcaactacttcaagggcggcaagctgcggttcaagaagatcaaacctgaagccttcgaagccaacagattctacaccgtgatcaacaaaaagagcggcgagatcgtgcccatggaggtgaacttcaacttcgacgaccccaacctgatcatcctgcctctggcctttggcaagagacagggcagagaattcatctggaacgacctgctgtccctggaaaccggcagcctgaagctggccaacggaagagtgatcgagaagacactgtacaacagaagaacccggcaggatgagcctgccctgttcgtggccctgaccttcgagcggcgggaggtcctggactcctccaatatcaaaccaatgaacctgatcggcgtggcaagaggcgaaaacatccccgccgtgatcgccctgaccgaccccgagggctgcccactgagccggtttaaggatagcctgggaaacccaacccacatcctgagaatcggcgagagctataaggagaagcagcggaccatccaggccaagaaggaggtggagcagcggagagccggcggctacagccggaagtacgccagcaaagccaagaatctggcagacgatatggtgagaaacaccgctagagatctgctgtactacgccgtgacccaggatgccatgctgatcttcgccaacctgagccggggcttcggccggcagggcaagcggaccttcatggccgagagacagtacacacggatggaggactggctgaccgccaagctggcctacgagggcctgagcaagacctacctgtccaagacactggcccagtacacctccaagacatgcagcaactgtgggtttaccatcaccagcgccgactacgacagggtgctggagaagctgaagaagacagcaacaggctggatgaccacaattaacggcaaggagctgaaggtggagggccagattacctactacaacagatacaagagacagaacgtagtcaaggacctgtccgtcgagctggatagactgagcgaagaatctgtgaacaacgacatctcctcctggacaaagggcagaagcggagaagctctgagcctcctgaagaaaagattctcccatagacccgtgcaggagaagttcgtgtgcctgaactgcggcttcgagacacacgcagccgagcaagccgccctgaacatcgccagatcctggctgttcctgcggagccaggagtacaagaaataccagacaaacaagacaaccggcaacaccgataagagagccttcgtcgagacctggcagtccttttaccggaagaagcttaaggaggtgtggaaacctgccgtgcggtctggcggatctggcggaggctccaccagccccaagaaaaagagaaaagtctaagctgccttctgcggggcttgccttctggccatgcccttcttctctcccttgcacctgtacctcttggtctttgaataaagcctgagtaggaaggctagcaaaaaaaaaaaaaaaaaaaaaaaaaaaaaaaaaaaaaaaaaaaaaaaaaaaaaaaaaaaaaaaaaaaaaaaaaaaaaaaa

SEQ ID NO: 12138 - RNA, 5785 nt, synthetic construct
  source 1..5785: mol_type = other RNA
aggaaataagagagaaaagaagagtaagaagaaatataagagccaccatggcccctaagaagaagcgtaaagtgagccggatggaacgcctcgtctacgaggtgcggcagaagtgcagaaacatcgaggacatctgcatctcctgcggatctctgaacgtgaccctggagcacccactgttcatcggcggcatgtgccagaactgtaaaaactgttttctggagtgtgcctatcaatacgacgatgacggctaccagagctactgcaccatctgttgcggcggaagagaggtgctgatgtgtggaaataacaactgctgccggtgcttctgcgtggaatgcgtggacctgctggtgggccccggcgccgcccaggccgctattaaggaagatccttggaactgctacatgtgcggccacaagggcacatacggcctgctgagacggagagaggactggcctagcagactgcagatgttcttcgccaataaccacgaccaggagttcgacccccctaaggtgtaccctcccgtccccgccgagaagagaaagcccatccgggtcctgagcctgttcgatggcatcgccaccggtctgctggtgctgaaggacctgggcatccaggtggataggtacattgcctccgaggtgtgcgaggactccatcaccgtgggaatggtgcgtcatcagggcaagatcatgtacgtgggcgacgtgcggagcgtgacacagaagcatatccaggagtggggccctttcgacctggtgatcggcggcagcccttgcaatgacctgagcatcgtgaacccagcccggaagggcctgtacgagggaaccggcagactgttcttcgagttttacagactgctgcacgacgcccggcctaaggaaggcgacgaccggcccttcttttggctgttcgagaatgtggtggccatgggagtcagcgacaagcgggatattagccggttcctggagagcaaccccgtgatgatcgatgccaaggaagtgagcgccgcccaccgggccagatacttctggggcaatctgcctggcatgaacagacccctggccagcaccgtgaacgacaagctggagctgcaggagtgcctggagcacggccggatcgccaagttcagcaaggtgagaaccatcaccacccgaagcaacagcatcaaacaaggcaaggaccagcactttcctgtgttcatgaacgagaaggaggacatcctgtggtgtaccgagatggagagagtgttcgggttcccagtccactacacagatgtcagcaacatgtctagactggccagacagagactgctgggaagaagctggtccgtccctgtgatcagacacctgttcgcccctctgaaggagtacttcgcctgcgtgagcagcggcaacagcaacgccaacagccggggccccagcttctctagcggcctggtgccactgtccctgagagggagccacatgggccccatggagatctacaaaaccgtgagcgcctggaagcggcagcctgtgcgcgtgctgagcctgtttcggaatatcgataaagtcctgaaaagcctgggattcctggagagcggctctggctccggcggtggcaccctgaagtacgtggaggatgtgacaaacgtggtcagacgggatgtggagaagtggggccccttcgatctggtgtacggcagcacccaacccctgggcagctcttgtgaccggtgccctggctggtacatgtttcagttccaccggatcctgcagtacgccctgccgagacaggagtcccagcggccattcttttggattttcatggacaacttgctgctgaccgaggatgaccaggaaactaccactcggttcctgcagaccgaagccgtgaccctgcaggacgtgagaggccgggactaccagaacgccatgcgggtgtggtccaacatccctggactgaaaagcaagcacgcacctctgacccctaaagaagaggagtacctgcaggcccaggtgcggagcagaagcaagctggacgcccctaaggtggatctgctggtgaagaattgcctcctgcccctgagagagtacttcaagtatttcagccagaatagtctgcccctgggaggcagcggcggcggcatggccttcgaggacgtggccgtgtacttcagccaggaggagtggggcctgctggacaccgcccagagggccctgtacaggagggtgatgctggacaacttcgccctggtggccagcctgggcctgagcaccagcaggcccagggtggtgatccagctggagaggggcgaggagccctgggtgcccagcggcaccgacaccatcctgagcaggaacacctacaggaggaggaaccccggcagcggcggcccaagcagcggcgcccctcctcccagcggcggcagcccagccggctccccaacctctaccgaggagggcacctctgagtccgccacccccgagagcggccctggcacctccaccgagcccagcgagggcagcgcacccggcagccctgccggcagccccacctccacagaggagggaaccagcaccgagcccagcgaaggcagcgccccaggcaccagcaccgagcctagtgagcaggagattaaacggatcaacaagatcagaagaagacttgtgaaagacagcaacaccaagaaggccggcaagacaggccccatgaaaaccctgctggttagagtgatgacacccgatctgagagagcggctggaaaacctgagaaagaagcctgaaaatatcccccagcccatcagcaatacatctagagccaacctgaataagctgctgaccgattacaccgaaatgaagaaggcgatcctgcatgtgtactgggaagagttccagaaggaccctgtgggcctgatgagccgggtggcccagcctgccagcaagaagatcgatcagaacaagctgaaacctgagatggacgagaagggcaacctgaccaccgccggctttgcctgctctcagtgtggccagcccctgttcgtgtacaagctggagcaggtgtctgagaagggcaaggcttacaccaactacttcggacggtgcaatgtggccgagcacgaaaagctgatcctgctggcccagctgaagcccgagaaggatagcgacgaagccgtgacatatagcctgggaaagtttgggcagagggccctggatttctacagcattcatgtgaccaaggagtccacccaccccgtgaagcccctggcccagatcgccggaaacagatacgcctccggacctgtgggaaaggccctgagcgacgcatgtatgggcacaatcgcctccttcctgtctaagtaccaggacatcatcatcgaacaccagaaggtggtgaagggcaaccagaagagactggagagcctgcgggagctggccggcaaggaaaacctggaataccctagcgtgaccctgccacctcagcctcacaccaaggagggcgttgatgcctacaacgaagtgatcgcccgggtgcgaatgtgggtgaacctgaacctgtggcagaagctgaagctaagcagagatgatgccaagcctctgctgagactgaagggattcccttcctttcctctggtcgagagacaggccaacgaagtggactggtgggacatggtgtgtaacgtgaagaagctgatcaacgagaaaaaggaggatggcaaggtgttttggcagaatctggctggctacaagagacaggaagccctgagaccatacctgagcagcgaggaagatcggaagaagggaaagaaattcgctcggtaccagctgggcgacctgctgctgcacctggaaaagaagcacggcgaggactggggaaaggtgtacgacgaggcctgggagcggattgacaagaaagtggaaggcctgagcaagcacatcaagctggaagaggaacggagaagcgaggacgcccagagcaaggccgccctgaccgactggctgcgggctaaggccagcttcgtgatcgagggcctgaaggaggccgacaaggacgagttctgcagatgcgagctgaagctgcagaagtggtacggggacctgcggggaaagcccttcgccatcgaagccgagaacagcatcctggacatcagcggcttcagcaagcagtacaactgtgccttcatctggcagaaggacggcgtgaagaagctgaacctgtacctgatcatcaactacttcaagggcggcaagctgcggttcaagaagatcaaacctgaagccttcgaagccaacagattctacaccgtgatcaacaaaaagagcggcgagatcgtgcccatggaggtgaacttcaacttcgacgaccccaacctgatcatcctgcctctggcctttggcaagagacagggcagagaattcatctggaacgacctgctgtccctggaaaccggcagcctgaagctggccaacggaagagtgatcgagaagacactgtacaacagaagaacccggcaggatgagcctgccctgttcgtggccctgaccttcgagcggcgggaggtcctggactcctccaatatcaaaccaatgaacctgatcggcgtggcaagaggcgaaaacatccccgccgtgatcgccctgaccgaccccgagggctgcccactgagccggtttaaggatagcctgggaaacccaacccacatcctgagaatcggcgagagctataaggagaagcagcggaccatccaggccaagaaggaggtggagcagcggagagccggcggctacagccggaagtacgccagcaaagccaagaatctggcagacgatatggtgagaaacaccgctagagatctgctgtactacgccgtgacccaggatgccatgctgatcttcgccaacctgagccggggcttcggccggcagggcaagcggaccttcatggccgagagacagtacacacggatggaggactggctgaccgccaagctggcctacgagggcctgagcaagacctacctgtccaagacactggcccagtacacctccaagacatgcagcaactgtgggtttaccatcaccagcgccgactacgacagggtgctggagaagctgaagaagacagcaacaggctggatgaccacaattaacggcaaggagctgaaggtggagggccagattacctactacaacagatacaagagacagaacgtagtcaaggacctgtccgtcgagctggatagactgagcgaagaatctgtgaacaacgacatctcctcctggacaaagggcagaagcggagaagctctgagcctcctgaagaaaagattctcccatagacccgtgcaggagaagttcgtgtgcctgaactgcggcttcgagacacacgcagccgagcaagccgccctgaacatcgccagatcctggctgttcctgcggagccaggagtacaagaaataccagacaaacaagacaaccggcaacaccgataagagagccttcgtcgagacctggcagtccttttaccggaagaagcttaaggaggtgtggaaacctgccgtgcggtctggcggatctggcggaggctccaccagccccaagaaaaagagaaaagtctaagctgccttctgcggggcttgccttctggccatgcccttcttctctcccttgcacctgtacctcttggtctttgaataaagcctgagtaggaaggctagcaaaaaaaaaaaaaaaaaaaaaaaaaaaaaaaaaaaaaaaaaaaaaaaaaaaaaaaaaaaaaaaaaaaaaaaaaaaaaaaa

SEQ ID NO: 12139 - RNA, 5785 nt, synthetic construct
  source 1..5785: mol_type = other RNA
aggaaataagagagaaaagaagagtaagaagaaatataagagccaccatggcccctaagaagaagcgtaaagtgagccggatggaacgcctcgtctacgaggtgcggcagaagtgcagaaacatcgaggacatctgcatctcctgcggatctctgaacgtgaccctggagcacccactgttcatcggcggcatgtgccagaactgtaaaaactgttttctggagtgtgcctatcaatacgacgatgacggctaccagagctactgcaccatctgttgcggcggaagagaggtgctgatgtgtggaaataacaactgctgccggtgcttctgcgtggaatgcgtggacctgctggtgggccccggcgccgcccaggccgctattaaggaagatccttggaactgctacatgtgcggccacaagggcacatacggcctgctgagacggagagaggactggcctagcagactgcagatgttcttcgccaataaccacgaccaggagttcgacccccctaaggtgtaccctcccgtccccgccgagaagagaaagcccatccgggtcctgagcctgttcgatggcatcgccaccggtctgctggtgctgaaggacctgggcatccaggtggataggtacattgcctccgaggtgtgcgaggactccatcaccgtgggaatggtgcgtcatcagggcaagatcatgtacgtgggcgacgtgcggagcgtgacacagaagcatatccaggagtggggccctttcgacctggtgatcggcggcagcccttgcaatgacctgagcatcgtgaacccagcccggaagggcctgtacgagggaaccggcagactgttcttcgagttttacagactgctgcacgacgcccggcctaaggaaggcgacgaccggcccttcttttggctgttcgagaatgtggtggccatgggagtcagcgacaagcgggatattagccggttcctggagagcaaccccgtgatgatcgatgccaaggaagtgagcgccgcccaccgggccagatacttctggggcaatctgcctggcatgaacagacccctggccagcaccgtgaacgacaagctggagctgcaggagtgcctggagcacggccggatcgccaagttcagcaaggtgagaaccatcaccacccgaagcaacagcatcaaacaaggcaaggaccagcactttcctgtgttcatgaacgagaaggaggacatcctgtggtgtaccgagatggagagagtgttcgggttcccagtccactacacagatgtcagcaacatgtctagactggccagacagagactgctgggaagaagctggtccgtccctgtgatcagacacctgttcgcccctctgaaggagtacttcgcctgcgtgagcagcggcaacagcaacgccaacagccggggccccagcttctctagcggcctggtgccactgtccctgagagggagccacatgggccccatggagatctacaaaaccgtgagcgcctggaagcggcagcctgtgcgcgtgctgagcctgtttcggaatatcgataaagtcctgaaaagcctgggattcctggagagcggctctggctccggcggtggcaccctgaagtacgtggaggatgtgacaaacgtggtcagacgggatgtggagaagtggggccccttcgatctggtgtacggcagcacccaacccctgggcagctcttgtgaccggtgccctggctggtacatgtttcagttccaccggatcctgcagtacgccctgccgagacaggagtcccagcggccattcttttggattttcatggacaacttgctgctgaccgaggatgaccaggaaactaccactcggttcctgcagaccgaagccgtgaccctgcaggacgtgagaggccgggactaccagaacgccatgcgggtgtggtccaacatccctggactgaaaagcaagcacgcacctctgacccctaaagaagaggagtacctgcaggcccaggtgcggagcagaagcaagctggacgcccctaaggtggatctgctggtgaagaattgcctcctgcccctgagagagtacttcaagtatttcagccagaatagtctgcccctgggaggcagcggcggcggcgtgcaggagcccgtgaccttcaaggacgtggccgtggacttcacccaggaggagtggggccagctggacctggtgcagaggaccctgtacagggacgtgatgctggagacctacggccacctgctgagcgtgggcaaccagatcgccaagcccgaggtgatcagcctgctggagcagggcgaggagccctggagcatggagcaggcctgcccccagaggacctgccccgagtggatgaggaacggcggcccaagcagcggcgcccctcctcccagcggcggcagcccagccggctccccaacctctaccgaggagggcacctctgagtccgccacccccgagagcggccctggcacctccaccgagcccagcgagggcagcgcacccggcagccctgccggcagccccacctccacagaggagggaaccagcaccgagcccagcgaaggcagcgccccaggcaccagcaccgagcctagtgagcaggagattaaacggatcaacaagatcagaagaagacttgtgaaagacagcaacaccaagaaggccggcaagacaggccccatgaaaaccctgctggttagagtgatgacacccgatctgagagagcggctggaaaacctgagaaagaagcctgaaaatatcccccagcccatcagcaatacatctagagccaacctgaataagctgctgaccgattacaccgaaatgaagaaggcgatcctgcatgtgtactgggaagagttccagaaggaccctgtgggcctgatgagccgggtggcccagcctgccagcaagaagatcgatcagaacaagctgaaacctgagatggacgagaagggcaacctgaccaccgccggctttgcctgctctcagtgtggccagcccctgttcgtgtacaagctggagcaggtgtctgagaagggcaaggcttacaccaactacttcggacggtgcaatgtggccgagcacgaaaagctgatcctgctggcccagctgaagcccgagaaggatagcgacgaagccgtgacatatagcctgggaaagtttgggcagagggccctggatttctacagcattcatgtgaccaaggagtccacccaccccgtgaagcccctggcccagatcgccggaaacagatacgcctccggacctgtgggaaaggccctgagcgacgcatgtatgggcacaatcgcctccttcctgtctaagtaccaggacatcatcatcgaacaccagaaggtggtgaagggcaaccagaagagactggagagcctgcgggagctggccggcaaggaaaacctggaataccctagcgtgaccctgccacctcagcctcacaccaaggagggcgttgatgcctacaacgaagtgatcgcccgggtgcgaatgtgggtgaacctgaacctgtggcagaagctgaagctaagcagagatgatgccaagcctctgctgagactgaagggattcccttcctttcctctggtcgagagacaggccaacgaagtggactggtgggacatggtgtgtaacgtgaagaagctgatcaacgagaaaaaggaggatggcaaggtgttttggcagaatctggctggctacaagagacaggaagccctgagaccatacctgagcagcgaggaagatcggaagaagggaaagaaattcgctcggtaccagctgggcgacctgctgctgcacctggaaaagaagcacggcgaggactggggaaaggtgtacgacgaggcctgggagcggattgacaagaaagtggaaggcctgagcaagcacatcaagctggaagaggaacggagaagcgaggacgcccagagcaaggccgccctgaccgactggctgcgggctaaggccagcttcgtgatcgagggcctgaaggaggccgacaaggacgagttctgcagatgcgagctgaagctgcagaagtggtacggggacctgcggggaaagcccttcgccatcgaagccgagaacagcatcctggacatcagcggcttcagcaagcagtacaactgtgccttcatctggcagaaggacggcgtgaagaagctgaacctgtacctgatcatcaactacttcaagggcggcaagctgcggttcaagaagatcaaacctgaagccttcgaagccaacagattctacaccgtgatcaacaaaaagagcggcgagatcgtgcccatggaggtgaacttcaacttcgacgaccccaacctgatcatcctgcctctggcctttggcaagagacagggcagagaattcatctggaacgacctgctgtccctggaaaccggcagcctgaagctggccaacggaagagtgatcgagaagacactgtacaacagaagaacccggcaggatgagcctgccctgttcgtggccctgaccttcgagcggcgggaggtcctggactcctccaatatcaaaccaatgaacctgatcggcgtggcaagaggcgaaaacatccccgccgtgatcgccctgaccgaccccgagggctgcccactgagccggtttaaggatagcctgggaaacccaacccacatcctgagaatcggcgagagctataaggagaagcagcggaccatccaggccaagaaggaggtggagcagcggagagccggcggctacagccggaagtacgccagcaaagccaagaatctggcagacgatatggtgagaaacaccgctagagatctgctgtactacgccgtgacccaggatgccatgctgatcttcgccaacctgagccggggcttcggccggcagggcaagcggaccttcatggccgagagacagtacacacggatggaggactggctgaccgccaagctggcctacgagggcctgagcaagacctacctgtccaagacactggcccagtacacctccaagacatgcagcaactgtgggtttaccatcaccagcgccgactacgacagggtgctggagaagctgaagaagacagcaacaggctggatgaccacaattaacggcaaggagctgaaggtggagggccagattacctactacaacagatacaagagacagaacgtagtcaaggacctgtccgtcgagctggatagactgagcgaagaatctgtgaacaacgacatctcctcctggacaaagggcagaagcggagaagctctgagcctcctgaagaaaagattctcccatagacccgtgcaggagaagttcgtgtgcctgaactgcggcttcgagacacacgcagccgagcaagccgccctgaacatcgccagatcctggctgttcctgcggagccaggagtacaagaaataccagacaaacaagacaaccggcaacaccgataagagagccttcgtcgagacctggcagtccttttaccggaagaagcttaaggaggtgtggaaacctgccgtgcggtctggcggatctggcggaggctccaccagccccaagaaaaagagaaaagtctaagctgccttctgcggggcttgccttctggccatgcccttcttctctcccttgcacctgtacctcttggtctttgaataaagcctgagtaggaaggctagcaaaaaaaaaaaaaaaaaaaaaaaaaaaaaaaaaaaaaaaaaaaaaaaaaaaaaaaaaaaaaaaaaaaaaaaaaaaaaaaa

SEQ ID NO: 12140 - RNA, 5785 nt, synthetic construct
  source 1..5785: mol_type = other RNA
aggaaataagagagaaaagaagagtaagaagaaatataagagccaccatggcccctaagaagaagcgtaaagtgagccggatggaacgcctcgtctacgaggtgcggcagaagtgcagaaacatcgaggacatctgcatctcctgcggatctctgaacgtgaccctggagcacccactgttcatcggcggcatgtgccagaactgtaaaaactgttttctggagtgtgcctatcaatacgacgatgacggctaccagagctactgcaccatctgttgcggcggaagagaggtgctgatgtgtggaaataacaactgctgccggtgcttctgcgtggaatgcgtggacctgctggtgggccccggcgccgcccaggccgctattaaggaagatccttggaactgctacatgtgcggccacaagggcacatacggcctgctgagacggagagaggactggcctagcagactgcagatgttcttcgccaataaccacgaccaggagttcgacccccctaaggtgtaccctcccgtccccgccgagaagagaaagcccatccgggtcctgagcctgttcgatggcatcgccaccggtctgctggtgctgaaggacctgggcatccaggtggataggtacattgcctccgaggtgtgcgaggactccatcaccgtgggaatggtgcgtcatcagggcaagatcatgtacgtgggcgacgtgcggagcgtgacacagaagcatatccaggagtggggccctttcgacctggtgatcggcggcagcccttgcaatgacctgagcatcgtgaacccagcccggaagggcctgtacgagggaaccggcagactgttcttcgagttttacagactgctgcacgacgcccggcctaaggaaggcgacgaccggcccttcttttggctgttcgagaatgtggtggccatgggagtcagcgacaagcgggatattagccggttcctggagagcaaccccgtgatgatcgatgccaaggaagtgagcgccgcccaccgggccagatacttctggggcaatctgcctggcatgaacagacccctggccagcaccgtgaacgacaagctggagctgcaggagtgcctggagcacggccggatcgccaagttcagcaaggtgagaaccatcaccacccgaagcaacagcatcaaacaaggcaaggaccagcactttcctgtgttcatgaacgagaaggaggacatcctgtggtgtaccgagatggagagagtgttcgggttcccagtccactacacagatgtcagcaacatgtctagactggccagacagagactgctgggaagaagctggtccgtccctgtgatcagacacctgttcgcccctctgaaggagtacttcgcctgcgtgagcagcggcaacagcaacgccaacagccggggccccagcttctctagcggcctggtgccactgtccctgagagggagccacatgggccccatggagatctacaaaaccgtgagcgcctggaagcggcagcctgtgcgcgtgctgagcctgtttcggaatatcgataaagtcctgaaaagcctgggattcctggagagcggctctggctccggcggtggcaccctgaagtacgtggaggatgtgacaaacgtggtcagacgggatgtggagaagtggggccccttcgatctggtgtacggcagcacccaacccctgggcagctcttgtgaccggtgccctggctggtacatgtttcagttccaccggatcctgcagtacgccctgccgagacaggagtcccagcggccattcttttggattttcatggacaacttgctgctgaccgaggatgaccaggaaactaccactcggttcctgcagaccgaagccgtgaccctgcaggacgtgagaggccgggactaccagaacgccatgcgggtgtggtccaacatccctggactgaaaagcaagcacgcacctctgacccctaaagaagaggagtacctgcaggcccaggtgcggagcagaagcaagctggacgcccctaaggtggatctgctggtgaagaattgcctcctgcccctgagagagtacttcaagtatttcagccagaatagtctgcccctgggaggcagcggcggcggcatgagccagggcagcgtgaccttcagggacgtggccatcgacttcagccaggaggagtggaagtggctgcagcccgcccagagggacctgtacaggtgcgtgatgctggagaactacggccacctggtgagcctgggcctgagcatcagcaagcccgacgtggtgagcctgctggagcagggcaaggagccctggctgggcaagaggaacgtgaacagggacctgttcagcgtgagcgagagcggcggcccaagcagcggcgcccctcctcccagcggcggcagcccagccggctccccaacctctaccgaggagggcacctctgagtccgccacccccgagagcggccctggcacctccaccgagcccagcgagggcagcgcacccggcagccctgccggcagccccacctccacagaggagggaaccagcaccgagcccagcgaaggcagcgccccaggcaccagcaccgagcctagtgagcaggagattaaacggatcaacaagatcagaagaagacttgtgaaagacagcaacaccaagaaggccggcaagacaggccccatgaaaaccctgctggttagagtgatgacacccgatctgagagagcggctggaaaacctgagaaagaagcctgaaaatatcccccagcccatcagcaatacatctagagccaacctgaataagctgctgaccgattacaccgaaatgaagaaggcgatcctgcatgtgtactgggaagagttccagaaggaccctgtgggcctgatgagccgggtggcccagcctgccagcaagaagatcgatcagaacaagctgaaacctgagatggacgagaagggcaacctgaccaccgccggctttgcctgctctcagtgtggccagcccctgttcgtgtacaagctggagcaggtgtctgagaagggcaaggcttacaccaactacttcggacggtgcaatgtggccgagcacgaaaagctgatcctgctggcccagctgaagcccgagaaggatagcgacgaagccgtgacatatagcctgggaaagtttgggcagagggccctggatttctacagcattcatgtgaccaaggagtccacccaccccgtgaagcccctggcccagatcgccggaaacagatacgcctccggacctgtgggaaaggccctgagcgacgcatgtatgggcacaatcgcctccttcctgtctaagtaccaggacatcatcatcgaacaccagaaggtggtgaagggcaaccagaagagactggagagcctgcgggagctggccggcaaggaaaacctggaataccctagcgtgaccctgccacctcagcctcacaccaaggagggcgttgatgcctacaacgaagtgatcgcccgggtgcgaatgtgggtgaacctgaacctgtggcagaagctgaagctaagcagagatgatgccaagcctctgctgagactgaagggattcccttcctttcctctggtcgagagacaggccaacgaagtggactggtgggacatggtgtgtaacgtgaagaagctgatcaacgagaaaaaggaggatggcaaggtgttttggcagaatctggctggctacaagagacaggaagccctgagaccatacctgagcagcgaggaagatcggaagaagggaaagaaattcgctcggtaccagctgggcgacctgctgctgcacctggaaaagaagcacggcgaggactggggaaaggtgtacgacgaggcctgggagcggattgacaagaaagtggaaggcctgagcaagcacatcaagctggaagaggaacggagaagcgaggacgcccagagcaaggccgccctgaccgactggctgcgggctaaggccagcttcgtgatcgagggcctgaaggaggccgacaaggacgagttctgcagatgcgagctgaagctgcagaagtggtacggggacctgcggggaaagcccttcgccatcgaagccgagaacagcatcctggacatcagcggcttcagcaagcagtacaactgtgccttcatctggcagaaggacggcgtgaagaagctgaacctgtacctgatcatcaactacttcaagggcggcaagctgcggttcaagaagatcaaacctgaagccttcgaagccaacagattctacaccgtgatcaacaaaaagagcggcgagatcgtgcccatggaggtgaacttcaacttcgacgaccccaacctgatcatcctgcctctggcctttggcaagagacagggcagagaattcatctggaacgacctgctgtccctggaaaccggcagcctgaagctggccaacggaagagtgatcgagaagacactgtacaacagaagaacccggcaggatgagcctgccctgttcgtggccctgaccttcgagcggcgggaggtcctggactcctccaatatcaaaccaatgaacctgatcggcgtggcaagaggcgaaaacatccccgccgtgatcgccctgaccgaccccgagggctgcccactgagccggtttaaggatagcctgggaaacccaacccacatcctgagaatcggcgagagctataaggagaagcagcggaccatccaggccaagaaggaggtggagcagcggagagccggcggctacagccggaagtacgccagcaaagccaagaatctggcagacgatatggtgagaaacaccgctagagatctgctgtactacgccgtgacccaggatgccatgctgatcttcgccaacctgagccggggcttcggccggcagggcaagcggaccttcatggccgagagacagtacacacggatggaggactggctgaccgccaagctggcctacgagggcctgagcaagacctacctgtccaagacactggcccagtacacctccaagacatgcagcaactgtgggtttaccatcaccagcgccgactacgacagggtgctggagaagctgaagaagacagcaacaggctggatgaccacaattaacggcaaggagctgaaggtggagggccagattacctactacaacagatacaagagacagaacgtagtcaaggacctgtccgtcgagctggatagactgagcgaagaatctgtgaacaacgacatctcctcctggacaaagggcagaagcggagaagctctgagcctcctgaagaaaagattctcccatagacccgtgcaggagaagttcgtgtgcctgaactgcggcttcgagacacacgcagccgagcaagccgccctgaacatcgccagatcctggctgttcctgcggagccaggagtacaagaaataccagacaaacaagacaaccggcaacaccgataagagagccttcgtcgagacctggcagtccttttaccggaagaagcttaaggaggtgtggaaacctgccgtgcggtctggcggatctggcggaggctccaccagccccaagaaaaagagaaaagtctaagctgccttctgcggggcttgccttctggccatgcccttcttctctcccttgcacctgtacctcttggtctttgaataaagcctgagtaggaaggctagcaaaaaaaaaaaaaaaaaaaaaaaaaaaaaaaaaaaaaaaaaaaaaaaaaaaaaaaaaaaaaaaaaaaaaaaaaaaaaaaa

SEQ ID NO: 12141 - RNA, 5785 nt, synthetic construct
  source 1..5785: mol_type = other RNA
aggaaataagagagaaaagaagagtaagaagaaatataagagccaccatggcccctaagaagaagcgtaaagtgagccggatggaacgcctcgtctacgaggtgcggcagaagtgcagaaacatcgaggacatctgcatctcctgcggatctctgaacgtgaccctggagcacccactgttcatcggcggcatgtgccagaactgtaaaaactgttttctggagtgtgcctatcaatacgacgatgacggctaccagagctactgcaccatctgttgcggcggaagagaggtgctgatgtgtggaaataacaactgctgccggtgcttctgcgtggaatgcgtggacctgctggtgggccccggcgccgcccaggccgctattaaggaagatccttggaactgctacatgtgcggccacaagggcacatacggcctgctgagacggagagaggactggcctagcagactgcagatgttcttcgccaataaccacgaccaggagttcgacccccctaaggtgtaccctcccgtccccgccgagaagagaaagcccatccgggtcctgagcctgttcgatggcatcgccaccggtctgctggtgctgaaggacctgggcatccaggtggataggtacattgcctccgaggtgtgcgaggactccatcaccgtgggaatggtgcgtcatcagggcaagatcatgtacgtgggcgacgtgcggagcgtgacacagaagcatatccaggagtggggccctttcgacctggtgatcggcggcagcccttgcaatgacctgagcatcgtgaacccagcccggaagggcctgtacgagggaaccggcagactgttcttcgagttttacagactgctgcacgacgcccggcctaaggaaggcgacgaccggcccttcttttggctgttcgagaatgtggtggccatgggagtcagcgacaagcgggatattagccggttcctggagagcaaccccgtgatgatcgatgccaaggaagtgagcgccgcccaccgggccagatacttctggggcaatctgcctggcatgaacagacccctggccagcaccgtgaacgacaagctggagctgcaggagtgcctggagcacggccggatcgccaagttcagcaaggtgagaaccatcaccacccgaagcaacagcatcaaacaaggcaaggaccagcactttcctgtgttcatgaacgagaaggaggacatcctgtggtgtaccgagatggagagagtgttcgggttcccagtccactacacagatgtcagcaacatgtctagactggccagacagagactgctgggaagaagctggtccgtccctgtgatcagacacctgttcgcccctctgaaggagtacttcgcctgcgtgagcagcggcaacagcaacgccaacagccggggccccagcttctctagcggcctggtgccactgtccctgagagggagccacatgggccccatggagatctacaaaaccgtgagcgcctggaagcggcagcctgtgcgcgtgctgagcctgtttcggaatatcgataaagtcctgaaaagcctgggattcctggagagcggctctggctccggcggtggcaccctgaagtacgtggaggatgtgacaaacgtggtcagacgggatgtggagaagtggggccccttcgatctggtgtacggcagcacccaacccctgggcagctcttgtgaccggtgccctggctggtacatgtttcagttccaccggatcctgcagtacgccctgccgagacaggagtcccagcggccattcttttggattttcatggacaacttgctgctgaccgaggatgaccaggaaactaccactcggttcctgcagaccgaagccgtgaccctgcaggacgtgagaggccgggactaccagaacgccatgcgggtgtggtccaacatccctggactgaaaagcaagcacgcacctctgacccctaaagaagaggagtacctgcaggcccaggtgcggagcagaagcaagctggacgcccctaaggtggatctgctggtgaagaattgcctcctgcccctgagagagtacttcaagtatttcagccagaatagtctgcccctgggaggcagcggcggcggctggcccgagagcgtgaccttcgaggacgtggccgtgtacttcacccagaaccagtgggccagcctggaccccgcccagagggccctgtacggcgaggtgatgctggagaactacgccaacgtggccagcctggtggccttccccttccccaagcccgccctgatcagccacctggagaggggcgaggccccctggggccccgacccctgggacaccgagatccccaggggcatcagccagggcggcggcccaagcagcggcgcccctcctcccagcggcggcagcccagccggctccccaacctctaccgaggagggcacctctgagtccgccacccccgagagcggccctggcacctccaccgagcccagcgagggcagcgcacccggcagccctgccggcagccccacctccacagaggagggaaccagcaccgagcccagcgaaggcagcgccccaggcaccagcaccgagcctagtgagcaggagattaaacggatcaacaagatcagaagaagacttgtgaaagacagcaacaccaagaaggccggcaagacaggccccatgaaaaccctgctggttagagtgatgacacccgatctgagagagcggctggaaaacctgagaaagaagcctgaaaatatcccccagcccatcagcaatacatctagagccaacctgaataagctgctgaccgattacaccgaaatgaagaaggcgatcctgcatgtgtactgggaagagttccagaaggaccctgtgggcctgatgagccgggtggcccagcctgccagcaagaagatcgatcagaacaagctgaaacctgagatggacgagaagggcaacctgaccaccgccggctttgcctgctctcagtgtggccagcccctgttcgtgtacaagctggagcaggtgtctgagaagggcaaggcttacaccaactacttcggacggtgcaatgtggccgagcacgaaaagctgatcctgctggcccagctgaagcccgagaaggatagcgacgaagccgtgacatatagcctgggaaagtttgggcagagggccctggatttctacagcattcatgtgaccaaggagtccacccaccccgtgaagcccctggcccagatcgccggaaacagatacgcctccggacctgtgggaaaggccctgagcgacgcatgtatgggcacaatcgcctccttcctgtctaagtaccaggacatcatcatcgaacaccagaaggtggtgaagggcaaccagaagagactggagagcctgcgggagctggccggcaaggaaaacctggaataccctagcgtgaccctgccacctcagcctcacaccaaggagggcgttgatgcctacaacgaagtgatcgcccgggtgcgaatgtgggtgaacctgaacctgtggcagaagctgaagctaagcagagatgatgccaagcctctgctgagactgaagggattcccttcctttcctctggtcgagagacaggccaacgaagtggactggtgggacatggtgtgtaacgtgaagaagctgatcaacgagaaaaaggaggatggcaaggtgttttggcagaatctggctggctacaagagacaggaagccctgagaccatacctgagcagcgaggaagatcggaagaagggaaagaaattcgctcggtaccagctgggcgacctgctgctgcacctggaaaagaagcacggcgaggactggggaaaggtgtacgacgaggcctgggagcggattgacaagaaagtggaaggcctgagcaagcacatcaagctggaagaggaacggagaagcgaggacgcccagagcaaggccgccctgaccgactggctgcgggctaaggccagcttcgtgatcgagggcctgaaggaggccgacaaggacgagttctgcagatgcgagctgaagctgcagaagtggtacggggacctgcggggaaagcccttcgccatcgaagccgagaacagcatcctggacatcagcggcttcagcaagcagtacaactgtgccttcatctggcagaaggacggcgtgaagaagctgaacctgtacctgatcatcaactacttcaagggcggcaagctgcggttcaagaagatcaaacctgaagccttcgaagccaacagattctacaccgtgatcaacaaaaagagcggcgagatcgtgcccatggaggtgaacttcaacttcgacgaccccaacctgatcatcctgcctctggcctttggcaagagacagggcagagaattcatctggaacgacctgctgtccctggaaaccggcagcctgaagctggccaacggaagagtgatcgagaagacactgtacaacagaagaacccggcaggatgagcctgccctgttcgtggccctgaccttcgagcggcgggaggtcctggactcctccaatatcaaaccaatgaacctgatcggcgtggcaagaggcgaaaacatccccgccgtgatcgccctgaccgaccccgagggctgcccactgagccggtttaaggatagcctgggaaacccaacccacatcctgagaatcggcgagagctataaggagaagcagcggaccatccaggccaagaaggaggtggagcagcggagagccggcggctacagccggaagtacgccagcaaagccaagaatctggcagacgatatggtgagaaacaccgctagagatctgctgtactacgccgtgacccaggatgccatgctgatcttcgccaacctgagccggggcttcggccggcagggcaagcggaccttcatggccgagagacagtacacacggatggaggactggctgaccgccaagctggcctacgagggcctgagcaagacctacctgtccaagacactggcccagtacacctccaagacatgcagcaactgtgggtttaccatcaccagcgccgactacgacagggtgctggagaagctgaagaagacagcaacaggctggatgaccacaattaacggcaaggagctgaaggtggagggccagattacctactacaacagatacaagagacagaacgtagtcaaggacctgtccgtcgagctggatagactgagcgaagaatctgtgaacaacgacatctcctcctggacaaagggcagaagcggagaagctctgagcctcctgaagaaaagattctcccatagacccgtgcaggagaagttcgtgtgcctgaactgcggcttcgagacacacgcagccgagcaagccgccctgaacatcgccagatcctggctgttcctgcggagccaggagtacaagaaataccagacaaacaagacaaccggcaacaccgataagagagccttcgtcgagacctggcagtccttttaccggaagaagcttaaggaggtgtggaaacctgccgtgcggtctggcggatctggcggaggctccaccagccccaagaaaaagagaaaagtctaagctgccttctgcggggcttgccttctggccatgcccttcttctctcccttgcacctgtacctcttggtctttgaataaagcctgagtaggaaggctagcaaaaaaaaaaaaaaaaaaaaaaaaaaaaaaaaaaaaaaaaaaaaaaaaaaaaaaaaaaaaaaaaaaaaaaaaaaaaaaaa

SEQ ID NO: 12142 - RNA, 5785 nt, synthetic construct
  source 1..5785: mol_type = other RNA
aggaaataagagagaaaagaagagtaagaagaaatataagagccaccatggcccctaagaagaagcgtaaagtgagccggatggaacgcctcgtctacgaggtgcggcagaagtgcagaaacatcgaggacatctgcatctcctgcggatctctgaacgtgaccctggagcacccactgttcatcggcggcatgtgccagaactgtaaaaactgttttctggagtgtgcctatcaatacgacgatgacggctaccagagctactgcaccatctgttgcggcggaagagaggtgctgatgtgtggaaataacaactgctgccggtgcttctgcgtggaatgcgtggacctgctggtgggccccggcgccgcccaggccgctattaaggaagatccttggaactgctacatgtgcggccacaagggcacatacggcctgctgagacggagagaggactggcctagcagactgcagatgttcttcgccaataaccacgaccaggagttcgacccccctaaggtgtaccctcccgtccccgccgagaagagaaagcccatccgggtcctgagcctgttcgatggcatcgccaccggtctgctggtgctgaaggacctgggcatccaggtggataggtacattgcctccgaggtgtgcgaggactccatcaccgtgggaatggtgcgtcatcagggcaagatcatgtacgtgggcgacgtgcggagcgtgacacagaagcatatccaggagtggggccctttcgacctggtgatcggcggcagcccttgcaatgacctgagcatcgtgaacccagcccggaagggcctgtacgagggaaccggcagactgttcttcgagttttacagactgctgcacgacgcccggcctaaggaaggcgacgaccggcccttcttttggctgttcgagaatgtggtggccatgggagtcagcgacaagcgggatattagccggttcctggagagcaaccccgtgatgatcgatgccaaggaagtgagcgccgcccaccgggccagatacttctggggcaatctgcctggcatgaacagacccctggccagcaccgtgaacgacaagctggagctgcaggagtgcctggagcacggccggatcgccaagttcagcaaggtgagaaccatcaccacccgaagcaacagcatcaaacaaggcaaggaccagcactttcctgtgttcatgaacgagaaggaggacatcctgtggtgtaccgagatggagagagtgttcgggttcccagtccactacacagatgtcagcaacatgtctagactggccagacagagactgctgggaagaagctggtccgtccctgtgatcagacacctgttcgcccctctgaaggagtacttcgcctgcgtgagcagcggcaacagcaacgccaacagccggggccccagcttctctagcggcctggtgccactgtccctgagagggagccacatgggccccatggagatctacaaaaccgtgagcgcctggaagcggcagcctgtgcgcgtgctgagcctgtttcggaatatcgataaagtcctgaaaagcctgggattcctggagagcggctctggctccggcggtggcaccctgaagtacgtggaggatgtgacaaacgtggtcagacgggatgtggagaagtggggccccttcgatctggtgtacggcagcacccaacccctgggcagctcttgtgaccggtgccctggctggtacatgtttcagttccaccggatcctgcagtacgccctgccgagacaggagtcccagcggccattcttttggattttcatggacaacttgctgctgaccgaggatgaccaggaaactaccactcggttcctgcagaccgaagccgtgaccctgcaggacgtgagaggccgggactaccagaacgccatgcgggtgtggtccaacatccctggactgaaaagcaagcacgcacctctgacccctaaagaagaggagtacctgcaggcccaggtgcggagcagaagcaagctggacgcccctaaggtggatctgctggtgaagaattgcctcctgcccctgagagagtacttcaagtatttcagccagaatagtctgcccctgggaggcagcggcggcggcgcccacagcatggtgatgttcagggacgtgaccgtggacttcagccaggaggagtgggagtgcctgagcagctacgagagggacctgtacagggacgtgatgctggagaactacagccacctggtgagcctgggctgcagcatcagcaagcccgacgtgatcaccctgctggagcagggcaaggagccctggatgatcgtgagggccgagaagaggaggtggagcagggacctggagagcaggggcggcccaagcagcggcgcccctcctcccagcggcggcagcccagccggctccccaacctctaccgaggagggcacctctgagtccgccacccccgagagcggccctggcacctccaccgagcccagcgagggcagcgcacccggcagccctgccggcagccccacctccacagaggagggaaccagcaccgagcccagcgaaggcagcgccccaggcaccagcaccgagcctagtgagcaggagattaaacggatcaacaagatcagaagaagacttgtgaaagacagcaacaccaagaaggccggcaagacaggccccatgaaaaccctgctggttagagtgatgacacccgatctgagagagcggctggaaaacctgagaaagaagcctgaaaatatcccccagcccatcagcaatacatctagagccaacctgaataagctgctgaccgattacaccgaaatgaagaaggcgatcctgcatgtgtactgggaagagttccagaaggaccctgtgggcctgatgagccgggtggcccagcctgccagcaagaagatcgatcagaacaagctgaaacctgagatggacgagaagggcaacctgaccaccgccggctttgcctgctctcagtgtggccagcccctgttcgtgtacaagctggagcaggtgtctgagaagggcaaggcttacaccaactacttcggacggtgcaatgtggccgagcacgaaaagctgatcctgctggcccagctgaagcccgagaaggatagcgacgaagccgtgacatatagcctgggaaagtttgggcagagggccctggatttctacagcattcatgtgaccaaggagtccacccaccccgtgaagcccctggcccagatcgccggaaacagatacgcctccggacctgtgggaaaggccctgagcgacgcatgtatgggcacaatcgcctccttcctgtctaagtaccaggacatcatcatcgaacaccagaaggtggtgaagggcaaccagaagagactggagagcctgcgggagctggccggcaaggaaaacctggaataccctagcgtgaccctgccacctcagcctcacaccaaggagggcgttgatgcctacaacgaagtgatcgcccgggtgcgaatgtgggtgaacctgaacctgtggcagaagctgaagctaagcagagatgatgccaagcctctgctgagactgaagggattcccttcctttcctctggtcgagagacaggccaacgaagtggactggtgggacatggtgtgtaacgtgaagaagctgatcaacgagaaaaaggaggatggcaaggtgttttggcagaatctggctggctacaagagacaggaagccctgagaccatacctgagcagcgaggaagatcggaagaagggaaagaaattcgctcggtaccagctgggcgacctgctgctgcacctggaaaagaagcacggcgaggactggggaaaggtgtacgacgaggcctgggagcggattgacaagaaagtggaaggcctgagcaagcacatcaagctggaagaggaacggagaagcgaggacgcccagagcaaggccgccctgaccgactggctgcgggctaaggccagcttcgtgatcgagggcctgaaggaggccgacaaggacgagttctgcagatgcgagctgaagctgcagaagtggtacggggacctgcggggaaagcccttcgccatcgaagccgagaacagcatcctggacatcagcggcttcagcaagcagtacaactgtgccttcatctggcagaaggacggcgtgaagaagctgaacctgtacctgatcatcaactacttcaagggcggcaagctgcggttcaagaagatcaaacctgaagccttcgaagccaacagattctacaccgtgatcaacaaaaagagcggcgagatcgtgcccatggaggtgaacttcaacttcgacgaccccaacctgatcatcctgcctctggcctttggcaagagacagggcagagaattcatctggaacgacctgctgtccctggaaaccggcagcctgaagctggccaacggaagagtgatcgagaagacactgtacaacagaagaacccggcaggatgagcctgccctgttcgtggccctgaccttcgagcggcgggaggtcctggactcctccaatatcaaaccaatgaacctgatcggcgtggcaagaggcgaaaacatccccgccgtgatcgccctgaccgaccccgagggctgcccactgagccggtttaaggatagcctgggaaacccaacccacatcctgagaatcggcgagagctataaggagaagcagcggaccatccaggccaagaaggaggtggagcagcggagagccggcggctacagccggaagtacgccagcaaagccaagaatctggcagacgatatggtgagaaacaccgctagagatctgctgtactacgccgtgacccaggatgccatgctgatcttcgccaacctgagccggggcttcggccggcagggcaagcggaccttcatggccgagagacagtacacacggatggaggactggctgaccgccaagctggcctacgagggcctgagcaagacctacctgtccaagacactggcccagtacacctccaagacatgcagcaactgtgggtttaccatcaccagcgccgactacgacagggtgctggagaagctgaagaagacagcaacaggctggatgaccacaattaacggcaaggagctgaaggtggagggccagattacctactacaacagatacaagagacagaacgtagtcaaggacctgtccgtcgagctggatagactgagcgaagaatctgtgaacaacgacatctcctcctggacaaagggcagaagcggagaagctctgagcctcctgaagaaaagattctcccatagacccgtgcaggagaagttcgtgtgcctgaactgcggcttcgagacacacgcagccgagcaagccgccctgaacatcgccagatcctggctgttcctgcggagccaggagtacaagaaataccagacaaacaagacaaccggcaacaccgataagagagccttcgtcgagacctggcagtccttttaccggaagaagcttaaggaggtgtggaaacctgccgtgcggtctggcggatctggcggaggctccaccagccccaagaaaaagagaaaagtctaagctgccttctgcggggcttgccttctggccatgcccttcttctctcccttgcacctgtacctcttggtctttgaataaagcctgagtaggaaggctagcaaaaaaaaaaaaaaaaaaaaaaaaaaaaaaaaaaaaaaaaaaaaaaaaaaaaaaaaaaaaaaaaaaaaaaaaaaaaaaaa

SEQ ID NO: 12143 - RNA, 5785 nt, synthetic construct
  source 1..5785: mol_type = other RNA
aggaaataagagagaaaagaagagtaagaagaaatataagagccaccatggcccctaagaagaagcgtaaagtgagccggatggaacgcctcgtctacgaggtgcggcagaagtgcagaaacatcgaggacatctgcatctcctgcggatctctgaacgtgaccctggagcacccactgttcatcggcggcatgtgccagaactgtaaaaactgttttctggagtgtgcctatcaatacgacgatgacggctaccagagctactgcaccatctgttgcggcggaagagaggtgctgatgtgtggaaataacaactgctgccggtgcttctgcgtggaatgcgtggacctgctggtgggccccggcgccgcccaggccgctattaaggaagatccttggaactgctacatgtgcggccacaagggcacatacggcctgctgagacggagagaggactggcctagcagactgcagatgttcttcgccaataaccacgaccaggagttcgacccccctaaggtgtaccctcccgtccccgccgagaagagaaagcccatccgggtcctgagcctgttcgatggcatcgccaccggtctgctggtgctgaaggacctgggcatccaggtggataggtacattgcctccgaggtgtgcgaggactccatcaccgtgggaatggtgcgtcatcagggcaagatcatgtacgtgggcgacgtgcggagcgtgacacagaagcatatccaggagtggggccctttcgacctggtgatcggcggcagcccttgcaatgacctgagcatcgtgaacccagcccggaagggcctgtacgagggaaccggcagactgttcttcgagttttacagactgctgcacgacgcccggcctaaggaaggcgacgaccggcccttcttttggctgttcgagaatgtggtggccatgggagtcagcgacaagcgggatattagccggttcctggagagcaaccccgtgatgatcgatgccaaggaagtgagcgccgcccaccgggccagatacttctggggcaatctgcctggcatgaacagacccctggccagcaccgtgaacgacaagctggagctgcaggagtgcctggagcacggccggatcgccaagttcagcaaggtgagaaccatcaccacccgaagcaacagcatcaaacaaggcaaggaccagcactttcctgtgttcatgaacgagaaggaggacatcctgtggtgtaccgagatggagagagtgttcgggttcccagtccactacacagatgtcagcaacatgtctagactggccagacagagactgctgggaagaagctggtccgtccctgtgatcagacacctgttcgcccctctgaaggagtacttcgcctgcgtgagcagcggcaacagcaacgccaacagccggggccccagcttctctagcggcctggtgccactgtccctgagagggagccacatgggccccatggagatctacaaaaccgtgagcgcctggaagcggcagcctgtgcgcgtgctgagcctgtttcggaatatcgataaagtcctgaaaagcctgggattcctggagagcggctctggctccggcggtggcaccctgaagtacgtggaggatgtgacaaacgtggtcagacgggatgtggagaagtggggccccttcgatctggtgtacggcagcacccaacccctgggcagctcttgtgaccggtgccctggctggtacatgtttcagttccaccggatcctgcagtacgccctgccgagacaggagtcccagcggccattcttttggattttcatggacaacttgctgctgaccgaggatgaccaggaaactaccactcggttcctgcagaccgaagccgtgaccctgcaggacgtgagaggccgggactaccagaacgccatgcgggtgtggtccaacatccctggactgaaaagcaagcacgcacctctgacccctaaagaagaggagtacctgcaggcccaggtgcggagcagaagcaagctggacgcccctaaggtggatctgctggtgaagaattgcctcctgcccctgagagagtacttcaagtatttcagccagaatagtctgcccctgggaggcagcggcggcggcagcaaggcccccgtgaccttcggcgacctggccatctacttcagccaggaggagtgggagtggctgagccccaaccagaaggacctgtacgaggacgtgatgctggagaactaccacaacctggtgagcgtgggcctggcctgcaggaggcccaacatcatcgccctgctggagaagggcaaggccccctggatggtggagcccagcaggaagaggaggggccccgagctgggcagcaaggacggcggcccaagcagcggcgcccctcctcccagcggcggcagcccagccggctccccaacctctaccgaggagggcacctctgagtccgccacccccgagagcggccctggcacctccaccgagcccagcgagggcagcgcacccggcagccctgccggcagccccacctccacagaggagggaaccagcaccgagcccagcgaaggcagcgccccaggcaccagcaccgagcctagtgagcaggagattaaacggatcaacaagatcagaagaagacttgtgaaagacagcaacaccaagaaggccggcaagacaggccccatgaaaaccctgctggttagagtgatgacacccgatctgagagagcggctggaaaacctgagaaagaagcctgaaaatatcccccagcccatcagcaatacatctagagccaacctgaataagctgctgaccgattacaccgaaatgaagaaggcgatcctgcatgtgtactgggaagagttccagaaggaccctgtgggcctgatgagccgggtggcccagcctgccagcaagaagatcgatcagaacaagctgaaacctgagatggacgagaagggcaacctgaccaccgccggctttgcctgctctcagtgtggccagcccctgttcgtgtacaagctggagcaggtgtctgagaagggcaaggcttacaccaactacttcggacggtgcaatgtggccgagcacgaaaagctgatcctgctggcccagctgaagcccgagaaggatagcgacgaagccgtgacatatagcctgggaaagtttgggcagagggccctggatttctacagcattcatgtgaccaaggagtccacccaccccgtgaagcccctggcccagatcgccggaaacagatacgcctccggacctgtgggaaaggccctgagcgacgcatgtatgggcacaatcgcctccttcctgtctaagtaccaggacatcatcatcgaacaccagaaggtggtgaagggcaaccagaagagactggagagcctgcgggagctggccggcaaggaaaacctggaataccctagcgtgaccctgccacctcagcctcacaccaaggagggcgttgatgcctacaacgaagtgatcgcccgggtgcgaatgtgggtgaacctgaacctgtggcagaagctgaagctaagcagagatgatgccaagcctctgctgagactgaagggattcccttcctttcctctggtcgagagacaggccaacgaagtggactggtgggacatggtgtgtaacgtgaagaagctgatcaacgagaaaaaggaggatggcaaggtgttttggcagaatctggctggctacaagagacaggaagccctgagaccatacctgagcagcgaggaagatcggaagaagggaaagaaattcgctcggtaccagctgggcgacctgctgctgcacctggaaaagaagcacggcgaggactggggaaaggtgtacgacgaggcctgggagcggattgacaagaaagtggaaggcctgagcaagcacatcaagctggaagaggaacggagaagcgaggacgcccagagcaaggccgccctgaccgactggctgcgggctaaggccagcttcgtgatcgagggcctgaaggaggccgacaaggacgagttctgcagatgcgagctgaagctgcagaagtggtacggggacctgcggggaaagcccttcgccatcgaagccgagaacagcatcctggacatcagcggcttcagcaagcagtacaactgtgccttcatctggcagaaggacggcgtgaagaagctgaacctgtacctgatcatcaactacttcaagggcggcaagctgcggttcaagaagatcaaacctgaagccttcgaagccaacagattctacaccgtgatcaacaaaaagagcggcgagatcgtgcccatggaggtgaacttcaacttcgacgaccccaacctgatcatcctgcctctggcctttggcaagagacagggcagagaattcatctggaacgacctgctgtccctggaaaccggcagcctgaagctggccaacggaagagtgatcgagaagacactgtacaacagaagaacccggcaggatgagcctgccctgttcgtggccctgaccttcgagcggcgggaggtcctggactcctccaatatcaaaccaatgaacctgatcggcgtggcaagaggcgaaaacatccccgccgtgatcgccctgaccgaccccgagggctgcccactgagccggtttaaggatagcctgggaaacccaacccacatcctgagaatcggcgagagctataaggagaagcagcggaccatccaggccaagaaggaggtggagcagcggagagccggcggctacagccggaagtacgccagcaaagccaagaatctggcagacgatatggtgagaaacaccgctagagatctgctgtactacgccgtgacccaggatgccatgctgatcttcgccaacctgagccggggcttcggccggcagggcaagcggaccttcatggccgagagacagtacacacggatggaggactggctgaccgccaagctggcctacgagggcctgagcaagacctacctgtccaagacactggcccagtacacctccaagacatgcagcaactgtgggtttaccatcaccagcgccgactacgacagggtgctggagaagctgaagaagacagcaacaggctggatgaccacaattaacggcaaggagctgaaggtggagggccagattacctactacaacagatacaagagacagaacgtagtcaaggacctgtccgtcgagctggatagactgagcgaagaatctgtgaacaacgacatctcctcctggacaaagggcagaagcggagaagctctgagcctcctgaagaaaagattctcccatagacccgtgcaggagaagttcgtgtgcctgaactgcggcttcgagacacacgcagccgagcaagccgccctgaacatcgccagatcctggctgttcctgcggagccaggagtacaagaaataccagacaaacaagacaaccggcaacaccgataagagagccttcgtcgagacctggcagtccttttaccggaagaagcttaaggaggtgtggaaacctgccgtgcggtctggcggatctggcggaggctccaccagccccaagaaaaagagaaaagtctaagctgccttctgcggggcttgccttctggccatgcccttcttctctcccttgcacctgtacctcttggtctttgaataaagcctgagtaggaaggctagcaaaaaaaaaaaaaaaaaaaaaaaaaaaaaaaaaaaaaaaaaaaaaaaaaaaaaaaaaaaaaaaaaaaaaaaaaaaaaaaa

SEQ ID NO: 12144 - RNA, 5785 nt, synthetic construct
  source 1..5785: mol_type = other RNA
aggaaataagagagaaaagaagagtaagaagaaatataagagccaccatggcccctaagaagaagcgtaaagtgagccggatggaacgcctcgtctacgaggtgcggcagaagtgcagaaacatcgaggacatctgcatctcctgcggatctctgaacgtgaccctggagcacccactgttcatcggcggcatgtgccagaactgtaaaaactgttttctggagtgtgcctatcaatacgacgatgacggctaccagagctactgcaccatctgttgcggcggaagagaggtgctgatgtgtggaaataacaactgctgccggtgcttctgcgtggaatgcgtggacctgctggtgggccccggcgccgcccaggccgctattaaggaagatccttggaactgctacatgtgcggccacaagggcacatacggcctgctgagacggagagaggactggcctagcagactgcagatgttcttcgccaataaccacgaccaggagttcgacccccctaaggtgtaccctcccgtccccgccgagaagagaaagcccatccgggtcctgagcctgttcgatggcatcgccaccggtctgctggtgctgaaggacctgggcatccaggtggataggtacattgcctccgaggtgtgcgaggactccatcaccgtgggaatggtgcgtcatcagggcaagatcatgtacgtgggcgacgtgcggagcgtgacacagaagcatatccaggagtggggccctttcgacctggtgatcggcggcagcccttgcaatgacctgagcatcgtgaacccagcccggaagggcctgtacgagggaaccggcagactgttcttcgagttttacagactgctgcacgacgcccggcctaaggaaggcgacgaccggcccttcttttggctgttcgagaatgtggtggccatgggagtcagcgacaagcgggatattagccggttcctggagagcaaccccgtgatgatcgatgccaaggaagtgagcgccgcccaccgggccagatacttctggggcaatctgcctggcatgaacagacccctggccagcaccgtgaacgacaagctggagctgcaggagtgcctggagcacggccggatcgccaagttcagcaaggtgagaaccatcaccacccgaagcaacagcatcaaacaaggcaaggaccagcactttcctgtgttcatgaacgagaaggaggacatcctgtggtgtaccgagatggagagagtgttcgggttcccagtccactacacagatgtcagcaacatgtctagactggccagacagagactgctgggaagaagctggtccgtccctgtgatcagacacctgttcgcccctctgaaggagtacttcgcctgcgtgagcagcggcaacagcaacgccaacagccggggccccagcttctctagcggcctggtgccactgtccctgagagggagccacatgggccccatggagatctacaaaaccgtgagcgcctggaagcggcagcctgtgcgcgtgctgagcctgtttcggaatatcgataaagtcctgaaaagcctgggattcctggagagcggctctggctccggcggtggcaccctgaagtacgtggaggatgtgacaaacgtggtcagacgggatgtggagaagtggggccccttcgatctggtgtacggcagcacccaacccctgggcagctcttgtgaccggtgccctggctggtacatgtttcagttccaccggatcctgcagtacgccctgccgagacaggagtcccagcggccattcttttggattttcatggacaacttgctgctgaccgaggatgaccaggaaactaccactcggttcctgcagaccgaagccgtgaccctgcaggacgtgagaggccgggactaccagaacgccatgcgggtgtggtccaacatccctggactgaaaagcaagcacgcacctctgacccctaaagaagaggagtacctgcaggcccaggtgcggagcagaagcaagctggacgcccctaaggtggatctgctggtgaagaattgcctcctgcccctgagagagtacttcaagtatttcagccagaatagtctgcccctgggaggcagcggcggcggcatggtgagcttcgaggacgtggccgtgctgctgagccaggaggagtgggactgcctgatccccgcccagaggggcctgtacagggacgtgatgctggagacctacggcaacctggtgagcctgggcctgcaggccagcaagcccgacgtgatcagcaggctggagcagggcgacgagccctggaccccccacatcctgaggacccagaggagctggagctggaggcacaagagggagtgctacggcggcccaagcagcggcgcccctcctcccagcggcggcagcccagccggctccccaacctctaccgaggagggcacctctgagtccgccacccccgagagcggccctggcacctccaccgagcccagcgagggcagcgcacccggcagccctgccggcagccccacctccacagaggagggaaccagcaccgagcccagcgaaggcagcgccccaggcaccagcaccgagcctagtgagcaggagattaaacggatcaacaagatcagaagaagacttgtgaaagacagcaacaccaagaaggccggcaagacaggccccatgaaaaccctgctggttagagtgatgacacccgatctgagagagcggctggaaaacctgagaaagaagcctgaaaatatcccccagcccatcagcaatacatctagagccaacctgaataagctgctgaccgattacaccgaaatgaagaaggcgatcctgcatgtgtactgggaagagttccagaaggaccctgtgggcctgatgagccgggtggcccagcctgccagcaagaagatcgatcagaacaagctgaaacctgagatggacgagaagggcaacctgaccaccgccggctttgcctgctctcagtgtggccagcccctgttcgtgtacaagctggagcaggtgtctgagaagggcaaggcttacaccaactacttcggacggtgcaatgtggccgagcacgaaaagctgatcctgctggcccagctgaagcccgagaaggatagcgacgaagccgtgacatatagcctgggaaagtttgggcagagggccctggatttctacagcattcatgtgaccaaggagtccacccaccccgtgaagcccctggcccagatcgccggaaacagatacgcctccggacctgtgggaaaggccctgagcgacgcatgtatgggcacaatcgcctccttcctgtctaagtaccaggacatcatcatcgaacaccagaaggtggtgaagggcaaccagaagagactggagagcctgcgggagctggccggcaaggaaaacctggaataccctagcgtgaccctgccacctcagcctcacaccaaggagggcgttgatgcctacaacgaagtgatcgcccgggtgcgaatgtgggtgaacctgaacctgtggcagaagctgaagctaagcagagatgatgccaagcctctgctgagactgaagggattcccttcctttcctctggtcgagagacaggccaacgaagtggactggtgggacatggtgtgtaacgtgaagaagctgatcaacgagaaaaaggaggatggcaaggtgttttggcagaatctggctggctacaagagacaggaagccctgagaccatacctgagcagcgaggaagatcggaagaagggaaagaaattcgctcggtaccagctgggcgacctgctgctgcacctggaaaagaagcacggcgaggactggggaaaggtgtacgacgaggcctgggagcggattgacaagaaagtggaaggcctgagcaagcacatcaagctggaagaggaacggagaagcgaggacgcccagagcaaggccgccctgaccgactggctgcgggctaaggccagcttcgtgatcgagggcctgaaggaggccgacaaggacgagttctgcagatgcgagctgaagctgcagaagtggtacggggacctgcggggaaagcccttcgccatcgaagccgagaacagcatcctggacatcagcggcttcagcaagcagtacaactgtgccttcatctggcagaaggacggcgtgaagaagctgaacctgtacctgatcatcaactacttcaagggcggcaagctgcggttcaagaagatcaaacctgaagccttcgaagccaacagattctacaccgtgatcaacaaaaagagcggcgagatcgtgcccatggaggtgaacttcaacttcgacgaccccaacctgatcatcctgcctctggcctttggcaagagacagggcagagaattcatctggaacgacctgctgtccctggaaaccggcagcctgaagctggccaacggaagagtgatcgagaagacactgtacaacagaagaacccggcaggatgagcctgccctgttcgtggccctgaccttcgagcggcgggaggtcctggactcctccaatatcaaaccaatgaacctgatcggcgtggcaagaggcgaaaacatccccgccgtgatcgccctgaccgaccccgagggctgcccactgagccggtttaaggatagcctgggaaacccaacccacatcctgagaatcggcgagagctataaggagaagcagcggaccatccaggccaagaaggaggtggagcagcggagagccggcggctacagccggaagtacgccagcaaagccaagaatctggcagacgatatggtgagaaacaccgctagagatctgctgtactacgccgtgacccaggatgccatgctgatcttcgccaacctgagccggggcttcggccggcagggcaagcggaccttcatggccgagagacagtacacacggatggaggactggctgaccgccaagctggcctacgagggcctgagcaagacctacctgtccaagacactggcccagtacacctccaagacatgcagcaactgtgggtttaccatcaccagcgccgactacgacagggtgctggagaagctgaagaagacagcaacaggctggatgaccacaattaacggcaaggagctgaaggtggagggccagattacctactacaacagatacaagagacagaacgtagtcaaggacctgtccgtcgagctggatagactgagcgaagaatctgtgaacaacgacatctcctcctggacaaagggcagaagcggagaagctctgagcctcctgaagaaaagattctcccatagacccgtgcaggagaagttcgtgtgcctgaactgcggcttcgagacacacgcagccgagcaagccgccctgaacatcgccagatcctggctgttcctgcggagccaggagtacaagaaataccagacaaacaagacaaccggcaacaccgataagagagccttcgtcgagacctggcagtccttttaccggaagaagcttaaggaggtgtggaaacctgccgtgcggtctggcggatctggcggaggctccaccagccccaagaaaaagagaaaagtctaagctgccttctgcggggcttgccttctggccatgcccttcttctctcccttgcacctgtacctcttggtctttgaataaagcctgagtaggaaggctagcaaaaaaaaaaaaaaaaaaaaaaaaaaaaaaaaaaaaaaaaaaaaaaaaaaaaaaaaaaaaaaaaaaaaaaaaaaaaaaaa

SEQ ID NO: 12145 - RNA, 5785 nt, synthetic construct
  source 1..5785: mol_type = other RNA
aggaaataagagagaaaagaagagtaagaagaaatataagagccaccatggcccctaagaagaagcgtaaagtgagccggatggaacgcctcgtctacgaggtgcggcagaagtgcagaaacatcgaggacatctgcatctcctgcggatctctgaacgtgaccctggagcacccactgttcatcggcggcatgtgccagaactgtaaaaactgttttctggagtgtgcctatcaatacgacgatgacggctaccagagctactgcaccatctgttgcggcggaagagaggtgctgatgtgtggaaataacaactgctgccggtgcttctgcgtggaatgcgtggacctgctggtgggccccggcgccgcccaggccgctattaaggaagatccttggaactgctacatgtgcggccacaagggcacatacggcctgctgagacggagagaggactggcctagcagactgcagatgttcttcgccaataaccacgaccaggagttcgacccccctaaggtgtaccctcccgtccccgccgagaagagaaagcccatccgggtcctgagcctgttcgatggcatcgccaccggtctgctggtgctgaaggacctgggcatccaggtggataggtacattgcctccgaggtgtgcgaggactccatcaccgtgggaatggtgcgtcatcagggcaagatcatgtacgtgggcgacgtgcggagcgtgacacagaagcatatccaggagtggggccctttcgacctggtgatcggcggcagcccttgcaatgacctgagcatcgtgaacccagcccggaagggcctgtacgagggaaccggcagactgttcttcgagttttacagactgctgcacgacgcccggcctaaggaaggcgacgaccggcccttcttttggctgttcgagaatgtggtggccatgggagtcagcgacaagcgggatattagccggttcctggagagcaaccccgtgatgatcgatgccaaggaagtgagcgccgcccaccgggccagatacttctggggcaatctgcctggcatgaacagacccctggccagcaccgtgaacgacaagctggagctgcaggagtgcctggagcacggccggatcgccaagttcagcaaggtgagaaccatcaccacccgaagcaacagcatcaaacaaggcaaggaccagcactttcctgtgttcatgaacgagaaggaggacatcctgtggtgtaccgagatggagagagtgttcgggttcccagtccactacacagatgtcagcaacatgtctagactggccagacagagactgctgggaagaagctggtccgtccctgtgatcagacacctgttcgcccctctgaaggagtacttcgcctgcgtgagcagcggcaacagcaacgccaacagccggggccccagcttctctagcggcctggtgccactgtccctgagagggagccacatgggccccatggagatctacaaaaccgtgagcgcctggaagcggcagcctgtgcgcgtgctgagcctgtttcggaatatcgataaagtcctgaaaagcctgggattcctggagagcggctctggctccggcggtggcaccctgaagtacgtggaggatgtgacaaacgtggtcagacgggatgtggagaagtggggccccttcgatctggtgtacggcagcacccaacccctgggcagctcttgtgaccggtgccctggctggtacatgtttcagttccaccggatcctgcagtacgccctgccgagacaggagtcccagcggccattcttttggattttcatggacaacttgctgctgaccgaggatgaccaggaaactaccactcggttcctgcagaccgaagccgtgaccctgcaggacgtgagaggccgggactaccagaacgccatgcgggtgtggtccaacatccctggactgaaaagcaagcacgcacctctgacccctaaagaagaggagtacctgcaggcccaggtgcggagcagaagcaagctggacgcccctaaggtggatctgctggtgaagaattgcctcctgcccctgagagagtacttcaagtatttcagccagaatagtctgcccctgggaggcagcggcggcggcccccagaagagcgtgaccttcgaggacgtggccgtgtacttcacccagaccgagtgggacggcctgagccccgcccagagggccctgtacagggacgtgatgctggagaactacggcaacgtggccagcctgggcttcagcctgctgaagcccgccgtgatcagccagctggagggcgccggcgagctggagggccccagccccctggccgccggcaccgagatcggcccccagggcctgtggggcggcccaagcagcggcgcccctcctcccagcggcggcagcccagccggctccccaacctctaccgaggagggcacctctgagtccgccacccccgagagcggccctggcacctccaccgagcccagcgagggcagcgcacccggcagccctgccggcagccccacctccacagaggagggaaccagcaccgagcccagcgaaggcagcgccccaggcaccagcaccgagcctagtgagcaggagattaaacggatcaacaagatcagaagaagacttgtgaaagacagcaacaccaagaaggccggcaagacaggccccatgaaaaccctgctggttagagtgatgacacccgatctgagagagcggctggaaaacctgagaaagaagcctgaaaatatcccccagcccatcagcaatacatctagagccaacctgaataagctgctgaccgattacaccgaaatgaagaaggcgatcctgcatgtgtactgggaagagttccagaaggaccctgtgggcctgatgagccgggtggcccagcctgccagcaagaagatcgatcagaacaagctgaaacctgagatggacgagaagggcaacctgaccaccgccggctttgcctgctctcagtgtggccagcccctgttcgtgtacaagctggagcaggtgtctgagaagggcaaggcttacaccaactacttcggacggtgcaatgtggccgagcacgaaaagctgatcctgctggcccagctgaagcccgagaaggatagcgacgaagccgtgacatatagcctgggaaagtttgggcagagggccctggatttctacagcattcatgtgaccaaggagtccacccaccccgtgaagcccctggcccagatcgccggaaacagatacgcctccggacctgtgggaaaggccctgagcgacgcatgtatgggcacaatcgcctccttcctgtctaagtaccaggacatcatcatcgaacaccagaaggtggtgaagggcaaccagaagagactggagagcctgcgggagctggccggcaaggaaaacctggaataccctagcgtgaccctgccacctcagcctcacaccaaggagggcgttgatgcctacaacgaagtgatcgcccgggtgcgaatgtgggtgaacctgaacctgtggcagaagctgaagctaagcagagatgatgccaagcctctgctgagactgaagggattcccttcctttcctctggtcgagagacaggccaacgaagtggactggtgggacatggtgtgtaacgtgaagaagctgatcaacgagaaaaaggaggatggcaaggtgttttggcagaatctggctggctacaagagacaggaagccctgagaccatacctgagcagcgaggaagatcggaagaagggaaagaaattcgctcggtaccagctgggcgacctgctgctgcacctggaaaagaagcacggcgaggactggggaaaggtgtacgacgaggcctgggagcggattgacaagaaagtggaaggcctgagcaagcacatcaagctggaagaggaacggagaagcgaggacgcccagagcaaggccgccctgaccgactggctgcgggctaaggccagcttcgtgatcgagggcctgaaggaggccgacaaggacgagttctgcagatgcgagctgaagctgcagaagtggtacggggacctgcggggaaagcccttcgccatcgaagccgagaacagcatcctggacatcagcggcttcagcaagcagtacaactgtgccttcatctggcagaaggacggcgtgaagaagctgaacctgtacctgatcatcaactacttcaagggcggcaagctgcggttcaagaagatcaaacctgaagccttcgaagccaacagattctacaccgtgatcaacaaaaagagcggcgagatcgtgcccatggaggtgaacttcaacttcgacgaccccaacctgatcatcctgcctctggcctttggcaagagacagggcagagaattcatctggaacgacctgctgtccctggaaaccggcagcctgaagctggccaacggaagagtgatcgagaagacactgtacaacagaagaacccggcaggatgagcctgccctgttcgtggccctgaccttcgagcggcgggaggtcctggactcctccaatatcaaaccaatgaacctgatcggcgtggcaagaggcgaaaacatccccgccgtgatcgccctgaccgaccccgagggctgcccactgagccggtttaaggatagcctgggaaacccaacccacatcctgagaatcggcgagagctataaggagaagcagcggaccatccaggccaagaaggaggtggagcagcggagagccggcggctacagccggaagtacgccagcaaagccaagaatctggcagacgatatggtgagaaacaccgctagagatctgctgtactacgccgtgacccaggatgccatgctgatcttcgccaacctgagccggggcttcggccggcagggcaagcggaccttcatggccgagagacagtacacacggatggaggactggctgaccgccaagctggcctacgagggcctgagcaagacctacctgtccaagacactggcccagtacacctccaagacatgcagcaactgtgggtttaccatcaccagcgccgactacgacagggtgctggagaagctgaagaagacagcaacaggctggatgaccacaattaacggcaaggagctgaaggtggagggccagattacctactacaacagatacaagagacagaacgtagtcaaggacctgtccgtcgagctggatagactgagcgaagaatctgtgaacaacgacatctcctcctggacaaagggcagaagcggagaagctctgagcctcctgaagaaaagattctcccatagacccgtgcaggagaagttcgtgtgcctgaactgcggcttcgagacacacgcagccgagcaagccgccctgaacatcgccagatcctggctgttcctgcggagccaggagtacaagaaataccagacaaacaagacaaccggcaacaccgataagagagccttcgtcgagacctggcagtccttttaccggaagaagcttaaggaggtgtggaaacctgccgtgcggtctggcggatctggcggaggctccaccagccccaagaaaaagagaaaagtctaagctgccttctgcggggcttgccttctggccatgcccttcttctctcccttgcacctgtacctcttggtctttgaataaagcctgagtaggaaggctagcaaaaaaaaaaaaaaaaaaaaaaaaaaaaaaaaaaaaaaaaaaaaaaaaaaaaaaaaaaaaaaaaaaaaaaaaaaaaaaaa

SEQ ID NO: 12146 - RNA, 5785 nt, synthetic construct
  source 1..5785: mol_type = other RNA
aggaaataagagagaaaagaagagtaagaagaaatataagagccaccatggcccctaagaagaagcgtaaagtgagccggatggaacgcctcgtctacgaggtgcggcagaagtgcagaaacatcgaggacatctgcatctcctgcggatctctgaacgtgaccctggagcacccactgttcatcggcggcatgtgccagaactgtaaaaactgttttctggagtgtgcctatcaatacgacgatgacggctaccagagctactgcaccatctgttgcggcggaagagaggtgctgatgtgtggaaataacaactgctgccggtgcttctgcgtggaatgcgtggacctgctggtgggccccggcgccgcccaggccgctattaaggaagatccttggaactgctacatgtgcggccacaagggcacatacggcctgctgagacggagagaggactggcctagcagactgcagatgttcttcgccaataaccacgaccaggagttcgacccccctaaggtgtaccctcccgtccccgccgagaagagaaagcccatccgggtcctgagcctgttcgatggcatcgccaccggtctgctggtgctgaaggacctgggcatccaggtggataggtacattgcctccgaggtgtgcgaggactccatcaccgtgggaatggtgcgtcatcagggcaagatcatgtacgtgggcgacgtgcggagcgtgacacagaagcatatccaggagtggggccctttcgacctggtgatcggcggcagcccttgcaatgacctgagcatcgtgaacccagcccggaagggcctgtacgagggaaccggcagactgttcttcgagttttacagactgctgcacgacgcccggcctaaggaaggcgacgaccggcccttcttttggctgttcgagaatgtggtggccatgggagtcagcgacaagcgggatattagccggttcctggagagcaaccccgtgatgatcgatgccaaggaagtgagcgccgcccaccgggccagatacttctggggcaatctgcctggcatgaacagacccctggccagcaccgtgaacgacaagctggagctgcaggagtgcctggagcacggccggatcgccaagttcagcaaggtgagaaccatcaccacccgaagcaacagcatcaaacaaggcaaggaccagcactttcctgtgttcatgaacgagaaggaggacatcctgtggtgtaccgagatggagagagtgttcgggttcccagtccactacacagatgtcagcaacatgtctagactggccagacagagactgctgggaagaagctggtccgtccctgtgatcagacacctgttcgcccctctgaaggagtacttcgcctgcgtgagcagcggcaacagcaacgccaacagccggggccccagcttctctagcggcctggtgccactgtccctgagagggagccacatgggccccatggagatctacaaaaccgtgagcgcctggaagcggcagcctgtgcgcgtgctgagcctgtttcggaatatcgataaagtcctgaaaagcctgggattcctggagagcggctctggctccggcggtggcaccctgaagtacgtggaggatgtgacaaacgtggtcagacgggatgtggagaagtggggccccttcgatctggtgtacggcagcacccaacccctgggcagctcttgtgaccggtgccctggctggtacatgtttcagttccaccggatcctgcagtacgccctgccgagacaggagtcccagcggccattcttttggattttcatggacaacttgctgctgaccgaggatgaccaggaaactaccactcggttcctgcagaccgaagccgtgaccctgcaggacgtgagaggccgggactaccagaacgccatgcgggtgtggtccaacatccctggactgaaaagcaagcacgcacctctgacccctaaagaagaggagtacctgcaggcccaggtgcggagcagaagcaagctggacgcccctaaggtggatctgctggtgaagaattgcctcctgcccctgagagagtacttcaagtatttcagccagaatagtctgcccctgggaggcagcggcggcggcggcctgctgagcttcgaggacgtggccctgtacttcaccagggaggagtgggacaccctggactgggcccagaaggccctgtacagggacgtgatgctggacaactacaggcacatcgtgagcctgggcttccccttccccaagcccgaggtgatctgccagctggagcagtgggaggagccctggaccctggacctgcccagggccggcaccaggaaggccagcggcagcgcctgccccgacggcggcccaagcagcggcgcccctcctcccagcggcggcagcccagccggctccccaacctctaccgaggagggcacctctgagtccgccacccccgagagcggccctggcacctccaccgagcccagcgagggcagcgcacccggcagccctgccggcagccccacctccacagaggagggaaccagcaccgagcccagcgaaggcagcgccccaggcaccagcaccgagcctagtgagcaggagattaaacggatcaacaagatcagaagaagacttgtgaaagacagcaacaccaagaaggccggcaagacaggccccatgaaaaccctgctggttagagtgatgacacccgatctgagagagcggctggaaaacctgagaaagaagcctgaaaatatcccccagcccatcagcaatacatctagagccaacctgaataagctgctgaccgattacaccgaaatgaagaaggcgatcctgcatgtgtactgggaagagttccagaaggaccctgtgggcctgatgagccgggtggcccagcctgccagcaagaagatcgatcagaacaagctgaaacctgagatggacgagaagggcaacctgaccaccgccggctttgcctgctctcagtgtggccagcccctgttcgtgtacaagctggagcaggtgtctgagaagggcaaggcttacaccaactacttcggacggtgcaatgtggccgagcacgaaaagctgatcctgctggcccagctgaagcccgagaaggatagcgacgaagccgtgacatatagcctgggaaagtttgggcagagggccctggatttctacagcattcatgtgaccaaggagtccacccaccccgtgaagcccctggcccagatcgccggaaacagatacgcctccggacctgtgggaaaggccctgagcgacgcatgtatgggcacaatcgcctccttcctgtctaagtaccaggacatcatcatcgaacaccagaaggtggtgaagggcaaccagaagagactggagagcctgcgggagctggccggcaaggaaaacctggaataccctagcgtgaccctgccacctcagcctcacaccaaggagggcgttgatgcctacaacgaagtgatcgcccgggtgcgaatgtgggtgaacctgaacctgtggcagaagctgaagctaagcagagatgatgccaagcctctgctgagactgaagggattcccttcctttcctctggtcgagagacaggccaacgaagtggactggtgggacatggtgtgtaacgtgaagaagctgatcaacgagaaaaaggaggatggcaaggtgttttggcagaatctggctggctacaagagacaggaagccctgagaccatacctgagcagcgaggaagatcggaagaagggaaagaaattcgctcggtaccagctgggcgacctgctgctgcacctggaaaagaagcacggcgaggactggggaaaggtgtacgacgaggcctgggagcggattgacaagaaagtggaaggcctgagcaagcacatcaagctggaagaggaacggagaagcgaggacgcccagagcaaggccgccctgaccgactggctgcgggctaaggccagcttcgtgatcgagggcctgaaggaggccgacaaggacgagttctgcagatgcgagctgaagctgcagaagtggtacggggacctgcggggaaagcccttcgccatcgaagccgagaacagcatcctggacatcagcggcttcagcaagcagtacaactgtgccttcatctggcagaaggacggcgtgaagaagctgaacctgtacctgatcatcaactacttcaagggcggcaagctgcggttcaagaagatcaaacctgaagccttcgaagccaacagattctacaccgtgatcaacaaaaagagcggcgagatcgtgcccatggaggtgaacttcaacttcgacgaccccaacctgatcatcctgcctctggcctttggcaagagacagggcagagaattcatctggaacgacctgctgtccctggaaaccggcagcctgaagctggccaacggaagagtgatcgagaagacactgtacaacagaagaacccggcaggatgagcctgccctgttcgtggccctgaccttcgagcggcgggaggtcctggactcctccaatatcaaaccaatgaacctgatcggcgtggcaagaggcgaaaacatccccgccgtgatcgccctgaccgaccccgagggctgcccactgagccggtttaaggatagcctgggaaacccaacccacatcctgagaatcggcgagagctataaggagaagcagcggaccatccaggccaagaaggaggtggagcagcggagagccggcggctacagccggaagtacgccagcaaagccaagaatctggcagacgatatggtgagaaacaccgctagagatctgctgtactacgccgtgacccaggatgccatgctgatcttcgccaacctgagccggggcttcggccggcagggcaagcggaccttcatggccgagagacagtacacacggatggaggactggctgaccgccaagctggcctacgagggcctgagcaagacctacctgtccaagacactggcccagtacacctccaagacatgcagcaactgtgggtttaccatcaccagcgccgactacgacagggtgctggagaagctgaagaagacagcaacaggctggatgaccacaattaacggcaaggagctgaaggtggagggccagattacctactacaacagatacaagagacagaacgtagtcaaggacctgtccgtcgagctggatagactgagcgaagaatctgtgaacaacgacatctcctcctggacaaagggcagaagcggagaagctctgagcctcctgaagaaaagattctcccatagacccgtgcaggagaagttcgtgtgcctgaactgcggcttcgagacacacgcagccgagcaagccgccctgaacatcgccagatcctggctgttcctgcggagccaggagtacaagaaataccagacaaacaagacaaccggcaacaccgataagagagccttcgtcgagacctggcagtccttttaccggaagaagcttaaggaggtgtggaaacctgccgtgcggtctggcggatctggcggaggctccaccagccccaagaaaaagagaaaagtctaagctgccttctgcggggcttgccttctggccatgcccttcttctctcccttgcacctgtacctcttggtctttgaataaagcctgagtaggaaggctagcaaaaaaaaaaaaaaaaaaaaaaaaaaaaaaaaaaaaaaaaaaaaaaaaaaaaaaaaaaaaaaaaaaaaaaaaaaaaaaaa

SEQ ID NO: 12147 - RNA, 5785 nt, synthetic construct
  source 1..5785: mol_type = other RNA
aggaaataagagagaaaagaagagtaagaagaaatataagagccaccatggcccctaagaagaagcgtaaagtgagccggatggaacgcctcgtctacgaggtgcggcagaagtgcagaaacatcgaggacatctgcatctcctgcggatctctgaacgtgaccctggagcacccactgttcatcggcggcatgtgccagaactgtaaaaactgttttctggagtgtgcctatcaatacgacgatgacggctaccagagctactgcaccatctgttgcggcggaagagaggtgctgatgtgtggaaataacaactgctgccggtgcttctgcgtggaatgcgtggacctgctggtgggccccggcgccgcccaggccgctattaaggaagatccttggaactgctacatgtgcggccacaagggcacatacggcctgctgagacggagagaggactggcctagcagactgcagatgttcttcgccaataaccacgaccaggagttcgacccccctaaggtgtaccctcccgtccccgccgagaagagaaagcccatccgggtcctgagcctgttcgatggcatcgccaccggtctgctggtgctgaaggacctgggcatccaggtggataggtacattgcctccgaggtgtgcgaggactccatcaccgtgggaatggtgcgtcatcagggcaagatcatgtacgtgggcgacgtgcggagcgtgacacagaagcatatccaggagtggggccctttcgacctggtgatcggcggcagcccttgcaatgacctgagcatcgtgaacccagcccggaagggcctgtacgagggaaccggcagactgttcttcgagttttacagactgctgcacgacgcccggcctaaggaaggcgacgaccggcccttcttttggctgttcgagaatgtggtggccatgggagtcagcgacaagcgggatattagccggttcctggagagcaaccccgtgatgatcgatgccaaggaagtgagcgccgcccaccgggccagatacttctggggcaatctgcctggcatgaacagacccctggccagcaccgtgaacgacaagctggagctgcaggagtgcctggagcacggccggatcgccaagttcagcaaggtgagaaccatcaccacccgaagcaacagcatcaaacaaggcaaggaccagcactttcctgtgttcatgaacgagaaggaggacatcctgtggtgtaccgagatggagagagtgttcgggttcccagtccactacacagatgtcagcaacatgtctagactggccagacagagactgctgggaagaagctggtccgtccctgtgatcagacacctgttcgcccctctgaaggagtacttcgcctgcgtgagcagcggcaacagcaacgccaacagccggggccccagcttctctagcggcctggtgccactgtccctgagagggagccacatgggccccatggagatctacaaaaccgtgagcgcctggaagcggcagcctgtgcgcgtgctgagcctgtttcggaatatcgataaagtcctgaaaagcctgggattcctggagagcggctctggctccggcggtggcaccctgaagtacgtggaggatgtgacaaacgtggtcagacgggatgtggagaagtggggccccttcgatctggtgtacggcagcacccaacccctgggcagctcttgtgaccggtgccctggctggtacatgtttcagttccaccggatcctgcagtacgccctgccgagacaggagtcccagcggccattcttttggattttcatggacaacttgctgctgaccgaggatgaccaggaaactaccactcggttcctgcagaccgaagccgtgaccctgcaggacgtgagaggccgggactaccagaacgccatgcgggtgtggtccaacatccctggactgaaaagcaagcacgcacctctgacccctaaagaagaggagtacctgcaggcccaggtgcggagcagaagcaagctggacgcccctaaggtggatctgctggtgaagaattgcctcctgcccctgagagagtacttcaagtatttcagccagaatagtctgcccctgggaggcagcggcggcggcaagcccggcgccgtgagcttcgccgacgtggccgtgtacttcagccccgaggagtggggctgcctgaggcccgcccagagggccctgtacagggacgtgatgagggagacctacggccacctgggcgccctgggcttccccggccccaagcccgccctgatcagctggatggagcaggagagcgaggcctggagcagcgccgcccaggaccccgagaagggcgagagcctgggcggcgccaggggcggcccaagcagcggcgcccctcctcccagcggcggcagcccagccggctccccaacctctaccgaggagggcacctctgagtccgccacccccgagagcggccctggcacctccaccgagcccagcgagggcagcgcacccggcagccctgccggcagccccacctccacagaggagggaaccagcaccgagcccagcgaaggcagcgccccaggcaccagcaccgagcctagtgagcaggagattaaacggatcaacaagatcagaagaagacttgtgaaagacagcaacaccaagaaggccggcaagacaggccccatgaaaaccctgctggttagagtgatgacacccgatctgagagagcggctggaaaacctgagaaagaagcctgaaaatatcccccagcccatcagcaatacatctagagccaacctgaataagctgctgaccgattacaccgaaatgaagaaggcgatcctgcatgtgtactgggaagagttccagaaggaccctgtgggcctgatgagccgggtggcccagcctgccagcaagaagatcgatcagaacaagctgaaacctgagatggacgagaagggcaacctgaccaccgccggctttgcctgctctcagtgtggccagcccctgttcgtgtacaagctggagcaggtgtctgagaagggcaaggcttacaccaactacttcggacggtgcaatgtggccgagcacgaaaagctgatcctgctggcccagctgaagcccgagaaggatagcgacgaagccgtgacatatagcctgggaaagtttgggcagagggccctggatttctacagcattcatgtgaccaaggagtccacccaccccgtgaagcccctggcccagatcgccggaaacagatacgcctccggacctgtgggaaaggccctgagcgacgcatgtatgggcacaatcgcctccttcctgtctaagtaccaggacatcatcatcgaacaccagaaggtggtgaagggcaaccagaagagactggagagcctgcgggagctggccggcaaggaaaacctggaataccctagcgtgaccctgccacctcagcctcacaccaaggagggcgttgatgcctacaacgaagtgatcgcccgggtgcgaatgtgggtgaacctgaacctgtggcagaagctgaagctaagcagagatgatgccaagcctctgctgagactgaagggattcccttcctttcctctggtcgagagacaggccaacgaagtggactggtgggacatggtgtgtaacgtgaagaagctgatcaacgagaaaaaggaggatggcaaggtgttttggcagaatctggctggctacaagagacaggaagccctgagaccatacctgagcagcgaggaagatcggaagaagggaaagaaattcgctcggtaccagctgggcgacctgctgctgcacctggaaaagaagcacggcgaggactggggaaaggtgtacgacgaggcctgggagcggattgacaagaaagtggaaggcctgagcaagcacatcaagctggaagaggaacggagaagcgaggacgcccagagcaaggccgccctgaccgactggctgcgggctaaggccagcttcgtgatcgagggcctgaaggaggccgacaaggacgagttctgcagatgcgagctgaagctgcagaagtggtacggggacctgcggggaaagcccttcgccatcgaagccgagaacagcatcctggacatcagcggcttcagcaagcagtacaactgtgccttcatctggcagaaggacggcgtgaagaagctgaacctgtacctgatcatcaactacttcaagggcggcaagctgcggttcaagaagatcaaacctgaagccttcgaagccaacagattctacaccgtgatcaacaaaaagagcggcgagatcgtgcccatggaggtgaacttcaacttcgacgaccccaacctgatcatcctgcctctggcctttggcaagagacagggcagagaattcatctggaacgacctgctgtccctggaaaccggcagcctgaagctggccaacggaagagtgatcgagaagacactgtacaacagaagaacccggcaggatgagcctgccctgttcgtggccctgaccttcgagcggcgggaggtcctggactcctccaatatcaaaccaatgaacctgatcggcgtggcaagaggcgaaaacatccccgccgtgatcgccctgaccgaccccgagggctgcccactgagccggtttaaggatagcctgggaaacccaacccacatcctgagaatcggcgagagctataaggagaagcagcggaccatccaggccaagaaggaggtggagcagcggagagccggcggctacagccggaagtacgccagcaaagccaagaatctggcagacgatatggtgagaaacaccgctagagatctgctgtactacgccgtgacccaggatgccatgctgatcttcgccaacctgagccggggcttcggccggcagggcaagcggaccttcatggccgagagacagtacacacggatggaggactggctgaccgccaagctggcctacgagggcctgagcaagacctacctgtccaagacactggcccagtacacctccaagacatgcagcaactgtgggtttaccatcaccagcgccgactacgacagggtgctggagaagctgaagaagacagcaacaggctggatgaccacaattaacggcaaggagctgaaggtggagggccagattacctactacaacagatacaagagacagaacgtagtcaaggacctgtccgtcgagctggatagactgagcgaagaatctgtgaacaacgacatctcctcctggacaaagggcagaagcggagaagctctgagcctcctgaagaaaagattctcccatagacccgtgcaggagaagttcgtgtgcctgaactgcggcttcgagacacacgcagccgagcaagccgccctgaacatcgccagatcctggctgttcctgcggagccaggagtacaagaaataccagacaaacaagacaaccggcaacaccgataagagagccttcgtcgagacctggcagtccttttaccggaagaagcttaaggaggtgtggaaacctgccgtgcggtctggcggatctggcggaggctccaccagccccaagaaaaagagaaaagtctaagctgccttctgcggggcttgccttctggccatgcccttcttctctcccttgcacctgtacctcttggtctttgaataaagcctgagtaggaaggctagcaaaaaaaaaaaaaaaaaaaaaaaaaaaaaaaaaaaaaaaaaaaaaaaaaaaaaaaaaaaaaaaaaaaaaaaaaaaaaaaa

SEQ ID NO: 12148 - RNA, 5785 nt, synthetic construct
  source 1..5785: mol_type = other RNA
aggaaataagagagaaaagaagagtaagaagaaatataagagccaccatggcccctaagaagaagcgtaaagtgagccggatggaacgcctcgtctacgaggtgcggcagaagtgcagaaacatcgaggacatctgcatctcctgcggatctctgaacgtgaccctggagcacccactgttcatcggcggcatgtgccagaactgtaaaaactgttttctggagtgtgcctatcaatacgacgatgacggctaccagagctactgcaccatctgttgcggcggaagagaggtgctgatgtgtggaaataacaactgctgccggtgcttctgcgtggaatgcgtggacctgctggtgggccccggcgccgcccaggccgctattaaggaagatccttggaactgctacatgtgcggccacaagggcacatacggcctgctgagacggagagaggactggcctagcagactgcagatgttcttcgccaataaccacgaccaggagttcgacccccctaaggtgtaccctcccgtccccgccgagaagagaaagcccatccgggtcctgagcctgttcgatggcatcgccaccggtctgctggtgctgaaggacctgggcatccaggtggataggtacattgcctccgaggtgtgcgaggactccatcaccgtgggaatggtgcgtcatcagggcaagatcatgtacgtgggcgacgtgcggagcgtgacacagaagcatatccaggagtggggccctttcgacctggtgatcggcggcagcccttgcaatgacctgagcatcgtgaacccagcccggaagggcctgtacgagggaaccggcagactgttcttcgagttttacagactgctgcacgacgcccggcctaaggaaggcgacgaccggcccttcttttggctgttcgagaatgtggtggccatgggagtcagcgacaagcgggatattagccggttcctggagagcaaccccgtgatgatcgatgccaaggaagtgagcgccgcccaccgggccagatacttctggggcaatctgcctggcatgaacagacccctggccagcaccgtgaacgacaagctggagctgcaggagtgcctggagcacggccggatcgccaagttcagcaaggtgagaaccatcaccacccgaagcaacagcatcaaacaaggcaaggaccagcactttcctgtgttcatgaacgagaaggaggacatcctgtggtgtaccgagatggagagagtgttcgggttcccagtccactacacagatgtcagcaacatgtctagactggccagacagagactgctgggaagaagctggtccgtccctgtgatcagacacctgttcgcccctctgaaggagtacttcgcctgcgtgagcagcggcaacagcaacgccaacagccggggccccagcttctctagcggcctggtgccactgtccctgagagggagccacatgggccccatggagatctacaaaaccgtgagcgcctggaagcggcagcctgtgcgcgtgctgagcctgtttcggaatatcgataaagtcctgaaaagcctgggattcctggagagcggctctggctccggcggtggcaccctgaagtacgtggaggatgtgacaaacgtggtcagacgggatgtggagaagtggggccccttcgatctggtgtacggcagcacccaacccctgggcagctcttgtgaccggtgccctggctggtacatgtttcagttccaccggatcctgcagtacgccctgccgagacaggagtcccagcggccattcttttggattttcatggacaacttgctgctgaccgaggatgaccaggaaactaccactcggttcctgcagaccgaagccgtgaccctgcaggacgtgagaggccgggactaccagaacgccatgcgggtgtggtccaacatccctggactgaaaagcaagcacgcacctctgacccctaaagaagaggagtacctgcaggcccaggtgcggagcagaagcaagctggacgcccctaaggtggatctgctggtgaagaattgcctcctgcccctgagagagtacttcaagtatttcagccagaatagtctgcccctgggaggcagcggcggcggcaagcccggcgccgtgagcttcgccgacgtggccgtgtacttcagccccgaggagtggggctgcctgaggcccgcccagagggccctgtacagggacgtgatgagggagacctacggccacctgggcgccctgggcttccccggccccaagcccgccctgatcagctggatggagcaggagagcgaggagagcgaggcctggagccccgccgccaaggaccccgaggagggcgagagcctgggcggcggcccaagcagcggcgcccctcctcccagcggcggcagcccagccggctccccaacctctaccgaggagggcacctctgagtccgccacccccgagagcggccctggcacctccaccgagcccagcgagggcagcgcacccggcagccctgccggcagccccacctccacagaggagggaaccagcaccgagcccagcgaaggcagcgccccaggcaccagcaccgagcctagtgagcaggagattaaacggatcaacaagatcagaagaagacttgtgaaagacagcaacaccaagaaggccggcaagacaggccccatgaaaaccctgctggttagagtgatgacacccgatctgagagagcggctggaaaacctgagaaagaagcctgaaaatatcccccagcccatcagcaatacatctagagccaacctgaataagctgctgaccgattacaccgaaatgaagaaggcgatcctgcatgtgtactgggaagagttccagaaggaccctgtgggcctgatgagccgggtggcccagcctgccagcaagaagatcgatcagaacaagctgaaacctgagatggacgagaagggcaacctgaccaccgccggctttgcctgctctcagtgtggccagcccctgttcgtgtacaagctggagcaggtgtctgagaagggcaaggcttacaccaactacttcggacggtgcaatgtggccgagcacgaaaagctgatcctgctggcccagctgaagcccgagaaggatagcgacgaagccgtgacatatagcctgggaaagtttgggcagagggccctggatttctacagcattcatgtgaccaaggagtccacccaccccgtgaagcccctggcccagatcgccggaaacagatacgcctccggacctgtgggaaaggccctgagcgacgcatgtatgggcacaatcgcctccttcctgtctaagtaccaggacatcatcatcgaacaccagaaggtggtgaagggcaaccagaagagactggagagcctgcgggagctggccggcaaggaaaacctggaataccctagcgtgaccctgccacctcagcctcacaccaaggagggcgttgatgcctacaacgaagtgatcgcccgggtgcgaatgtgggtgaacctgaacctgtggcagaagctgaagctaagcagagatgatgccaagcctctgctgagactgaagggattcccttcctttcctctggtcgagagacaggccaacgaagtggactggtgggacatggtgtgtaacgtgaagaagctgatcaacgagaaaaaggaggatggcaaggtgttttggcagaatctggctggctacaagagacaggaagccctgagaccatacctgagcagcgaggaagatcggaagaagggaaagaaattcgctcggtaccagctgggcgacctgctgctgcacctggaaaagaagcacggcgaggactggggaaaggtgtacgacgaggcctgggagcggattgacaagaaagtggaaggcctgagcaagcacatcaagctggaagaggaacggagaagcgaggacgcccagagcaaggccgccctgaccgactggctgcgggctaaggccagcttcgtgatcgagggcctgaaggaggccgacaaggacgagttctgcagatgcgagctgaagctgcagaagtggtacggggacctgcggggaaagcccttcgccatcgaagccgagaacagcatcctggacatcagcggcttcagcaagcagtacaactgtgccttcatctggcagaaggacggcgtgaagaagctgaacctgtacctgatcatcaactacttcaagggcggcaagctgcggttcaagaagatcaaacctgaagccttcgaagccaacagattctacaccgtgatcaacaaaaagagcggcgagatcgtgcccatggaggtgaacttcaacttcgacgaccccaacctgatcatcctgcctctggcctttggcaagagacagggcagagaattcatctggaacgacctgctgtccctggaaaccggcagcctgaagctggccaacggaagagtgatcgagaagacactgtacaacagaagaacccggcaggatgagcctgccctgttcgtggccctgaccttcgagcggcgggaggtcctggactcctccaatatcaaaccaatgaacctgatcggcgtggcaagaggcgaaaacatccccgccgtgatcgccctgaccgaccccgagggctgcccactgagccggtttaaggatagcctgggaaacccaacccacatcctgagaatcggcgagagctataaggagaagcagcggaccatccaggccaagaaggaggtggagcagcggagagccggcggctacagccggaagtacgccagcaaagccaagaatctggcagacgatatggtgagaaacaccgctagagatctgctgtactacgccgtgacccaggatgccatgctgatcttcgccaacctgagccggggcttcggccggcagggcaagcggaccttcatggccgagagacagtacacacggatggaggactggctgaccgccaagctggcctacgagggcctgagcaagacctacctgtccaagacactggcccagtacacctccaagacatgcagcaactgtgggtttaccatcaccagcgccgactacgacagggtgctggagaagctgaagaagacagcaacaggctggatgaccacaattaacggcaaggagctgaaggtggagggccagattacctactacaacagatacaagagacagaacgtagtcaaggacctgtccgtcgagctggatagactgagcgaagaatctgtgaacaacgacatctcctcctggacaaagggcagaagcggagaagctctgagcctcctgaagaaaagattctcccatagacccgtgcaggagaagttcgtgtgcctgaactgcggcttcgagacacacgcagccgagcaagccgccctgaacatcgccagatcctggctgttcctgcggagccaggagtacaagaaataccagacaaacaagacaaccggcaacaccgataagagagccttcgtcgagacctggcagtccttttaccggaagaagcttaaggaggtgtggaaacctgccgtgcggtctggcggatctggcggaggctccaccagccccaagaaaaagagaaaagtctaagctgccttctgcggggcttgccttctggccatgcccttcttctctcccttgcacctgtacctcttggtctttgaataaagcctgagtaggaaggctagcaaaaaaaaaaaaaaaaaaaaaaaaaaaaaaaaaaaaaaaaaaaaaaaaaaaaaaaaaaaaaaaaaaaaaaaaaaaaaaaa

SEQ ID NO: 12149 - RNA, 5785 nt, synthetic construct
  source 1..5785: mol_type = other RNA
aggaaataagagagaaaagaagagtaagaagaaatataagagccaccatggcccctaagaagaagcgtaaagtgagccggatggaacgcctcgtctacgaggtgcggcagaagtgcagaaacatcgaggacatctgcatctcctgcggatctctgaacgtgaccctggagcacccactgttcatcggcggcatgtgccagaactgtaaaaactgttttctggagtgtgcctatcaatacgacgatgacggctaccagagctactgcaccatctgttgcggcggaagagaggtgctgatgtgtggaaataacaactgctgccggtgcttctgcgtggaatgcgtggacctgctggtgggccccggcgccgcccaggccgctattaaggaagatccttggaactgctacatgtgcggccacaagggcacatacggcctgctgagacggagagaggactggcctagcagactgcagatgttcttcgccaataaccacgaccaggagttcgacccccctaaggtgtaccctcccgtccccgccgagaagagaaagcccatccgggtcctgagcctgttcgatggcatcgccaccggtctgctggtgctgaaggacctgggcatccaggtggataggtacattgcctccgaggtgtgcgaggactccatcaccgtgggaatggtgcgtcatcagggcaagatcatgtacgtgggcgacgtgcggagcgtgacacagaagcatatccaggagtggggccctttcgacctggtgatcggcggcagcccttgcaatgacctgagcatcgtgaacccagcccggaagggcctgtacgagggaaccggcagactgttcttcgagttttacagactgctgcacgacgcccggcctaaggaaggcgacgaccggcccttcttttggctgttcgagaatgtggtggccatgggagtcagcgacaagcgggatattagccggttcctggagagcaaccccgtgatgatcgatgccaaggaagtgagcgccgcccaccgggccagatacttctggggcaatctgcctggcatgaacagacccctggccagcaccgtgaacgacaagctggagctgcaggagtgcctggagcacggccggatcgccaagttcagcaaggtgagaaccatcaccacccgaagcaacagcatcaaacaaggcaaggaccagcactttcctgtgttcatgaacgagaaggaggacatcctgtggtgtaccgagatggagagagtgttcgggttcccagtccactacacagatgtcagcaacatgtctagactggccagacagagactgctgggaagaagctggtccgtccctgtgatcagacacctgttcgcccctctgaaggagtacttcgcctgcgtgagcagcggcaacagcaacgccaacagccggggccccagcttctctagcggcctggtgccactgtccctgagagggagccacatgggccccatggagatctacaaaaccgtgagcgcctggaagcggcagcctgtgcgcgtgctgagcctgtttcggaatatcgataaagtcctgaaaagcctgggattcctggagagcggctctggctccggcggtggcaccctgaagtacgtggaggatgtgacaaacgtggtcagacgggatgtggagaagtggggccccttcgatctggtgtacggcagcacccaacccctgggcagctcttgtgaccggtgccctggctggtacatgtttcagttccaccggatcctgcagtacgccctgccgagacaggagtcccagcggccattcttttggattttcatggacaacttgctgctgaccgaggatgaccaggaaactaccactcggttcctgcagaccgaagccgtgaccctgcaggacgtgagaggccgggactaccagaacgccatgcgggtgtggtccaacatccctggactgaaaagcaagcacgcacctctgacccctaaagaagaggagtacctgcaggcccaggtgcggagcagaagcaagctggacgcccctaaggtggatctgctggtgaagaattgcctcctgcccctgagagagtacttcaagtatttcagccagaatagtctgcccctgggaggcagcggcggcggcagccagagccccctgaccttcggcgacgtggccgtggagttcagcggcgacgagtgggcctggctggacagcgcccagaggagcctgcacaggagcgtgatgctggagaactacaggaacctggccagcctgggcctgtgcatgagcaagcccgagatgatcagcagcctggagcagagcaaggagccctgggccgtgaaggccaagagcaccaggggcaggtgccccggcctggaggccatcggcggcccaagcagcggcgcccctcctcccagcggcggcagcccagccggctccccaacctctaccgaggagggcacctctgagtccgccacccccgagagcggccctggcacctccaccgagcccagcgagggcagcgcacccggcagccctgccggcagccccacctccacagaggagggaaccagcaccgagcccagcgaaggcagcgccccaggcaccagcaccgagcctagtgagcaggagattaaacggatcaacaagatcagaagaagacttgtgaaagacagcaacaccaagaaggccggcaagacaggccccatgaaaaccctgctggttagagtgatgacacccgatctgagagagcggctggaaaacctgagaaagaagcctgaaaatatcccccagcccatcagcaatacatctagagccaacctgaataagctgctgaccgattacaccgaaatgaagaaggcgatcctgcatgtgtactgggaagagttccagaaggaccctgtgggcctgatgagccgggtggcccagcctgccagcaagaagatcgatcagaacaagctgaaacctgagatggacgagaagggcaacctgaccaccgccggctttgcctgctctcagtgtggccagcccctgttcgtgtacaagctggagcaggtgtctgagaagggcaaggcttacaccaactacttcggacggtgcaatgtggccgagcacgaaaagctgatcctgctggcccagctgaagcccgagaaggatagcgacgaagccgtgacatatagcctgggaaagtttgggcagagggccctggatttctacagcattcatgtgaccaaggagtccacccaccccgtgaagcccctggcccagatcgccggaaacagatacgcctccggacctgtgggaaaggccctgagcgacgcatgtatgggcacaatcgcctccttcctgtctaagtaccaggacatcatcatcgaacaccagaaggtggtgaagggcaaccagaagagactggagagcctgcgggagctggccggcaaggaaaacctggaataccctagcgtgaccctgccacctcagcctcacaccaaggagggcgttgatgcctacaacgaagtgatcgcccgggtgcgaatgtgggtgaacctgaacctgtggcagaagctgaagctaagcagagatgatgccaagcctctgctgagactgaagggattcccttcctttcctctggtcgagagacaggccaacgaagtggactggtgggacatggtgtgtaacgtgaagaagctgatcaacgagaaaaaggaggatggcaaggtgttttggcagaatctggctggctacaagagacaggaagccctgagaccatacctgagcagcgaggaagatcggaagaagggaaagaaattcgctcggtaccagctgggcgacctgctgctgcacctggaaaagaagcacggcgaggactggggaaaggtgtacgacgaggcctgggagcggattgacaagaaagtggaaggcctgagcaagcacatcaagctggaagaggaacggagaagcgaggacgcccagagcaaggccgccctgaccgactggctgcgggctaaggccagcttcgtgatcgagggcctgaaggaggccgacaaggacgagttctgcagatgcgagctgaagctgcagaagtggtacggggacctgcggggaaagcccttcgccatcgaagccgagaacagcatcctggacatcagcggcttcagcaagcagtacaactgtgccttcatctggcagaaggacggcgtgaagaagctgaacctgtacctgatcatcaactacttcaagggcggcaagctgcggttcaagaagatcaaacctgaagccttcgaagccaacagattctacaccgtgatcaacaaaaagagcggcgagatcgtgcccatggaggtgaacttcaacttcgacgaccccaacctgatcatcctgcctctggcctttggcaagagacagggcagagaattcatctggaacgacctgctgtccctggaaaccggcagcctgaagctggccaacggaagagtgatcgagaagacactgtacaacagaagaacccggcaggatgagcctgccctgttcgtggccctgaccttcgagcggcgggaggtcctggactcctccaatatcaaaccaatgaacctgatcggcgtggcaagaggcgaaaacatccccgccgtgatcgccctgaccgaccccgagggctgcccactgagccggtttaaggatagcctgggaaacccaacccacatcctgagaatcggcgagagctataaggagaagcagcggaccatccaggccaagaaggaggtggagcagcggagagccggcggctacagccggaagtacgccagcaaagccaagaatctggcagacgatatggtgagaaacaccgctagagatctgctgtactacgccgtgacccaggatgccatgctgatcttcgccaacctgagccggggcttcggccggcagggcaagcggaccttcatggccgagagacagtacacacggatggaggactggctgaccgccaagctggcctacgagggcctgagcaagacctacctgtccaagacactggcccagtacacctccaagacatgcagcaactgtgggtttaccatcaccagcgccgactacgacagggtgctggagaagctgaagaagacagcaacaggctggatgaccacaattaacggcaaggagctgaaggtggagggccagattacctactacaacagatacaagagacagaacgtagtcaaggacctgtccgtcgagctggatagactgagcgaagaatctgtgaacaacgacatctcctcctggacaaagggcagaagcggagaagctctgagcctcctgaagaaaagattctcccatagacccgtgcaggagaagttcgtgtgcctgaactgcggcttcgagacacacgcagccgagcaagccgccctgaacatcgccagatcctggctgttcctgcggagccaggagtacaagaaataccagacaaacaagacaaccggcaacaccgataagagagccttcgtcgagacctggcagtccttttaccggaagaagcttaaggaggtgtggaaacctgccgtgcggtctggcggatctggcggaggctccaccagccccaagaaaaagagaaaagtctaagctgccttctgcggggcttgccttctggccatgcccttcttctctcccttgcacctgtacctcttggtctttgaataaagcctgagtaggaaggctagcaaaaaaaaaaaaaaaaaaaaaaaaaaaaaaaaaaaaaaaaaaaaaaaaaaaaaaaaaaaaaaaaaaaaaaaaaaaaaaaa

SEQ ID NO: 12150 - RNA, 5785 nt, synthetic construct
  source 1..5785: mol_type = other RNA
aggaaataagagagaaaagaagagtaagaagaaatataagagccaccatggcccctaagaagaagcgtaaagtgagccggatggaacgcctcgtctacgaggtgcggcagaagtgcagaaacatcgaggacatctgcatctcctgcggatctctgaacgtgaccctggagcacccactgttcatcggcggcatgtgccagaactgtaaaaactgttttctggagtgtgcctatcaatacgacgatgacggctaccagagctactgcaccatctgttgcggcggaagagaggtgctgatgtgtggaaataacaactgctgccggtgcttctgcgtggaatgcgtggacctgctggtgggccccggcgccgcccaggccgctattaaggaagatccttggaactgctacatgtgcggccacaagggcacatacggcctgctgagacggagagaggactggcctagcagactgcagatgttcttcgccaataaccacgaccaggagttcgacccccctaaggtgtaccctcccgtccccgccgagaagagaaagcccatccgggtcctgagcctgttcgatggcatcgccaccggtctgctggtgctgaaggacctgggcatccaggtggataggtacattgcctccgaggtgtgcgaggactccatcaccgtgggaatggtgcgtcatcagggcaagatcatgtacgtgggcgacgtgcggagcgtgacacagaagcatatccaggagtggggccctttcgacctggtgatcggcggcagcccttgcaatgacctgagcatcgtgaacccagcccggaagggcctgtacgagggaaccggcagactgttcttcgagttttacagactgctgcacgacgcccggcctaaggaaggcgacgaccggcccttcttttggctgttcgagaatgtggtggccatgggagtcagcgacaagcgggatattagccggttcctggagagcaaccccgtgatgatcgatgccaaggaagtgagcgccgcccaccgggccagatacttctggggcaatctgcctggcatgaacagacccctggccagcaccgtgaacgacaagctggagctgcaggagtgcctggagcacggccggatcgccaagttcagcaaggtgagaaccatcaccacccgaagcaacagcatcaaacaaggcaaggaccagcactttcctgtgttcatgaacgagaaggaggacatcctgtggtgtaccgagatggagagagtgttcgggttcccagtccactacacagatgtcagcaacatgtctagactggccagacagagactgctgggaagaagctggtccgtccctgtgatcagacacctgttcgcccctctgaaggagtacttcgcctgcgtgagcagcggcaacagcaacgccaacagccggggccccagcttctctagcggcctggtgccactgtccctgagagggagccacatgggccccatggagatctacaaaaccgtgagcgcctggaagcggcagcctgtgcgcgtgctgagcctgtttcggaatatcgataaagtcctgaaaagcctgggattcctggagagcggctctggctccggcggtggcaccctgaagtacgtggaggatgtgacaaacgtggtcagacgggatgtggagaagtggggccccttcgatctggtgtacggcagcacccaacccctgggcagctcttgtgaccggtgccctggctggtacatgtttcagttccaccggatcctgcagtacgccctgccgagacaggagtcccagcggccattcttttggattttcatggacaacttgctgctgaccgaggatgaccaggaaactaccactcggttcctgcagaccgaagccgtgaccctgcaggacgtgagaggccgggactaccagaacgccatgcgggtgtggtccaacatccctggactgaaaagcaagcacgcacctctgacccctaaagaagaggagtacctgcaggcccaggtgcggagcagaagcaagctggacgcccctaaggtggatctgctggtgaagaattgcctcctgcccctgagagagtacttcaagtatttcagccagaatagtctgcccctgggaggcagcggcggcggcatggccttcgaggacgtggccgtgtacttcagccaggaggagtggggcctgctggacaccgcccagagggccctgtacaggcacgtgatgctggagaacttcaccctggtgaccagcctgggcctgagcaccagcaggccctacgtggtgatccagctggagaggggcgaggagccctgggtgcccagcggcaaggacatgaccctggccaggaacacctacaggaggctgaacgccggcagcggcggcccaagcagcggcgcccctcctcccagcggcggcagcccagccggctccccaacctctaccgaggagggcacctctgagtccgccacccccgagagcggccctggcacctccaccgagcccagcgagggcagcgcacccggcagccctgccggcagccccacctccacagaggagggaaccagcaccgagcccagcgaaggcagcgccccaggcaccagcaccgagcctagtgagcaggagattaaacggatcaacaagatcagaagaagacttgtgaaagacagcaacaccaagaaggccggcaagacaggccccatgaaaaccctgctggttagagtgatgacacccgatctgagagagcggctggaaaacctgagaaagaagcctgaaaatatcccccagcccatcagcaatacatctagagccaacctgaataagctgctgaccgattacaccgaaatgaagaaggcgatcctgcatgtgtactgggaagagttccagaaggaccctgtgggcctgatgagccgggtggcccagcctgccagcaagaagatcgatcagaacaagctgaaacctgagatggacgagaagggcaacctgaccaccgccggctttgcctgctctcagtgtggccagcccctgttcgtgtacaagctggagcaggtgtctgagaagggcaaggcttacaccaactacttcggacggtgcaatgtggccgagcacgaaaagctgatcctgctggcccagctgaagcccgagaaggatagcgacgaagccgtgacatatagcctgggaaagtttgggcagagggccctggatttctacagcattcatgtgaccaaggagtccacccaccccgtgaagcccctggcccagatcgccggaaacagatacgcctccggacctgtgggaaaggccctgagcgacgcatgtatgggcacaatcgcctccttcctgtctaagtaccaggacatcatcatcgaacaccagaaggtggtgaagggcaaccagaagagactggagagcctgcgggagctggccggcaaggaaaacctggaataccctagcgtgaccctgccacctcagcctcacaccaaggagggcgttgatgcctacaacgaagtgatcgcccgggtgcgaatgtgggtgaacctgaacctgtggcagaagctgaagctaagcagagatgatgccaagcctctgctgagactgaagggattcccttcctttcctctggtcgagagacaggccaacgaagtggactggtgggacatggtgtgtaacgtgaagaagctgatcaacgagaaaaaggaggatggcaaggtgttttggcagaatctggctggctacaagagacaggaagccctgagaccatacctgagcagcgaggaagatcggaagaagggaaagaaattcgctcggtaccagctgggcgacctgctgctgcacctggaaaagaagcacggcgaggactggggaaaggtgtacgacgaggcctgggagcggattgacaagaaagtggaaggcctgagcaagcacatcaagctggaagaggaacggagaagcgaggacgcccagagcaaggccgccctgaccgactggctgcgggctaaggccagcttcgtgatcgagggcctgaaggaggccgacaaggacgagttctgcagatgcgagctgaagctgcagaagtggtacggggacctgcggggaaagcccttcgccatcgaagccgagaacagcatcctggacatcagcggcttcagcaagcagtacaactgtgccttcatctggcagaaggacggcgtgaagaagctgaacctgtacctgatcatcaactacttcaagggcggcaagctgcggttcaagaagatcaaacctgaagccttcgaagccaacagattctacaccgtgatcaacaaaaagagcggcgagatcgtgcccatggaggtgaacttcaacttcgacgaccccaacctgatcatcctgcctctggcctttggcaagagacagggcagagaattcatctggaacgacctgctgtccctggaaaccggcagcctgaagctggccaacggaagagtgatcgagaagacactgtacaacagaagaacccggcaggatgagcctgccctgttcgtggccctgaccttcgagcggcgggaggtcctggactcctccaatatcaaaccaatgaacctgatcggcgtggcaagaggcgaaaacatccccgccgtgatcgccctgaccgaccccgagggctgcccactgagccggtttaaggatagcctgggaaacccaacccacatcctgagaatcggcgagagctataaggagaagcagcggaccatccaggccaagaaggaggtggagcagcggagagccggcggctacagccggaagtacgccagcaaagccaagaatctggcagacgatatggtgagaaacaccgctagagatctgctgtactacgccgtgacccaggatgccatgctgatcttcgccaacctgagccggggcttcggccggcagggcaagcggaccttcatggccgagagacagtacacacggatggaggactggctgaccgccaagctggcctacgagggcctgagcaagacctacctgtccaagacactggcccagtacacctccaagacatgcagcaactgtgggtttaccatcaccagcgccgactacgacagggtgctggagaagctgaagaagacagcaacaggctggatgaccacaattaacggcaaggagctgaaggtggagggccagattacctactacaacagatacaagagacagaacgtagtcaaggacctgtccgtcgagctggatagactgagcgaagaatctgtgaacaacgacatctcctcctggacaaagggcagaagcggagaagctctgagcctcctgaagaaaagattctcccatagacccgtgcaggagaagttcgtgtgcctgaactgcggcttcgagacacacgcagccgagcaagccgccctgaacatcgccagatcctggctgttcctgcggagccaggagtacaagaaataccagacaaacaagacaaccggcaacaccgataagagagccttcgtcgagacctggcagtccttttaccggaagaagcttaaggaggtgtggaaacctgccgtgcggtctggcggatctggcggaggctccaccagccccaagaaaaagagaaaagtctaagctgccttctgcggggcttgccttctggccatgcccttcttctctcccttgcacctgtacctcttggtctttgaataaagcctgagtaggaaggctagcaaaaaaaaaaaaaaaaaaaaaaaaaaaaaaaaaaaaaaaaaaaaaaaaaaaaaaaaaaaaaaaaaaaaaaaaaaaaaaaa

SEQ ID NO: 12151 - RNA, 5785 nt, synthetic construct
  source 1..5785: mol_type = other RNA
aggaaataagagagaaaagaagagtaagaagaaatataagagccaccatggcccctaagaagaagcgtaaagtgagccggatggaacgcctcgtctacgaggtgcggcagaagtgcagaaacatcgaggacatctgcatctcctgcggatctctgaacgtgaccctggagcacccactgttcatcggcggcatgtgccagaactgtaaaaactgttttctggagtgtgcctatcaatacgacgatgacggctaccagagctactgcaccatctgttgcggcggaagagaggtgctgatgtgtggaaataacaactgctgccggtgcttctgcgtggaatgcgtggacctgctggtgggccccggcgccgcccaggccgctattaaggaagatccttggaactgctacatgtgcggccacaagggcacatacggcctgctgagacggagagaggactggcctagcagactgcagatgttcttcgccaataaccacgaccaggagttcgacccccctaaggtgtaccctcccgtccccgccgagaagagaaagcccatccgggtcctgagcctgttcgatggcatcgccaccggtctgctggtgctgaaggacctgggcatccaggtggataggtacattgcctccgaggtgtgcgaggactccatcaccgtgggaatggtgcgtcatcagggcaagatcatgtacgtgggcgacgtgcggagcgtgacacagaagcatatccaggagtggggccctttcgacctggtgatcggcggcagcccttgcaatgacctgagcatcgtgaacccagcccggaagggcctgtacgagggaaccggcagactgttcttcgagttttacagactgctgcacgacgcccggcctaaggaaggcgacgaccggcccttcttttggctgttcgagaatgtggtggccatgggagtcagcgacaagcgggatattagccggttcctggagagcaaccccgtgatgatcgatgccaaggaagtgagcgccgcccaccgggccagatacttctggggcaatctgcctggcatgaacagacccctggccagcaccgtgaacgacaagctggagctgcaggagtgcctggagcacggccggatcgccaagttcagcaaggtgagaaccatcaccacccgaagcaacagcatcaaacaaggcaaggaccagcactttcctgtgttcatgaacgagaaggaggacatcctgtggtgtaccgagatggagagagtgttcgggttcccagtccactacacagatgtcagcaacatgtctagactggccagacagagactgctgggaagaagctggtccgtccctgtgatcagacacctgttcgcccctctgaaggagtacttcgcctgcgtgagcagcggcaacagcaacgccaacagccggggccccagcttctctagcggcctggtgccactgtccctgagagggagccacatgggccccatggagatctacaaaaccgtgagcgcctggaagcggcagcctgtgcgcgtgctgagcctgtttcggaatatcgataaagtcctgaaaagcctgggattcctggagagcggctctggctccggcggtggcaccctgaagtacgtggaggatgtgacaaacgtggtcagacgggatgtggagaagtggggccccttcgatctggtgtacggcagcacccaacccctgggcagctcttgtgaccggtgccctggctggtacatgtttcagttccaccggatcctgcagtacgccctgccgagacaggagtcccagcggccattcttttggattttcatggacaacttgctgctgaccgaggatgaccaggaaactaccactcggttcctgcagaccgaagccgtgaccctgcaggacgtgagaggccgggactaccagaacgccatgcgggtgtggtccaacatccctggactgaaaagcaagcacgcacctctgacccctaaagaagaggagtacctgcaggcccaggtgcggagcagaagcaagctggacgcccctaaggtggatctgctggtgaagaattgcctcctgcccctgagagagtacttcaagtatttcagccagaatagtctgcccctgggaggcagcggcggcggcatggccttcgaggacgtggccgtgtacttcagccaggaggagtggggcctgctggacaccgcccagagggccctgtacaggagggtgatgctggacaacttcgccctggtggccagcctgggcctgagcaccagcaggcccagggtggtgatccagctggagaggggcgaggagccctgggtgcccagcggcaccgacatgaccatgagcaggaacacccacaggaggaggaacagcggcttcggcggcccaagcagcggcgcccctcctcccagcggcggcagcccagccggctccccaacctctaccgaggagggcacctctgagtccgccacccccgagagcggccctggcacctccaccgagcccagcgagggcagcgcacccggcagccctgccggcagccccacctccacagaggagggaaccagcaccgagcccagcgaaggcagcgccccaggcaccagcaccgagcctagtgagcaggagattaaacggatcaacaagatcagaagaagacttgtgaaagacagcaacaccaagaaggccggcaagacaggccccatgaaaaccctgctggttagagtgatgacacccgatctgagagagcggctggaaaacctgagaaagaagcctgaaaatatcccccagcccatcagcaatacatctagagccaacctgaataagctgctgaccgattacaccgaaatgaagaaggcgatcctgcatgtgtactgggaagagttccagaaggaccctgtgggcctgatgagccgggtggcccagcctgccagcaagaagatcgatcagaacaagctgaaacctgagatggacgagaagggcaacctgaccaccgccggctttgcctgctctcagtgtggccagcccctgttcgtgtacaagctggagcaggtgtctgagaagggcaaggcttacaccaactacttcggacggtgcaatgtggccgagcacgaaaagctgatcctgctggcccagctgaagcccgagaaggatagcgacgaagccgtgacatatagcctgggaaagtttgggcagagggccctggatttctacagcattcatgtgaccaaggagtccacccaccccgtgaagcccctggcccagatcgccggaaacagatacgcctccggacctgtgggaaaggccctgagcgacgcatgtatgggcacaatcgcctccttcctgtctaagtaccaggacatcatcatcgaacaccagaaggtggtgaagggcaaccagaagagactggagagcctgcgggagctggccggcaaggaaaacctggaataccctagcgtgaccctgccacctcagcctcacaccaaggagggcgttgatgcctacaacgaagtgatcgcccgggtgcgaatgtgggtgaacctgaacctgtggcagaagctgaagctaagcagagatgatgccaagcctctgctgagactgaagggattcccttcctttcctctggtcgagagacaggccaacgaagtggactggtgggacatggtgtgtaacgtgaagaagctgatcaacgagaaaaaggaggatggcaaggtgttttggcagaatctggctggctacaagagacaggaagccctgagaccatacctgagcagcgaggaagatcggaagaagggaaagaaattcgctcggtaccagctgggcgacctgctgctgcacctggaaaagaagcacggcgaggactggggaaaggtgtacgacgaggcctgggagcggattgacaagaaagtggaaggcctgagcaagcacatcaagctggaagaggaacggagaagcgaggacgcccagagcaaggccgccctgaccgactggctgcgggctaaggccagcttcgtgatcgagggcctgaaggaggccgacaaggacgagttctgcagatgcgagctgaagctgcagaagtggtacggggacctgcggggaaagcccttcgccatcgaagccgagaacagcatcctggacatcagcggcttcagcaagcagtacaactgtgccttcatctggcagaaggacggcgtgaagaagctgaacctgtacctgatcatcaactacttcaagggcggcaagctgcggttcaagaagatcaaacctgaagccttcgaagccaacagattctacaccgtgatcaacaaaaagagcggcgagatcgtgcccatggaggtgaacttcaacttcgacgaccccaacctgatcatcctgcctctggcctttggcaagagacagggcagagaattcatctggaacgacctgctgtccctggaaaccggcagcctgaagctggccaacggaagagtgatcgagaagacactgtacaacagaagaacccggcaggatgagcctgccctgttcgtggccctgaccttcgagcggcgggaggtcctggactcctccaatatcaaaccaatgaacctgatcggcgtggcaagaggcgaaaacatccccgccgtgatcgccctgaccgaccccgagggctgcccactgagccggtttaaggatagcctgggaaacccaacccacatcctgagaatcggcgagagctataaggagaagcagcggaccatccaggccaagaaggaggtggagcagcggagagccggcggctacagccggaagtacgccagcaaagccaagaatctggcagacgatatggtgagaaacaccgctagagatctgctgtactacgccgtgacccaggatgccatgctgatcttcgccaacctgagccggggcttcggccggcagggcaagcggaccttcatggccgagagacagtacacacggatggaggactggctgaccgccaagctggcctacgagggcctgagcaagacctacctgtccaagacactggcccagtacacctccaagacatgcagcaactgtgggtttaccatcaccagcgccgactacgacagggtgctggagaagctgaagaagacagcaacaggctggatgaccacaattaacggcaaggagctgaaggtggagggccagattacctactacaacagatacaagagacagaacgtagtcaaggacctgtccgtcgagctggatagactgagcgaagaatctgtgaacaacgacatctcctcctggacaaagggcagaagcggagaagctctgagcctcctgaagaaaagattctcccatagacccgtgcaggagaagttcgtgtgcctgaactgcggcttcgagacacacgcagccgagcaagccgccctgaacatcgccagatcctggctgttcctgcggagccaggagtacaagaaataccagacaaacaagacaaccggcaacaccgataagagagccttcgtcgagacctggcagtccttttaccggaagaagcttaaggaggtgtggaaacctgccgtgcggtctggcggatctggcggaggctccaccagccccaagaaaaagagaaaagtctaagctgccttctgcggggcttgccttctggccatgcccttcttctctcccttgcacctgtacctcttggtctttgaataaagcctgagtaggaaggctagcaaaaaaaaaaaaaaaaaaaaaaaaaaaaaaaaaaaaaaaaaaaaaaaaaaaaaaaaaaaaaaaaaaaaaaaaaaaaaaaa

SEQ ID NO: 12152 - RNA, 5785 nt, synthetic construct
  source 1..5785: mol_type = other RNA
aggaaataagagagaaaagaagagtaagaagaaatataagagccaccatggcccctaagaagaagcgtaaagtgagccggatggaacgcctcgtctacgaggtgcggcagaagtgcagaaacatcgaggacatctgcatctcctgcggatctctgaacgtgaccctggagcacccactgttcatcggcggcatgtgccagaactgtaaaaactgttttctggagtgtgcctatcaatacgacgatgacggctaccagagctactgcaccatctgttgcggcggaagagaggtgctgatgtgtggaaataacaactgctgccggtgcttctgcgtggaatgcgtggacctgctggtgggccccggcgccgcccaggccgctattaaggaagatccttggaactgctacatgtgcggccacaagggcacatacggcctgctgagacggagagaggactggcctagcagactgcagatgttcttcgccaataaccacgaccaggagttcgacccccctaaggtgtaccctcccgtccccgccgagaagagaaagcccatccgggtcctgagcctgttcgatggcatcgccaccggtctgctggtgctgaaggacctgggcatccaggtggataggtacattgcctccgaggtgtgcgaggactccatcaccgtgggaatggtgcgtcatcagggcaagatcatgtacgtgggcgacgtgcggagcgtgacacagaagcatatccaggagtggggccctttcgacctggtgatcggcggcagcccttgcaatgacctgagcatcgtgaacccagcccggaagggcctgtacgagggaaccggcagactgttcttcgagttttacagactgctgcacgacgcccggcctaaggaaggcgacgaccggcccttcttttggctgttcgagaatgtggtggccatgggagtcagcgacaagcgggatattagccggttcctggagagcaaccccgtgatgatcgatgccaaggaagtgagcgccgcccaccgggccagatacttctggggcaatctgcctggcatgaacagacccctggccagcaccgtgaacgacaagctggagctgcaggagtgcctggagcacggccggatcgccaagttcagcaaggtgagaaccatcaccacccgaagcaacagcatcaaacaaggcaaggaccagcactttcctgtgttcatgaacgagaaggaggacatcctgtggtgtaccgagatggagagagtgttcgggttcccagtccactacacagatgtcagcaacatgtctagactggccagacagagactgctgggaagaagctggtccgtccctgtgatcagacacctgttcgcccctctgaaggagtacttcgcctgcgtgagcagcggcaacagcaacgccaacagccggggccccagcttctctagcggcctggtgccactgtccctgagagggagccacatgggccccatggagatctacaaaaccgtgagcgcctggaagcggcagcctgtgcgcgtgctgagcctgtttcggaatatcgataaagtcctgaaaagcctgggattcctggagagcggctctggctccggcggtggcaccctgaagtacgtggaggatgtgacaaacgtggtcagacgggatgtggagaagtggggccccttcgatctggtgtacggcagcacccaacccctgggcagctcttgtgaccggtgccctggctggtacatgtttcagttccaccggatcctgcagtacgccctgccgagacaggagtcccagcggccattcttttggattttcatggacaacttgctgctgaccgaggatgaccaggaaactaccactcggttcctgcagaccgaagccgtgaccctgcaggacgtgagaggccgggactaccagaacgccatgcgggtgtggtccaacatccctggactgaaaagcaagcacgcacctctgacccctaaagaagaggagtacctgcaggcccaggtgcggagcagaagcaagctggacgcccctaaggtggatctgctggtgaagaattgcctcctgcccctgagagagtacttcaagtatttcagccagaatagtctgcccctgggaggcagcggcggcggcagccagagcctggtgaccttcggcgacgtggccgtggacttcagccaggaggagtgggagcagctgacctgcgcccagagggccctgtacagggacgtgatgctggagaactacaggaacctggtgagcctgggcctgtgcttcagcaagcccgacatgatcagcagcctggagcagagggaggagccctggatggccaagaggaagctgaccaggggcccctgccccgactggagggccgtgggcggcccaagcagcggcgcccctcctcccagcggcggcagcccagccggctccccaacctctaccgaggagggcacctctgagtccgccacccccgagagcggccctggcacctccaccgagcccagcgagggcagcgcacccggcagccctgccggcagccccacctccacagaggagggaaccagcaccgagcccagcgaaggcagcgccccaggcaccagcaccgagcctagtgagcaggagattaaacggatcaacaagatcagaagaagacttgtgaaagacagcaacaccaagaaggccggcaagacaggccccatgaaaaccctgctggttagagtgatgacacccgatctgagagagcggctggaaaacctgagaaagaagcctgaaaatatcccccagcccatcagcaatacatctagagccaacctgaataagctgctgaccgattacaccgaaatgaagaaggcgatcctgcatgtgtactgggaagagttccagaaggaccctgtgggcctgatgagccgggtggcccagcctgccagcaagaagatcgatcagaacaagctgaaacctgagatggacgagaagggcaacctgaccaccgccggctttgcctgctctcagtgtggccagcccctgttcgtgtacaagctggagcaggtgtctgagaagggcaaggcttacaccaactacttcggacggtgcaatgtggccgagcacgaaaagctgatcctgctggcccagctgaagcccgagaaggatagcgacgaagccgtgacatatagcctgggaaagtttgggcagagggccctggatttctacagcattcatgtgaccaaggagtccacccaccccgtgaagcccctggcccagatcgccggaaacagatacgcctccggacctgtgggaaaggccctgagcgacgcatgtatgggcacaatcgcctccttcctgtctaagtaccaggacatcatcatcgaacaccagaaggtggtgaagggcaaccagaagagactggagagcctgcgggagctggccggcaaggaaaacctggaataccctagcgtgaccctgccacctcagcctcacaccaaggagggcgttgatgcctacaacgaagtgatcgcccgggtgcgaatgtgggtgaacctgaacctgtggcagaagctgaagctaagcagagatgatgccaagcctctgctgagactgaagggattcccttcctttcctctggtcgagagacaggccaacgaagtggactggtgggacatggtgtgtaacgtgaagaagctgatcaacgagaaaaaggaggatggcaaggtgttttggcagaatctggctggctacaagagacaggaagccctgagaccatacctgagcagcgaggaagatcggaagaagggaaagaaattcgctcggtaccagctgggcgacctgctgctgcacctggaaaagaagcacggcgaggactggggaaaggtgtacgacgaggcctgggagcggattgacaagaaagtggaaggcctgagcaagcacatcaagctggaagaggaacggagaagcgaggacgcccagagcaaggccgccctgaccgactggctgcgggctaaggccagcttcgtgatcgagggcctgaaggaggccgacaaggacgagttctgcagatgcgagctgaagctgcagaagtggtacggggacctgcggggaaagcccttcgccatcgaagccgagaacagcatcctggacatcagcggcttcagcaagcagtacaactgtgccttcatctggcagaaggacggcgtgaagaagctgaacctgtacctgatcatcaactacttcaagggcggcaagctgcggttcaagaagatcaaacctgaagccttcgaagccaacagattctacaccgtgatcaacaaaaagagcggcgagatcgtgcccatggaggtgaacttcaacttcgacgaccccaacctgatcatcctgcctctggcctttggcaagagacagggcagagaattcatctggaacgacctgctgtccctggaaaccggcagcctgaagctggccaacggaagagtgatcgagaagacactgtacaacagaagaacccggcaggatgagcctgccctgttcgtggccctgaccttcgagcggcgggaggtcctggactcctccaatatcaaaccaatgaacctgatcggcgtggcaagaggcgaaaacatccccgccgtgatcgccctgaccgaccccgagggctgcccactgagccggtttaaggatagcctgggaaacccaacccacatcctgagaatcggcgagagctataaggagaagcagcggaccatccaggccaagaaggaggtggagcagcggagagccggcggctacagccggaagtacgccagcaaagccaagaatctggcagacgatatggtgagaaacaccgctagagatctgctgtactacgccgtgacccaggatgccatgctgatcttcgccaacctgagccggggcttcggccggcagggcaagcggaccttcatggccgagagacagtacacacggatggaggactggctgaccgccaagctggcctacgagggcctgagcaagacctacctgtccaagacactggcccagtacacctccaagacatgcagcaactgtgggtttaccatcaccagcgccgactacgacagggtgctggagaagctgaagaagacagcaacaggctggatgaccacaattaacggcaaggagctgaaggtggagggccagattacctactacaacagatacaagagacagaacgtagtcaaggacctgtccgtcgagctggatagactgagcgaagaatctgtgaacaacgacatctcctcctggacaaagggcagaagcggagaagctctgagcctcctgaagaaaagattctcccatagacccgtgcaggagaagttcgtgtgcctgaactgcggcttcgagacacacgcagccgagcaagccgccctgaacatcgccagatcctggctgttcctgcggagccaggagtacaagaaataccagacaaacaagacaaccggcaacaccgataagagagccttcgtcgagacctggcagtccttttaccggaagaagcttaaggaggtgtggaaacctgccgtgcggtctggcggatctggcggaggctccaccagccccaagaaaaagagaaaagtctaagctgccttctgcggggcttgccttctggccatgcccttcttctctcccttgcacctgtacctcttggtctttgaataaagcctgagtaggaaggctagcaaaaaaaaaaaaaaaaaaaaaaaaaaaaaaaaaaaaaaaaaaaaaaaaaaaaaaaaaaaaaaaaaaaaaaaaaaaaaaaa

SEQ ID NO: 12153 - RNA, 5785 nt, synthetic construct
  source 1..5785: mol_type = other RNA
aggaaataagagagaaaagaagagtaagaagaaatataagagccaccatggcccctaagaagaagcgtaaagtgagccggatggaacgcctcgtctacgaggtgcggcagaagtgcagaaacatcgaggacatctgcatctcctgcggatctctgaacgtgaccctggagcacccactgttcatcggcggcatgtgccagaactgtaaaaactgttttctggagtgtgcctatcaatacgacgatgacggctaccagagctactgcaccatctgttgcggcggaagagaggtgctgatgtgtggaaataacaactgctgccggtgcttctgcgtggaatgcgtggacctgctggtgggccccggcgccgcccaggccgctattaaggaagatccttggaactgctacatgtgcggccacaagggcacatacggcctgctgagacggagagaggactggcctagcagactgcagatgttcttcgccaataaccacgaccaggagttcgacccccctaaggtgtaccctcccgtccccgccgagaagagaaagcccatccgggtcctgagcctgttcgatggcatcgccaccggtctgctggtgctgaaggacctgggcatccaggtggataggtacattgcctccgaggtgtgcgaggactccatcaccgtgggaatggtgcgtcatcagggcaagatcatgtacgtgggcgacgtgcggagcgtgacacagaagcatatccaggagtggggccctttcgacctggtgatcggcggcagcccttgcaatgacctgagcatcgtgaacccagcccggaagggcctgtacgagggaaccggcagactgttcttcgagttttacagactgctgcacgacgcccggcctaaggaaggcgacgaccggcccttcttttggctgttcgagaatgtggtggccatgggagtcagcgacaagcgggatattagccggttcctggagagcaaccccgtgatgatcgatgccaaggaagtgagcgccgcccaccgggccagatacttctggggcaatctgcctggcatgaacagacccctggccagcaccgtgaacgacaagctggagctgcaggagtgcctggagcacggccggatcgccaagttcagcaaggtgagaaccatcaccacccgaagcaacagcatcaaacaaggcaaggaccagcactttcctgtgttcatgaacgagaaggaggacatcctgtggtgtaccgagatggagagagtgttcgggttcccagtccactacacagatgtcagcaacatgtctagactggccagacagagactgctgggaagaagctggtccgtccctgtgatcagacacctgttcgcccctctgaaggagtacttcgcctgcgtgagcagcggcaacagcaacgccaacagccggggccccagcttctctagcggcctggtgccactgtccctgagagggagccacatgggccccatggagatctacaaaaccgtgagcgcctggaagcggcagcctgtgcgcgtgctgagcctgtttcggaatatcgataaagtcctgaaaagcctgggattcctggagagcggctctggctccggcggtggcaccctgaagtacgtggaggatgtgacaaacgtggtcagacgggatgtggagaagtggggccccttcgatctggtgtacggcagcacccaacccctgggcagctcttgtgaccggtgccctggctggtacatgtttcagttccaccggatcctgcagtacgccctgccgagacaggagtcccagcggccattcttttggattttcatggacaacttgctgctgaccgaggatgaccaggaaactaccactcggttcctgcagaccgaagccgtgaccctgcaggacgtgagaggccgggactaccagaacgccatgcgggtgtggtccaacatccctggactgaaaagcaagcacgcacctctgacccctaaagaagaggagtacctgcaggcccaggtgcggagcagaagcaagctggacgcccctaaggtggatctgctggtgaagaattgcctcctgcccctgagagagtacttcaagtatttcagccagaatagtctgcccctgggaggcagcggcggcggcatgcacctgaccgcctggccccagaagagcgtgaccttcgaggacgtggccgtgtacttcacccaggccgagtgggacggcctgagccccgcccagaggaccctgtacagggacgtgatgctggagaactacggcaacgtggccagcctgggcttccccctgctgaagcccgccgtgatcagccagctggagggcggcggcgagctgggcggccccagccccctggccgccggcaccggcctgggcggcccaagcagcggcgcccctcctcccagcggcggcagcccagccggctccccaacctctaccgaggagggcacctctgagtccgccacccccgagagcggccctggcacctccaccgagcccagcgagggcagcgcacccggcagccctgccggcagccccacctccacagaggagggaaccagcaccgagcccagcgaaggcagcgccccaggcaccagcaccgagcctagtgagcaggagattaaacggatcaacaagatcagaagaagacttgtgaaagacagcaacaccaagaaggccggcaagacaggccccatgaaaaccctgctggttagagtgatgacacccgatctgagagagcggctggaaaacctgagaaagaagcctgaaaatatcccccagcccatcagcaatacatctagagccaacctgaataagctgctgaccgattacaccgaaatgaagaaggcgatcctgcatgtgtactgggaagagttccagaaggaccctgtgggcctgatgagccgggtggcccagcctgccagcaagaagatcgatcagaacaagctgaaacctgagatggacgagaagggcaacctgaccaccgccggctttgcctgctctcagtgtggccagcccctgttcgtgtacaagctggagcaggtgtctgagaagggcaaggcttacaccaactacttcggacggtgcaatgtggccgagcacgaaaagctgatcctgctggcccagctgaagcccgagaaggatagcgacgaagccgtgacatatagcctgggaaagtttgggcagagggccctggatttctacagcattcatgtgaccaaggagtccacccaccccgtgaagcccctggcccagatcgccggaaacagatacgcctccggacctgtgggaaaggccctgagcgacgcatgtatgggcacaatcgcctccttcctgtctaagtaccaggacatcatcatcgaacaccagaaggtggtgaagggcaaccagaagagactggagagcctgcgggagctggccggcaaggaaaacctggaataccctagcgtgaccctgccacctcagcctcacaccaaggagggcgttgatgcctacaacgaagtgatcgcccgggtgcgaatgtgggtgaacctgaacctgtggcagaagctgaagctaagcagagatgatgccaagcctctgctgagactgaagggattcccttcctttcctctggtcgagagacaggccaacgaagtggactggtgggacatggtgtgtaacgtgaagaagctgatcaacgagaaaaaggaggatggcaaggtgttttggcagaatctggctggctacaagagacaggaagccctgagaccatacctgagcagcgaggaagatcggaagaagggaaagaaattcgctcggtaccagctgggcgacctgctgctgcacctggaaaagaagcacggcgaggactggggaaaggtgtacgacgaggcctgggagcggattgacaagaaagtggaaggcctgagcaagcacatcaagctggaagaggaacggagaagcgaggacgcccagagcaaggccgccctgaccgactggctgcgggctaaggccagcttcgtgatcgagggcctgaaggaggccgacaaggacgagttctgcagatgcgagctgaagctgcagaagtggtacggggacctgcggggaaagcccttcgccatcgaagccgagaacagcatcctggacatcagcggcttcagcaagcagtacaactgtgccttcatctggcagaaggacggcgtgaagaagctgaacctgtacctgatcatcaactacttcaagggcggcaagctgcggttcaagaagatcaaacctgaagccttcgaagccaacagattctacaccgtgatcaacaaaaagagcggcgagatcgtgcccatggaggtgaacttcaacttcgacgaccccaacctgatcatcctgcctctggcctttggcaagagacagggcagagaattcatctggaacgacctgctgtccctggaaaccggcagcctgaagctggccaacggaagagtgatcgagaagacactgtacaacagaagaacccggcaggatgagcctgccctgttcgtggccctgaccttcgagcggcgggaggtcctggactcctccaatatcaaaccaatgaacctgatcggcgtggcaagaggcgaaaacatccccgccgtgatcgccctgaccgaccccgagggctgcccactgagccggtttaaggatagcctgggaaacccaacccacatcctgagaatcggcgagagctataaggagaagcagcggaccatccaggccaagaaggaggtggagcagcggagagccggcggctacagccggaagtacgccagcaaagccaagaatctggcagacgatatggtgagaaacaccgctagagatctgctgtactacgccgtgacccaggatgccatgctgatcttcgccaacctgagccggggcttcggccggcagggcaagcggaccttcatggccgagagacagtacacacggatggaggactggctgaccgccaagctggcctacgagggcctgagcaagacctacctgtccaagacactggcccagtacacctccaagacatgcagcaactgtgggtttaccatcaccagcgccgactacgacagggtgctggagaagctgaagaagacagcaacaggctggatgaccacaattaacggcaaggagctgaaggtggagggccagattacctactacaacagatacaagagacagaacgtagtcaaggacctgtccgtcgagctggatagactgagcgaagaatctgtgaacaacgacatctcctcctggacaaagggcagaagcggagaagctctgagcctcctgaagaaaagattctcccatagacccgtgcaggagaagttcgtgtgcctgaactgcggcttcgagacacacgcagccgagcaagccgccctgaacatcgccagatcctggctgttcctgcggagccaggagtacaagaaataccagacaaacaagacaaccggcaacaccgataagagagccttcgtcgagacctggcagtccttttaccggaagaagcttaaggaggtgtggaaacctgccgtgcggtctggcggatctggcggaggctccaccagccccaagaaaaagagaaaagtctaagctgccttctgcggggcttgccttctggccatgcccttcttctctcccttgcacctgtacctcttggtctttgaataaagcctgagtaggaaggctagcaaaaaaaaaaaaaaaaaaaaaaaaaaaaaaaaaaaaaaaaaaaaaaaaaaaaaaaaaaaaaaaaaaaaaaaaaaaaaaaa

SEQ ID NO: 12154 - RNA, 5785 nt, synthetic construct
  source 1..5785: mol_type = other RNA
aggaaataagagagaaaagaagagtaagaagaaatataagagccaccatggcccctaagaagaagcgtaaagtgagccggatggaacgcctcgtctacgaggtgcggcagaagtgcagaaacatcgaggacatctgcatctcctgcggatctctgaacgtgaccctggagcacccactgttcatcggcggcatgtgccagaactgtaaaaactgttttctggagtgtgcctatcaatacgacgatgacggctaccagagctactgcaccatctgttgcggcggaagagaggtgctgatgtgtggaaataacaactgctgccggtgcttctgcgtggaatgcgtggacctgctggtgggccccggcgccgcccaggccgctattaaggaagatccttggaactgctacatgtgcggccacaagggcacatacggcctgctgagacggagagaggactggcctagcagactgcagatgttcttcgccaataaccacgaccaggagttcgacccccctaaggtgtaccctcccgtccccgccgagaagagaaagcccatccgggtcctgagcctgttcgatggcatcgccaccggtctgctggtgctgaaggacctgggcatccaggtggataggtacattgcctccgaggtgtgcgaggactccatcaccgtgggaatggtgcgtcatcagggcaagatcatgtacgtgggcgacgtgcggagcgtgacacagaagcatatccaggagtggggccctttcgacctggtgatcggcggcagcccttgcaatgacctgagcatcgtgaacccagcccggaagggcctgtacgagggaaccggcagactgttcttcgagttttacagactgctgcacgacgcccggcctaaggaaggcgacgaccggcccttcttttggctgttcgagaatgtggtggccatgggagtcagcgacaagcgggatattagccggttcctggagagcaaccccgtgatgatcgatgccaaggaagtgagcgccgcccaccgggccagatacttctggggcaatctgcctggcatgaacagacccctggccagcaccgtgaacgacaagctggagctgcaggagtgcctggagcacggccggatcgccaagttcagcaaggtgagaaccatcaccacccgaagcaacagcatcaaacaaggcaaggaccagcactttcctgtgttcatgaacgagaaggaggacatcctgtggtgtaccgagatggagagagtgttcgggttcccagtccactacacagatgtcagcaacatgtctagactggccagacagagactgctgggaagaagctggtccgtccctgtgatcagacacctgttcgcccctctgaaggagtacttcgcctgcgtgagcagcggcaacagcaacgccaacagccggggccccagcttctctagcggcctggtgccactgtccctgagagggagccacatgggccccatggagatctacaaaaccgtgagcgcctggaagcggcagcctgtgcgcgtgctgagcctgtttcggaatatcgataaagtcctgaaaagcctgggattcctggagagcggctctggctccggcggtggcaccctgaagtacgtggaggatgtgacaaacgtggtcagacgggatgtggagaagtggggccccttcgatctggtgtacggcagcacccaacccctgggcagctcttgtgaccggtgccctggctggtacatgtttcagttccaccggatcctgcagtacgccctgccgagacaggagtcccagcggccattcttttggattttcatggacaacttgctgctgaccgaggatgaccaggaaactaccactcggttcctgcagaccgaagccgtgaccctgcaggacgtgagaggccgggactaccagaacgccatgcgggtgtggtccaacatccctggactgaaaagcaagcacgcacctctgacccctaaagaagaggagtacctgcaggcccaggtgcggagcagaagcaagctggacgcccctaaggtggatctgctggtgaagaattgcctcctgcccctgagagagtacttcaagtatttcagccagaatagtctgcccctgggaggcagcggcggcggcgcccccgtgaccttcggcgacctggccatctacttcagccaggaggagtgggagtggctgagccccatccagaaggacctgtacgaggacgtgatgctggagaactaccagaacctggtgagcctgggcctgtgcttcaggaggcccaacgtgatcaccctgctggagaggggcaaggccccctggatggtggaccccgtgaagaggaggaggggcctggacctgggcagcaagggcgagaccggcggcccaagcagcggcgcccctcctcccagcggcggcagcccagccggctccccaacctctaccgaggagggcacctctgagtccgccacccccgagagcggccctggcacctccaccgagcccagcgagggcagcgcacccggcagccctgccggcagccccacctccacagaggagggaaccagcaccgagcccagcgaaggcagcgccccaggcaccagcaccgagcctagtgagcaggagattaaacggatcaacaagatcagaagaagacttgtgaaagacagcaacaccaagaaggccggcaagacaggccccatgaaaaccctgctggttagagtgatgacacccgatctgagagagcggctggaaaacctgagaaagaagcctgaaaatatcccccagcccatcagcaatacatctagagccaacctgaataagctgctgaccgattacaccgaaatgaagaaggcgatcctgcatgtgtactgggaagagttccagaaggaccctgtgggcctgatgagccgggtggcccagcctgccagcaagaagatcgatcagaacaagctgaaacctgagatggacgagaagggcaacctgaccaccgccggctttgcctgctctcagtgtggccagcccctgttcgtgtacaagctggagcaggtgtctgagaagggcaaggcttacaccaactacttcggacggtgcaatgtggccgagcacgaaaagctgatcctgctggcccagctgaagcccgagaaggatagcgacgaagccgtgacatatagcctgggaaagtttgggcagagggccctggatttctacagcattcatgtgaccaaggagtccacccaccccgtgaagcccctggcccagatcgccggaaacagatacgcctccggacctgtgggaaaggccctgagcgacgcatgtatgggcacaatcgcctccttcctgtctaagtaccaggacatcatcatcgaacaccagaaggtggtgaagggcaaccagaagagactggagagcctgcgggagctggccggcaaggaaaacctggaataccctagcgtgaccctgccacctcagcctcacaccaaggagggcgttgatgcctacaacgaagtgatcgcccgggtgcgaatgtgggtgaacctgaacctgtggcagaagctgaagctaagcagagatgatgccaagcctctgctgagactgaagggattcccttcctttcctctggtcgagagacaggccaacgaagtggactggtgggacatggtgtgtaacgtgaagaagctgatcaacgagaaaaaggaggatggcaaggtgttttggcagaatctggctggctacaagagacaggaagccctgagaccatacctgagcagcgaggaagatcggaagaagggaaagaaattcgctcggtaccagctgggcgacctgctgctgcacctggaaaagaagcacggcgaggactggggaaaggtgtacgacgaggcctgggagcggattgacaagaaagtggaaggcctgagcaagcacatcaagctggaagaggaacggagaagcgaggacgcccagagcaaggccgccctgaccgactggctgcgggctaaggccagcttcgtgatcgagggcctgaaggaggccgacaaggacgagttctgcagatgcgagctgaagctgcagaagtggtacggggacctgcggggaaagcccttcgccatcgaagccgagaacagcatcctggacatcagcggcttcagcaagcagtacaactgtgccttcatctggcagaaggacggcgtgaagaagctgaacctgtacctgatcatcaactacttcaagggcggcaagctgcggttcaagaagatcaaacctgaagccttcgaagccaacagattctacaccgtgatcaacaaaaagagcggcgagatcgtgcccatggaggtgaacttcaacttcgacgaccccaacctgatcatcctgcctctggcctttggcaagagacagggcagagaattcatctggaacgacctgctgtccctggaaaccggcagcctgaagctggccaacggaagagtgatcgagaagacactgtacaacagaagaacccggcaggatgagcctgccctgttcgtggccctgaccttcgagcggcgggaggtcctggactcctccaatatcaaaccaatgaacctgatcggcgtggcaagaggcgaaaacatccccgccgtgatcgccctgaccgaccccgagggctgcccactgagccggtttaaggatagcctgggaaacccaacccacatcctgagaatcggcgagagctataaggagaagcagcggaccatccaggccaagaaggaggtggagcagcggagagccggcggctacagccggaagtacgccagcaaagccaagaatctggcagacgatatggtgagaaacaccgctagagatctgctgtactacgccgtgacccaggatgccatgctgatcttcgccaacctgagccggggcttcggccggcagggcaagcggaccttcatggccgagagacagtacacacggatggaggactggctgaccgccaagctggcctacgagggcctgagcaagacctacctgtccaagacactggcccagtacacctccaagacatgcagcaactgtgggtttaccatcaccagcgccgactacgacagggtgctggagaagctgaagaagacagcaacaggctggatgaccacaattaacggcaaggagctgaaggtggagggccagattacctactacaacagatacaagagacagaacgtagtcaaggacctgtccgtcgagctggatagactgagcgaagaatctgtgaacaacgacatctcctcctggacaaagggcagaagcggagaagctctgagcctcctgaagaaaagattctcccatagacccgtgcaggagaagttcgtgtgcctgaactgcggcttcgagacacacgcagccgagcaagccgccctgaacatcgccagatcctggctgttcctgcggagccaggagtacaagaaataccagacaaacaagacaaccggcaacaccgataagagagccttcgtcgagacctggcagtccttttaccggaagaagcttaaggaggtgtggaaacctgccgtgcggtctggcggatctggcggaggctccaccagccccaagaaaaagagaaaagtctaagctgccttctgcggggcttgccttctggccatgcccttcttctctcccttgcacctgtacctcttggtctttgaataaagcctgagtaggaaggctagcaaaaaaaaaaaaaaaaaaaaaaaaaaaaaaaaaaaaaaaaaaaaaaaaaaaaaaaaaaaaaaaaaaaaaaaaaaaaaaaa

SEQ ID NO: 12155 - RNA, 5785 nt, synthetic construct
  source 1..5785: mol_type = other RNA
aggaaataagagagaaaagaagagtaagaagaaatataagagccaccatggcccctaagaagaagcgtaaagtgagccggatggaacgcctcgtctacgaggtgcggcagaagtgcagaaacatcgaggacatctgcatctcctgcggatctctgaacgtgaccctggagcacccactgttcatcggcggcatgtgccagaactgtaaaaactgttttctggagtgtgcctatcaatacgacgatgacggctaccagagctactgcaccatctgttgcggcggaagagaggtgctgatgtgtggaaataacaactgctgccggtgcttctgcgtggaatgcgtggacctgctggtgggccccggcgccgcccaggccgctattaaggaagatccttggaactgctacatgtgcggccacaagggcacatacggcctgctgagacggagagaggactggcctagcagactgcagatgttcttcgccaataaccacgaccaggagttcgacccccctaaggtgtaccctcccgtccccgccgagaagagaaagcccatccgggtcctgagcctgttcgatggcatcgccaccggtctgctggtgctgaaggacctgggcatccaggtggataggtacattgcctccgaggtgtgcgaggactccatcaccgtgggaatggtgcgtcatcagggcaagatcatgtacgtgggcgacgtgcggagcgtgacacagaagcatatccaggagtggggccctttcgacctggtgatcggcggcagcccttgcaatgacctgagcatcgtgaacccagcccggaagggcctgtacgagggaaccggcagactgttcttcgagttttacagactgctgcacgacgcccggcctaaggaaggcgacgaccggcccttcttttggctgttcgagaatgtggtggccatgggagtcagcgacaagcgggatattagccggttcctggagagcaaccccgtgatgatcgatgccaaggaagtgagcgccgcccaccgggccagatacttctggggcaatctgcctggcatgaacagacccctggccagcaccgtgaacgacaagctggagctgcaggagtgcctggagcacggccggatcgccaagttcagcaaggtgagaaccatcaccacccgaagcaacagcatcaaacaaggcaaggaccagcactttcctgtgttcatgaacgagaaggaggacatcctgtggtgtaccgagatggagagagtgttcgggttcccagtccactacacagatgtcagcaacatgtctagactggccagacagagactgctgggaagaagctggtccgtccctgtgatcagacacctgttcgcccctctgaaggagtacttcgcctgcgtgagcagcggcaacagcaacgccaacagccggggccccagcttctctagcggcctggtgccactgtccctgagagggagccacatgggccccatggagatctacaaaaccgtgagcgcctggaagcggcagcctgtgcgcgtgctgagcctgtttcggaatatcgataaagtcctgaaaagcctgggattcctggagagcggctctggctccggcggtggcaccctgaagtacgtggaggatgtgacaaacgtggtcagacgggatgtggagaagtggggccccttcgatctggtgtacggcagcacccaacccctgggcagctcttgtgaccggtgccctggctggtacatgtttcagttccaccggatcctgcagtacgccctgccgagacaggagtcccagcggccattcttttggattttcatggacaacttgctgctgaccgaggatgaccaggaaactaccactcggttcctgcagaccgaagccgtgaccctgcaggacgtgagaggccgggactaccagaacgccatgcgggtgtggtccaacatccctggactgaaaagcaagcacgcacctctgacccctaaagaagaggagtacctgcaggcccaggtgcggagcagaagcaagctggacgcccctaaggtggatctgctggtgaagaattgcctcctgcccctgagagagtacttcaagtatttcagccagaatagtctgcccctgggaggcagcggcggcggcagcaaggcccccatcaccttcggcgacctggccatctacttcagccaggaggagtgggagtggctgagccccatccagaaggacctgtacgaggacgtgatgctggagaactacaggaacctggtgagcctgggcctgagcttcaggaggcccaacgtgatcaccctgctggagaagggcaaggccccctggatgatcgagcccgtgaggaggaggagggcccccgacagcggcagcaagtgcggcggcccaagcagcggcgcccctcctcccagcggcggcagcccagccggctccccaacctctaccgaggagggcacctctgagtccgccacccccgagagcggccctggcacctccaccgagcccagcgagggcagcgcacccggcagccctgccggcagccccacctccacagaggagggaaccagcaccgagcccagcgaaggcagcgccccaggcaccagcaccgagcctagtgagcaggagattaaacggatcaacaagatcagaagaagacttgtgaaagacagcaacaccaagaaggccggcaagacaggccccatgaaaaccctgctggttagagtgatgacacccgatctgagagagcggctggaaaacctgagaaagaagcctgaaaatatcccccagcccatcagcaatacatctagagccaacctgaataagctgctgaccgattacaccgaaatgaagaaggcgatcctgcatgtgtactgggaagagttccagaaggaccctgtgggcctgatgagccgggtggcccagcctgccagcaagaagatcgatcagaacaagctgaaacctgagatggacgagaagggcaacctgaccaccgccggctttgcctgctctcagtgtggccagcccctgttcgtgtacaagctggagcaggtgtctgagaagggcaaggcttacaccaactacttcggacggtgcaatgtggccgagcacgaaaagctgatcctgctggcccagctgaagcccgagaaggatagcgacgaagccgtgacatatagcctgggaaagtttgggcagagggccctggatttctacagcattcatgtgaccaaggagtccacccaccccgtgaagcccctggcccagatcgccggaaacagatacgcctccggacctgtgggaaaggccctgagcgacgcatgtatgggcacaatcgcctccttcctgtctaagtaccaggacatcatcatcgaacaccagaaggtggtgaagggcaaccagaagagactggagagcctgcgggagctggccggcaaggaaaacctggaataccctagcgtgaccctgccacctcagcctcacaccaaggagggcgttgatgcctacaacgaagtgatcgcccgggtgcgaatgtgggtgaacctgaacctgtggcagaagctgaagctaagcagagatgatgccaagcctctgctgagactgaagggattcccttcctttcctctggtcgagagacaggccaacgaagtggactggtgggacatggtgtgtaacgtgaagaagctgatcaacgagaaaaaggaggatggcaaggtgttttggcagaatctggctggctacaagagacaggaagccctgagaccatacctgagcagcgaggaagatcggaagaagggaaagaaattcgctcggtaccagctgggcgacctgctgctgcacctggaaaagaagcacggcgaggactggggaaaggtgtacgacgaggcctgggagcggattgacaagaaagtggaaggcctgagcaagcacatcaagctggaagaggaacggagaagcgaggacgcccagagcaaggccgccctgaccgactggctgcgggctaaggccagcttcgtgatcgagggcctgaaggaggccgacaaggacgagttctgcagatgcgagctgaagctgcagaagtggtacggggacctgcggggaaagcccttcgccatcgaagccgagaacagcatcctggacatcagcggcttcagcaagcagtacaactgtgccttcatctggcagaaggacggcgtgaagaagctgaacctgtacctgatcatcaactacttcaagggcggcaagctgcggttcaagaagatcaaacctgaagccttcgaagccaacagattctacaccgtgatcaacaaaaagagcggcgagatcgtgcccatggaggtgaacttcaacttcgacgaccccaacctgatcatcctgcctctggcctttggcaagagacagggcagagaattcatctggaacgacctgctgtccctggaaaccggcagcctgaagctggccaacggaagagtgatcgagaagacactgtacaacagaagaacccggcaggatgagcctgccctgttcgtggccctgaccttcgagcggcgggaggtcctggactcctccaatatcaaaccaatgaacctgatcggcgtggcaagaggcgaaaacatccccgccgtgatcgccctgaccgaccccgagggctgcccactgagccggtttaaggatagcctgggaaacccaacccacatcctgagaatcggcgagagctataaggagaagcagcggaccatccaggccaagaaggaggtggagcagcggagagccggcggctacagccggaagtacgccagcaaagccaagaatctggcagacgatatggtgagaaacaccgctagagatctgctgtactacgccgtgacccaggatgccatgctgatcttcgccaacctgagccggggcttcggccggcagggcaagcggaccttcatggccgagagacagtacacacggatggaggactggctgaccgccaagctggcctacgagggcctgagcaagacctacctgtccaagacactggcccagtacacctccaagacatgcagcaactgtgggtttaccatcaccagcgccgactacgacagggtgctggagaagctgaagaagacagcaacaggctggatgaccacaattaacggcaaggagctgaaggtggagggccagattacctactacaacagatacaagagacagaacgtagtcaaggacctgtccgtcgagctggatagactgagcgaagaatctgtgaacaacgacatctcctcctggacaaagggcagaagcggagaagctctgagcctcctgaagaaaagattctcccatagacccgtgcaggagaagttcgtgtgcctgaactgcggcttcgagacacacgcagccgagcaagccgccctgaacatcgccagatcctggctgttcctgcggagccaggagtacaagaaataccagacaaacaagacaaccggcaacaccgataagagagccttcgtcgagacctggcagtccttttaccggaagaagcttaaggaggtgtggaaacctgccgtgcggtctggcggatctggcggaggctccaccagccccaagaaaaagagaaaagtctaagctgccttctgcggggcttgccttctggccatgcccttcttctctcccttgcacctgtacctcttggtctttgaataaagcctgagtaggaaggctagcaaaaaaaaaaaaaaaaaaaaaaaaaaaaaaaaaaaaaaaaaaaaaaaaaaaaaaaaaaaaaaaaaaaaaaaaaaaaaaaa

SEQ ID NO: 12156 - RNA, 5785 nt, synthetic construct
  source 1..5785: mol_type = other RNA
aggaaataagagagaaaagaagagtaagaagaaatataagagccaccatggcccctaagaagaagcgtaaagtgagccggatggaacgcctcgtctacgaggtgcggcagaagtgcagaaacatcgaggacatctgcatctcctgcggatctctgaacgtgaccctggagcacccactgttcatcggcggcatgtgccagaactgtaaaaactgttttctggagtgtgcctatcaatacgacgatgacggctaccagagctactgcaccatctgttgcggcggaagagaggtgctgatgtgtggaaataacaactgctgccggtgcttctgcgtggaatgcgtggacctgctggtgggccccggcgccgcccaggccgctattaaggaagatccttggaactgctacatgtgcggccacaagggcacatacggcctgctgagacggagagaggactggcctagcagactgcagatgttcttcgccaataaccacgaccaggagttcgacccccctaaggtgtaccctcccgtccccgccgagaagagaaagcccatccgggtcctgagcctgttcgatggcatcgccaccggtctgctggtgctgaaggacctgggcatccaggtggataggtacattgcctccgaggtgtgcgaggactccatcaccgtgggaatggtgcgtcatcagggcaagatcatgtacgtgggcgacgtgcggagcgtgacacagaagcatatccaggagtggggccctttcgacctggtgatcggcggcagcccttgcaatgacctgagcatcgtgaacccagcccggaagggcctgtacgagggaaccggcagactgttcttcgagttttacagactgctgcacgacgcccggcctaaggaaggcgacgaccggcccttcttttggctgttcgagaatgtggtggccatgggagtcagcgacaagcgggatattagccggttcctggagagcaaccccgtgatgatcgatgccaaggaagtgagcgccgcccaccgggccagatacttctggggcaatctgcctggcatgaacagacccctggccagcaccgtgaacgacaagctggagctgcaggagtgcctggagcacggccggatcgccaagttcagcaaggtgagaaccatcaccacccgaagcaacagcatcaaacaaggcaaggaccagcactttcctgtgttcatgaacgagaaggaggacatcctgtggtgtaccgagatggagagagtgttcgggttcccagtccactacacagatgtcagcaacatgtctagactggccagacagagactgctgggaagaagctggtccgtccctgtgatcagacacctgttcgcccctctgaaggagtacttcgcctgcgtgagcagcggcaacagcaacgccaacagccggggccccagcttctctagcggcctggtgccactgtccctgagagggagccacatgggccccatggagatctacaaaaccgtgagcgcctggaagcggcagcctgtgcgcgtgctgagcctgtttcggaatatcgataaagtcctgaaaagcctgggattcctggagagcggctctggctccggcggtggcaccctgaagtacgtggaggatgtgacaaacgtggtcagacgggatgtggagaagtggggccccttcgatctggtgtacggcagcacccaacccctgggcagctcttgtgaccggtgccctggctggtacatgtttcagttccaccggatcctgcagtacgccctgccgagacaggagtcccagcggccattcttttggattttcatggacaacttgctgctgaccgaggatgaccaggaaactaccactcggttcctgcagaccgaagccgtgaccctgcaggacgtgagaggccgggactaccagaacgccatgcgggtgtggtccaacatccctggactgaaaagcaagcacgcacctctgacccctaaagaagaggagtacctgcaggcccaggtgcggagcagaagcaagctggacgcccctaaggtggatctgctggtgaagaattgcctcctgcccctgagagagtacttcaagtatttcagccagaatagtctgcccctgggaggcagcggcggcggcatggcccacaggagcgtgatgttcagcgacatcagcatcgacttcagccccgaggagtgggagtacctggacctggagcagaaggacctgtacagggacgtgatgctggagaactacagcaacctggtgagcctgggctgcttcatcagcaagcccgacgtgatcagcctgctggagcagggcaaggagccctggaaggtggtgaggaagaggaggaggcagtaccccgacctggagaccaagggcggcccaagcagcggcgcccctcctcccagcggcggcagcccagccggctccccaacctctaccgaggagggcacctctgagtccgccacccccgagagcggccctggcacctccaccgagcccagcgagggcagcgcacccggcagccctgccggcagccccacctccacagaggagggaaccagcaccgagcccagcgaaggcagcgccccaggcaccagcaccgagcctagtgagcaggagattaaacggatcaacaagatcagaagaagacttgtgaaagacagcaacaccaagaaggccggcaagacaggccccatgaaaaccctgctggttagagtgatgacacccgatctgagagagcggctggaaaacctgagaaagaagcctgaaaatatcccccagcccatcagcaatacatctagagccaacctgaataagctgctgaccgattacaccgaaatgaagaaggcgatcctgcatgtgtactgggaagagttccagaaggaccctgtgggcctgatgagccgggtggcccagcctgccagcaagaagatcgatcagaacaagctgaaacctgagatggacgagaagggcaacctgaccaccgccggctttgcctgctctcagtgtggccagcccctgttcgtgtacaagctggagcaggtgtctgagaagggcaaggcttacaccaactacttcggacggtgcaatgtggccgagcacgaaaagctgatcctgctggcccagctgaagcccgagaaggatagcgacgaagccgtgacatatagcctgggaaagtttgggcagagggccctggatttctacagcattcatgtgaccaaggagtccacccaccccgtgaagcccctggcccagatcgccggaaacagatacgcctccggacctgtgggaaaggccctgagcgacgcatgtatgggcacaatcgcctccttcctgtctaagtaccaggacatcatcatcgaacaccagaaggtggtgaagggcaaccagaagagactggagagcctgcgggagctggccggcaaggaaaacctggaataccctagcgtgaccctgccacctcagcctcacaccaaggagggcgttgatgcctacaacgaagtgatcgcccgggtgcgaatgtgggtgaacctgaacctgtggcagaagctgaagctaagcagagatgatgccaagcctctgctgagactgaagggattcccttcctttcctctggtcgagagacaggccaacgaagtggactggtgggacatggtgtgtaacgtgaagaagctgatcaacgagaaaaaggaggatggcaaggtgttttggcagaatctggctggctacaagagacaggaagccctgagaccatacctgagcagcgaggaagatcggaagaagggaaagaaattcgctcggtaccagctgggcgacctgctgctgcacctggaaaagaagcacggcgaggactggggaaaggtgtacgacgaggcctgggagcggattgacaagaaagtggaaggcctgagcaagcacatcaagctggaagaggaacggagaagcgaggacgcccagagcaaggccgccctgaccgactggctgcgggctaaggccagcttcgtgatcgagggcctgaaggaggccgacaaggacgagttctgcagatgcgagctgaagctgcagaagtggtacggggacctgcggggaaagcccttcgccatcgaagccgagaacagcatcctggacatcagcggcttcagcaagcagtacaactgtgccttcatctggcagaaggacggcgtgaagaagctgaacctgtacctgatcatcaactacttcaagggcggcaagctgcggttcaagaagatcaaacctgaagccttcgaagccaacagattctacaccgtgatcaacaaaaagagcggcgagatcgtgcccatggaggtgaacttcaacttcgacgaccccaacctgatcatcctgcctctggcctttggcaagagacagggcagagaattcatctggaacgacctgctgtccctggaaaccggcagcctgaagctggccaacggaagagtgatcgagaagacactgtacaacagaagaacccggcaggatgagcctgccctgttcgtggccctgaccttcgagcggcgggaggtcctggactcctccaatatcaaaccaatgaacctgatcggcgtggcaagaggcgaaaacatccccgccgtgatcgccctgaccgaccccgagggctgcccactgagccggtttaaggatagcctgggaaacccaacccacatcctgagaatcggcgagagctataaggagaagcagcggaccatccaggccaagaaggaggtggagcagcggagagccggcggctacagccggaagtacgccagcaaagccaagaatctggcagacgatatggtgagaaacaccgctagagatctgctgtactacgccgtgacccaggatgccatgctgatcttcgccaacctgagccggggcttcggccggcagggcaagcggaccttcatggccgagagacagtacacacggatggaggactggctgaccgccaagctggcctacgagggcctgagcaagacctacctgtccaagacactggcccagtacacctccaagacatgcagcaactgtgggtttaccatcaccagcgccgactacgacagggtgctggagaagctgaagaagacagcaacaggctggatgaccacaattaacggcaaggagctgaaggtggagggccagattacctactacaacagatacaagagacagaacgtagtcaaggacctgtccgtcgagctggatagactgagcgaagaatctgtgaacaacgacatctcctcctggacaaagggcagaagcggagaagctctgagcctcctgaagaaaagattctcccatagacccgtgcaggagaagttcgtgtgcctgaactgcggcttcgagacacacgcagccgagcaagccgccctgaacatcgccagatcctggctgttcctgcggagccaggagtacaagaaataccagacaaacaagacaaccggcaacaccgataagagagccttcgtcgagacctggcagtccttttaccggaagaagcttaaggaggtgtggaaacctgccgtgcggtctggcggatctggcggaggctccaccagccccaagaaaaagagaaaagtctaagctgccttctgcggggcttgccttctggccatgcccttcttctctcccttgcacctgtacctcttggtctttgaataaagcctgagtaggaaggctagcaaaaaaaaaaaaaaaaaaaaaaaaaaaaaaaaaaaaaaaaaaaaaaaaaaaaaaaaaaaaaaaaaaaaaaaaaaaaaaaa

SEQ ID NO: 12157 - RNA, 5785 nt, synthetic construct
  source 1..5785: mol_type = other RNA
aggaaataagagagaaaagaagagtaagaagaaatataagagccaccatggcccctaagaagaagcgtaaagtgagccggatggaacgcctcgtctacgaggtgcggcagaagtgcagaaacatcgaggacatctgcatctcctgcggatctctgaacgtgaccctggagcacccactgttcatcggcggcatgtgccagaactgtaaaaactgttttctggagtgtgcctatcaatacgacgatgacggctaccagagctactgcaccatctgttgcggcggaagagaggtgctgatgtgtggaaataacaactgctgccggtgcttctgcgtggaatgcgtggacctgctggtgggccccggcgccgcccaggccgctattaaggaagatccttggaactgctacatgtgcggccacaagggcacatacggcctgctgagacggagagaggactggcctagcagactgcagatgttcttcgccaataaccacgaccaggagttcgacccccctaaggtgtaccctcccgtccccgccgagaagagaaagcccatccgggtcctgagcctgttcgatggcatcgccaccggtctgctggtgctgaaggacctgggcatccaggtggataggtacattgcctccgaggtgtgcgaggactccatcaccgtgggaatggtgcgtcatcagggcaagatcatgtacgtgggcgacgtgcggagcgtgacacagaagcatatccaggagtggggccctttcgacctggtgatcggcggcagcccttgcaatgacctgagcatcgtgaacccagcccggaagggcctgtacgagggaaccggcagactgttcttcgagttttacagactgctgcacgacgcccggcctaaggaaggcgacgaccggcccttcttttggctgttcgagaatgtggtggccatgggagtcagcgacaagcgggatattagccggttcctggagagcaaccccgtgatgatcgatgccaaggaagtgagcgccgcccaccgggccagatacttctggggcaatctgcctggcatgaacagacccctggccagcaccgtgaacgacaagctggagctgcaggagtgcctggagcacggccggatcgccaagttcagcaaggtgagaaccatcaccacccgaagcaacagcatcaaacaaggcaaggaccagcactttcctgtgttcatgaacgagaaggaggacatcctgtggtgtaccgagatggagagagtgttcgggttcccagtccactacacagatgtcagcaacatgtctagactggccagacagagactgctgggaagaagctggtccgtccctgtgatcagacacctgttcgcccctctgaaggagtacttcgcctgcgtgagcagcggcaacagcaacgccaacagccggggccccagcttctctagcggcctggtgccactgtccctgagagggagccacatgggccccatggagatctacaaaaccgtgagcgcctggaagcggcagcctgtgcgcgtgctgagcctgtttcggaatatcgataaagtcctgaaaagcctgggattcctggagagcggctctggctccggcggtggcaccctgaagtacgtggaggatgtgacaaacgtggtcagacgggatgtggagaagtggggccccttcgatctggtgtacggcagcacccaacccctgggcagctcttgtgaccggtgccctggctggtacatgtttcagttccaccggatcctgcagtacgccctgccgagacaggagtcccagcggccattcttttggattttcatggacaacttgctgctgaccgaggatgaccaggaaactaccactcggttcctgcagaccgaagccgtgaccctgcaggacgtgagaggccgggactaccagaacgccatgcgggtgtggtccaacatccctggactgaaaagcaagcacgcacctctgacccctaaagaagaggagtacctgcaggcccaggtgcggagcagaagcaagctggacgcccctaaggtggatctgctggtgaagaattgcctcctgcccctgagagagtacttcaagtatttcagccagaatagtctgcccctgggaggcagcggcggcggcagcaggagccccctgaccttcggcgacgtggccgtggagttcagcggcgaggagtgggccaggctggacagcgcccagaggagcctgcacaggagcgtgatgctggagaactacaggaacctggccagcctgggcctgtgcatgagcaagcccgagatgatcagcagcctggagcagaggaaggagccctgggccgtgaagaggaagagcaccaggggcaggtgccccgacagccagaccgccggcggcccaagcagcggcgcccctcctcccagcggcggcagcccagccggctccccaacctctaccgaggagggcacctctgagtccgccacccccgagagcggccctggcacctccaccgagcccagcgagggcagcgcacccggcagccctgccggcagccccacctccacagaggagggaaccagcaccgagcccagcgaaggcagcgccccaggcaccagcaccgagcctagtgagcaggagattaaacggatcaacaagatcagaagaagacttgtgaaagacagcaacaccaagaaggccggcaagacaggccccatgaaaaccctgctggttagagtgatgacacccgatctgagagagcggctggaaaacctgagaaagaagcctgaaaatatcccccagcccatcagcaatacatctagagccaacctgaataagctgctgaccgattacaccgaaatgaagaaggcgatcctgcatgtgtactgggaagagttccagaaggaccctgtgggcctgatgagccgggtggcccagcctgccagcaagaagatcgatcagaacaagctgaaacctgagatggacgagaagggcaacctgaccaccgccggctttgcctgctctcagtgtggccagcccctgttcgtgtacaagctggagcaggtgtctgagaagggcaaggcttacaccaactacttcggacggtgcaatgtggccgagcacgaaaagctgatcctgctggcccagctgaagcccgagaaggatagcgacgaagccgtgacatatagcctgggaaagtttgggcagagggccctggatttctacagcattcatgtgaccaaggagtccacccaccccgtgaagcccctggcccagatcgccggaaacagatacgcctccggacctgtgggaaaggccctgagcgacgcatgtatgggcacaatcgcctccttcctgtctaagtaccaggacatcatcatcgaacaccagaaggtggtgaagggcaaccagaagagactggagagcctgcgggagctggccggcaaggaaaacctggaataccctagcgtgaccctgccacctcagcctcacaccaaggagggcgttgatgcctacaacgaagtgatcgcccgggtgcgaatgtgggtgaacctgaacctgtggcagaagctgaagctaagcagagatgatgccaagcctctgctgagactgaagggattcccttcctttcctctggtcgagagacaggccaacgaagtggactggtgggacatggtgtgtaacgtgaagaagctgatcaacgagaaaaaggaggatggcaaggtgttttggcagaatctggctggctacaagagacaggaagccctgagaccatacctgagcagcgaggaagatcggaagaagggaaagaaattcgctcggtaccagctgggcgacctgctgctgcacctggaaaagaagcacggcgaggactggggaaaggtgtacgacgaggcctgggagcggattgacaagaaagtggaaggcctgagcaagcacatcaagctggaagaggaacggagaagcgaggacgcccagagcaaggccgccctgaccgactggctgcgggctaaggccagcttcgtgatcgagggcctgaaggaggccgacaaggacgagttctgcagatgcgagctgaagctgcagaagtggtacggggacctgcggggaaagcccttcgccatcgaagccgagaacagcatcctggacatcagcggcttcagcaagcagtacaactgtgccttcatctggcagaaggacggcgtgaagaagctgaacctgtacctgatcatcaactacttcaagggcggcaagctgcggttcaagaagatcaaacctgaagccttcgaagccaacagattctacaccgtgatcaacaaaaagagcggcgagatcgtgcccatggaggtgaacttcaacttcgacgaccccaacctgatcatcctgcctctggcctttggcaagagacagggcagagaattcatctggaacgacctgctgtccctggaaaccggcagcctgaagctggccaacggaagagtgatcgagaagacactgtacaacagaagaacccggcaggatgagcctgccctgttcgtggccctgaccttcgagcggcgggaggtcctggactcctccaatatcaaaccaatgaacctgatcggcgtggcaagaggcgaaaacatccccgccgtgatcgccctgaccgaccccgagggctgcccactgagccggtttaaggatagcctgggaaacccaacccacatcctgagaatcggcgagagctataaggagaagcagcggaccatccaggccaagaaggaggtggagcagcggagagccggcggctacagccggaagtacgccagcaaagccaagaatctggcagacgatatggtgagaaacaccgctagagatctgctgtactacgccgtgacccaggatgccatgctgatcttcgccaacctgagccggggcttcggccggcagggcaagcggaccttcatggccgagagacagtacacacggatggaggactggctgaccgccaagctggcctacgagggcctgagcaagacctacctgtccaagacactggcccagtacacctccaagacatgcagcaactgtgggtttaccatcaccagcgccgactacgacagggtgctggagaagctgaagaagacagcaacaggctggatgaccacaattaacggcaaggagctgaaggtggagggccagattacctactacaacagatacaagagacagaacgtagtcaaggacctgtccgtcgagctggatagactgagcgaagaatctgtgaacaacgacatctcctcctggacaaagggcagaagcggagaagctctgagcctcctgaagaaaagattctcccatagacccgtgcaggagaagttcgtgtgcctgaactgcggcttcgagacacacgcagccgagcaagccgccctgaacatcgccagatcctggctgttcctgcggagccaggagtacaagaaataccagacaaacaagacaaccggcaacaccgataagagagccttcgtcgagacctggcagtccttttaccggaagaagcttaaggaggtgtggaaacctgccgtgcggtctggcggatctggcggaggctccaccagccccaagaaaaagagaaaagtctaagctgccttctgcggggcttgccttctggccatgcccttcttctctcccttgcacctgtacctcttggtctttgaataaagcctgagtaggaaggctagcaaaaaaaaaaaaaaaaaaaaaaaaaaaaaaaaaaaaaaaaaaaaaaaaaaaaaaaaaaaaaaaaaaaaaaaaaaaaaaaa

SEQ ID NO: 12158 - RNA, 5794 nt, synthetic construct
  source 1..5794: mol_type = other RNA
aggaaataagagagaaaagaagagtaagaagaaatataagagccaccatggcccctaagaagaagcgtaaagtgagccggatggaacgcctcgtctacgaggtgcggcagaagtgcagaaacatcgaggacatctgcatctcctgcggatctctgaacgtgaccctggagcacccactgttcatcggcggcatgtgccagaactgtaaaaactgttttctggagtgtgcctatcaatacgacgatgacggctaccagagctactgcaccatctgttgcggcggaagagaggtgctgatgtgtggaaataacaactgctgccggtgcttctgcgtggaatgcgtggacctgctggtgggccccggcgccgcccaggccgctattaaggaagatccttggaactgctacatgtgcggccacaagggcacatacggcctgctgagacggagagaggactggcctagcagactgcagatgttcttcgccaataaccacgaccaggagttcgacccccctaaggtgtaccctcccgtccccgccgagaagagaaagcccatccgggtcctgagcctgttcgatggcatcgccaccggtctgctggtgctgaaggacctgggcatccaggtggataggtacattgcctccgaggtgtgcgaggactccatcaccgtgggaatggtgcgtcatcagggcaagatcatgtacgtgggcgacgtgcggagcgtgacacagaagcatatccaggagtggggccctttcgacctggtgatcggcggcagcccttgcaatgacctgagcatcgtgaacccagcccggaagggcctgtacgagggaaccggcagactgttcttcgagttttacagactgctgcacgacgcccggcctaaggaaggcgacgaccggcccttcttttggctgttcgagaatgtggtggccatgggagtcagcgacaagcgggatattagccggttcctggagagcaaccccgtgatgatcgatgccaaggaagtgagcgccgcccaccgggccagatacttctggggcaatctgcctggcatgaacagacccctggccagcaccgtgaacgacaagctggagctgcaggagtgcctggagcacggccggatcgccaagttcagcaaggtgagaaccatcaccacccgaagcaacagcatcaaacaaggcaaggaccagcactttcctgtgttcatgaacgagaaggaggacatcctgtggtgtaccgagatggagagagtgttcgggttcccagtccactacacagatgtcagcaacatgtctagactggccagacagagactgctgggaagaagctggtccgtccctgtgatcagacacctgttcgcccctctgaaggagtacttcgcctgcgtgagcagcggcaacagcaacgccaacagccggggccccagcttctctagcggcctggtgccactgtccctgagagggagccacatgggccccatggagatctacaaaaccgtgagcgcctggaagcggcagcctgtgcgcgtgctgagcctgtttcggaatatcgataaagtcctgaaaagcctgggattcctggagagcggctctggctccggcggtggcaccctgaagtacgtggaggatgtgacaaacgtggtcagacgggatgtggagaagtggggccccttcgatctggtgtacggcagcacccaacccctgggcagctcttgtgaccggtgccctggctggtacatgtttcagttccaccggatcctgcagtacgccctgccgagacaggagtcccagcggccattcttttggattttcatggacaacttgctgctgaccgaggatgaccaggaaactaccactcggttcctgcagaccgaagccgtgaccctgcaggacgtgagaggccgggactaccagaacgccatgcgggtgtggtccaacatccctggactgaaaagcaagcacgcacctctgacccctaaagaagaggagtacctgcaggcccaggtgcggagcagaagcaagctggacgcccctaaggtggatctgctggtgaagaattgcctcctgcccctgagagagtacttcaagtatttcagccagaatagtctgcccctgggaggcagcggcggcggcgtgacctacaacgacgtgcacgtggacatcacccaggaggagtgggccctgatggaccccagccagaggaacctgtacaaggacgtgatggtggagacctacatgaacctgaccgccatcggctacaactgggagaacctggaggtggaggagccctgccagaaccccctgaagcacggcaggcacgagaggccccacaccggcgagaagccctacgagtacaaccagtgcggcaaggccttcgcccagcccggcggcccaagcagcggcgcccctcctcccagcggcggcagcccagccggctccccaacctctaccgaggagggcacctctgagtccgccacccccgagagcggccctggcacctccaccgagcccagcgagggcagcgcacccggcagccctgccggcagccccacctccacagaggagggaaccagcaccgagcccagcgaaggcagcgccccaggcaccagcaccgagcctagtgagcaggagattaaacggatcaacaagatcagaagaagacttgtgaaagacagcaacaccaagaaggccggcaagacaggccccatgaaaaccctgctggttagagtgatgacacccgatctgagagagcggctggaaaacctgagaaagaagcctgaaaatatcccccagcccatcagcaatacatctagagccaacctgaataagctgctgaccgattacaccgaaatgaagaaggcgatcctgcatgtgtactgggaagagttccagaaggaccctgtgggcctgatgagccgggtggcccagcctgccagcaagaagatcgatcagaacaagctgaaacctgagatggacgagaagggcaacctgaccaccgccggctttgcctgctctcagtgtggccagcccctgttcgtgtacaagctggagcaggtgtctgagaagggcaaggcttacaccaactacttcggacggtgcaatgtggccgagcacgaaaagctgatcctgctggcccagctgaagcccgagaaggatagcgacgaagccgtgacatatagcctgggaaagtttgggcagagggccctggatttctacagcattcatgtgaccaaggagtccacccaccccgtgaagcccctggcccagatcgccggaaacagatacgcctccggacctgtgggaaaggccctgagcgacgcatgtatgggcacaatcgcctccttcctgtctaagtaccaggacatcatcatcgaacaccagaaggtggtgaagggcaaccagaagagactggagagcctgcgggagctggccggcaaggaaaacctggaataccctagcgtgaccctgccacctcagcctcacaccaaggagggcgttgatgcctacaacgaagtgatcgcccgggtgcgaatgtgggtgaacctgaacctgtggcagaagctgaagctaagcagagatgatgccaagcctctgctgagactgaagggattcccttcctttcctctggtcgagagacaggccaacgaagtggactggtgggacatggtgtgtaacgtgaagaagctgatcaacgagaaaaaggaggatggcaaggtgttttggcagaatctggctggctacaagagacaggaagccctgagaccatacctgagcagcgaggaagatcggaagaagggaaagaaattcgctcggtaccagctgggcgacctgctgctgcacctggaaaagaagcacggcgaggactggggaaaggtgtacgacgaggcctgggagcggattgacaagaaagtggaaggcctgagcaagcacatcaagctggaagaggaacggagaagcgaggacgcccagagcaaggccgccctgaccgactggctgcgggctaaggccagcttcgtgatcgagggcctgaaggaggccgacaaggacgagttctgcagatgcgagctgaagctgcagaagtggtacggggacctgcggggaaagcccttcgccatcgaagccgagaacagcatcctggacatcagcggcttcagcaagcagtacaactgtgccttcatctggcagaaggacggcgtgaagaagctgaacctgtacctgatcatcaactacttcaagggcggcaagctgcggttcaagaagatcaaacctgaagccttcgaagccaacagattctacaccgtgatcaacaaaaagagcggcgagatcgtgcccatggaggtgaacttcaacttcgacgaccccaacctgatcatcctgcctctggcctttggcaagagacagggcagagaattcatctggaacgacctgctgtccctggaaaccggcagcctgaagctggccaacggaagagtgatcgagaagacactgtacaacagaagaacccggcaggatgagcctgccctgttcgtggccctgaccttcgagcggcgggaggtcctggactcctccaatatcaaaccaatgaacctgatcggcgtggcaagaggcgaaaacatccccgccgtgatcgccctgaccgaccccgagggctgcccactgagccggtttaaggatagcctgggaaacccaacccacatcctgagaatcggcgagagctataaggagaagcagcggaccatccaggccaagaaggaggtggagcagcggagagccggcggctacagccggaagtacgccagcaaagccaagaatctggcagacgatatggtgagaaacaccgctagagatctgctgtactacgccgtgacccaggatgccatgctgatcttcgccaacctgagccggggcttcggccggcagggcaagcggaccttcatggccgagagacagtacacacggatggaggactggctgaccgccaagctggcctacgagggcctgagcaagacctacctgtccaagacactggcccagtacacctccaagacatgcagcaactgtgggtttaccatcaccagcgccgactacgacagggtgctggagaagctgaagaagacagcaacaggctggatgaccacaattaacggcaaggagctgaaggtggagggccagattacctactacaacagatacaagagacagaacgtagtcaaggacctgtccgtcgagctggatagactgagcgaagaatctgtgaacaacgacatctcctcctggacaaagggcagaagcggagaagctctgagcctcctgaagaaaagattctcccatagacccgtgcaggagaagttcgtgtgcctgaactgcggcttcgagacacacgcagccgagcaagccgccctgaacatcgccagatcctggctgttcctgcggagccaggagtacaagaaataccagacaaacaagacaaccggcaacaccgataagagagccttcgtcgagacctggcagtccttttaccggaagaagcttaaggaggtgtggaaacctgccgtgcggtctggcggatctggcggaggctccaccagccccaagaaaaagagaaaagtctaagctgccttctgcggggcttgccttctggccatgcccttcttctctcccttgcacctgtacctcttggtctttgaataaagcctgagtaggaaggctagcaaaaaaaaaaaaaaaaaaaaaaaaaaaaaaaaaaaaaaaaaaaaaaaaaaaaaaaaaaaaaaaaaaaaaaaaaaaaaaaa

SEQ ID NO: 12159 - RNA, 5785 nt, synthetic construct
  source 1..5785: mol_type = other RNA
aggaaataagagagaaaagaagagtaagaagaaatataagagccaccatggcccctaagaagaagcgtaaagtgagccggatggaacgcctcgtctacgaggtgcggcagaagtgcagaaacatcgaggacatctgcatctcctgcggatctctgaacgtgaccctggagcacccactgttcatcggcggcatgtgccagaactgtaaaaactgttttctggagtgtgcctatcaatacgacgatgacggctaccagagctactgcaccatctgttgcggcggaagagaggtgctgatgtgtggaaataacaactgctgccggtgcttctgcgtggaatgcgtggacctgctggtgggccccggcgccgcccaggccgctattaaggaagatccttggaactgctacatgtgcggccacaagggcacatacggcctgctgagacggagagaggactggcctagcagactgcagatgttcttcgccaataaccacgaccaggagttcgacccccctaaggtgtaccctcccgtccccgccgagaagagaaagcccatccgggtcctgagcctgttcgatggcatcgccaccggtctgctggtgctgaaggacctgggcatccaggtggataggtacattgcctccgaggtgtgcgaggactccatcaccgtgggaatggtgcgtcatcagggcaagatcatgtacgtgggcgacgtgcggagcgtgacacagaagcatatccaggagtggggccctttcgacctggtgatcggcggcagcccttgcaatgacctgagcatcgtgaacccagcccggaagggcctgtacgagggaaccggcagactgttcttcgagttttacagactgctgcacgacgcccggcctaaggaaggcgacgaccggcccttcttttggctgttcgagaatgtggtggccatgggagtcagcgacaagcgggatattagccggttcctggagagcaaccccgtgatgatcgatgccaaggaagtgagcgccgcccaccgggccagatacttctggggcaatctgcctggcatgaacagacccctggccagcaccgtgaacgacaagctggagctgcaggagtgcctggagcacggccggatcgccaagttcagcaaggtgagaaccatcaccacccgaagcaacagcatcaaacaaggcaaggaccagcactttcctgtgttcatgaacgagaaggaggacatcctgtggtgtaccgagatggagagagtgttcgggttcccagtccactacacagatgtcagcaacatgtctagactggccagacagagactgctgggaagaagctggtccgtccctgtgatcagacacctgttcgcccctctgaaggagtacttcgcctgcgtgagcagcggcaacagcaacgccaacagccggggccccagcttctctagcggcctggtgccactgtccctgagagggagccacatgggccccatggagatctacaaaaccgtgagcgcctggaagcggcagcctgtgcgcgtgctgagcctgtttcggaatatcgataaagtcctgaaaagcctgggattcctggagagcggctctggctccggcggtggcaccctgaagtacgtggaggatgtgacaaacgtggtcagacgggatgtggagaagtggggccccttcgatctggtgtacggcagcacccaacccctgggcagctcttgtgaccggtgccctggctggtacatgtttcagttccaccggatcctgcagtacgccctgccgagacaggagtcccagcggccattcttttggattttcatggacaacttgctgctgaccgaggatgaccaggaaactaccactcggttcctgcagaccgaagccgtgaccctgcaggacgtgagaggccgggactaccagaacgccatgcgggtgtggtccaacatccctggactgaaaagcaagcacgcacctctgacccctaaagaagaggagtacctgcaggcccaggtgcggagcagaagcaagctggacgcccctaaggtggatctgctggtgaagaattgcctcctgcccctgagagagtacttcaagtatttcagccagaatagtctgcccctgggaggcagcggcggcggcagcaaggcccccgtgaccttcggcgacctggccatctacttcagccaggaggagtgggagtggctgagccccatccagaaggacctgtacgaggacgtgatgctggagaactaccagaacctggtgagcctgggcctgtgcttcaggaggcccaacgtgatcaccctgctggagaagggcaaggccccctggatggtggaccccgtgaagaggaggaggggcctggacctgggcagcaagggcggcggcccaagcagcggcgcccctcctcccagcggcggcagcccagccggctccccaacctctaccgaggagggcacctctgagtccgccacccccgagagcggccctggcacctccaccgagcccagcgagggcagcgcacccggcagccctgccggcagccccacctccacagaggagggaaccagcaccgagcccagcgaaggcagcgccccaggcaccagcaccgagcctagtgagcaggagattaaacggatcaacaagatcagaagaagacttgtgaaagacagcaacaccaagaaggccggcaagacaggccccatgaaaaccctgctggttagagtgatgacacccgatctgagagagcggctggaaaacctgagaaagaagcctgaaaatatcccccagcccatcagcaatacatctagagccaacctgaataagctgctgaccgattacaccgaaatgaagaaggcgatcctgcatgtgtactgggaagagttccagaaggaccctgtgggcctgatgagccgggtggcccagcctgccagcaagaagatcgatcagaacaagctgaaacctgagatggacgagaagggcaacctgaccaccgccggctttgcctgctctcagtgtggccagcccctgttcgtgtacaagctggagcaggtgtctgagaagggcaaggcttacaccaactacttcggacggtgcaatgtggccgagcacgaaaagctgatcctgctggcccagctgaagcccgagaaggatagcgacgaagccgtgacatatagcctgggaaagtttgggcagagggccctggatttctacagcattcatgtgaccaaggagtccacccaccccgtgaagcccctggcccagatcgccggaaacagatacgcctccggacctgtgggaaaggccctgagcgacgcatgtatgggcacaatcgcctccttcctgtctaagtaccaggacatcatcatcgaacaccagaaggtggtgaagggcaaccagaagagactggagagcctgcgggagctggccggcaaggaaaacctggaataccctagcgtgaccctgccacctcagcctcacaccaaggagggcgttgatgcctacaacgaagtgatcgcccgggtgcgaatgtgggtgaacctgaacctgtggcagaagctgaagctaagcagagatgatgccaagcctctgctgagactgaagggattcccttcctttcctctggtcgagagacaggccaacgaagtggactggtgggacatggtgtgtaacgtgaagaagctgatcaacgagaaaaaggaggatggcaaggtgttttggcagaatctggctggctacaagagacaggaagccctgagaccatacctgagcagcgaggaagatcggaagaagggaaagaaattcgctcggtaccagctgggcgacctgctgctgcacctggaaaagaagcacggcgaggactggggaaaggtgtacgacgaggcctgggagcggattgacaagaaagtggaaggcctgagcaagcacatcaagctggaagaggaacggagaagcgaggacgcccagagcaaggccgccctgaccgactggctgcgggctaaggccagcttcgtgatcgagggcctgaaggaggccgacaaggacgagttctgcagatgcgagctgaagctgcagaagtggtacggggacctgcggggaaagcccttcgccatcgaagccgagaacagcatcctggacatcagcggcttcagcaagcagtacaactgtgccttcatctggcagaaggacggcgtgaagaagctgaacctgtacctgatcatcaactacttcaagggcggcaagctgcggttcaagaagatcaaacctgaagccttcgaagccaacagattctacaccgtgatcaacaaaaagagcggcgagatcgtgcccatggaggtgaacttcaacttcgacgaccccaacctgatcatcctgcctctggcctttggcaagagacagggcagagaattcatctggaacgacctgctgtccctggaaaccggcagcctgaagctggccaacggaagagtgatcgagaagacactgtacaacagaagaacccggcaggatgagcctgccctgttcgtggccctgaccttcgagcggcgggaggtcctggactcctccaatatcaaaccaatgaacctgatcggcgtggcaagaggcgaaaacatccccgccgtgatcgccctgaccgaccccgagggctgcccactgagccggtttaaggatagcctgggaaacccaacccacatcctgagaatcggcgagagctataaggagaagcagcggaccatccaggccaagaaggaggtggagcagcggagagccggcggctacagccggaagtacgccagcaaagccaagaatctggcagacgatatggtgagaaacaccgctagagatctgctgtactacgccgtgacccaggatgccatgctgatcttcgccaacctgagccggggcttcggccggcagggcaagcggaccttcatggccgagagacagtacacacggatggaggactggctgaccgccaagctggcctacgagggcctgagcaagacctacctgtccaagacactggcccagtacacctccaagacatgcagcaactgtgggtttaccatcaccagcgccgactacgacagggtgctggagaagctgaagaagacagcaacaggctggatgaccacaattaacggcaaggagctgaaggtggagggccagattacctactacaacagatacaagagacagaacgtagtcaaggacctgtccgtcgagctggatagactgagcgaagaatctgtgaacaacgacatctcctcctggacaaagggcagaagcggagaagctctgagcctcctgaagaaaagattctcccatagacccgtgcaggagaagttcgtgtgcctgaactgcggcttcgagacacacgcagccgagcaagccgccctgaacatcgccagatcctggctgttcctgcggagccaggagtacaagaaataccagacaaacaagacaaccggcaacaccgataagagagccttcgtcgagacctggcagtccttttaccggaagaagcttaaggaggtgtggaaacctgccgtgcggtctggcggatctggcggaggctccaccagccccaagaaaaagagaaaagtctaagctgccttctgcggggcttgccttctggccatgcccttcttctctcccttgcacctgtacctcttggtctttgaataaagcctgagtaggaaggctagcaaaaaaaaaaaaaaaaaaaaaaaaaaaaaaaaaaaaaaaaaaaaaaaaaaaaaaaaaaaaaaaaaaaaaaaaaaaaaaaa

SEQ ID NO: 12160 - RNA, 5785 nt, synthetic construct
  source 1..5785: mol_type = other RNA
aggaaataagagagaaaagaagagtaagaagaaatataagagccaccatggcccctaagaagaagcgtaaagtgagccggatggaacgcctcgtctacgaggtgcggcagaagtgcagaaacatcgaggacatctgcatctcctgcggatctctgaacgtgaccctggagcacccactgttcatcggcggcatgtgccagaactgtaaaaactgttttctggagtgtgcctatcaatacgacgatgacggctaccagagctactgcaccatctgttgcggcggaagagaggtgctgatgtgtggaaataacaactgctgccggtgcttctgcgtggaatgcgtggacctgctggtgggccccggcgccgcccaggccgctattaaggaagatccttggaactgctacatgtgcggccacaagggcacatacggcctgctgagacggagagaggactggcctagcagactgcagatgttcttcgccaataaccacgaccaggagttcgacccccctaaggtgtaccctcccgtccccgccgagaagagaaagcccatccgggtcctgagcctgttcgatggcatcgccaccggtctgctggtgctgaaggacctgggcatccaggtggataggtacattgcctccgaggtgtgcgaggactccatcaccgtgggaatggtgcgtcatcagggcaagatcatgtacgtgggcgacgtgcggagcgtgacacagaagcatatccaggagtggggccctttcgacctggtgatcggcggcagcccttgcaatgacctgagcatcgtgaacccagcccggaagggcctgtacgagggaaccggcagactgttcttcgagttttacagactgctgcacgacgcccggcctaaggaaggcgacgaccggcccttcttttggctgttcgagaatgtggtggccatgggagtcagcgacaagcgggatattagccggttcctggagagcaaccccgtgatgatcgatgccaaggaagtgagcgccgcccaccgggccagatacttctggggcaatctgcctggcatgaacagacccctggccagcaccgtgaacgacaagctggagctgcaggagtgcctggagcacggccggatcgccaagttcagcaaggtgagaaccatcaccacccgaagcaacagcatcaaacaaggcaaggaccagcactttcctgtgttcatgaacgagaaggaggacatcctgtggtgtaccgagatggagagagtgttcgggttcccagtccactacacagatgtcagcaacatgtctagactggccagacagagactgctgggaagaagctggtccgtccctgtgatcagacacctgttcgcccctctgaaggagtacttcgcctgcgtgagcagcggcaacagcaacgccaacagccggggccccagcttctctagcggcctggtgccactgtccctgagagggagccacatgggccccatggagatctacaaaaccgtgagcgcctggaagcggcagcctgtgcgcgtgctgagcctgtttcggaatatcgataaagtcctgaaaagcctgggattcctggagagcggctctggctccggcggtggcaccctgaagtacgtggaggatgtgacaaacgtggtcagacgggatgtggagaagtggggccccttcgatctggtgtacggcagcacccaacccctgggcagctcttgtgaccggtgccctggctggtacatgtttcagttccaccggatcctgcagtacgccctgccgagacaggagtcccagcggccattcttttggattttcatggacaacttgctgctgaccgaggatgaccaggaaactaccactcggttcctgcagaccgaagccgtgaccctgcaggacgtgagaggccgggactaccagaacgccatgcgggtgtggtccaacatccctggactgaaaagcaagcacgcacctctgacccctaaagaagaggagtacctgcaggcccaggtgcggagcagaagcaagctggacgcccctaaggtggatctgctggtgaagaattgcctcctgcccctgagagagtacttcaagtatttcagccagaatagtctgcccctgggaggcagcggcggcggcgcccaccacctggtgatgttcagggacgtggccgtggacttcagcaaggaggagtgggagtgcctgaacagctaccagaggaacctgtacagggacgtgatcctggagaactacagcaacctggtgagcgtggccggctgcagcatcagcaagcccgacgtgatcaccctgctggagcagggcaaggagccctggatggtggtgagggacgagaggaggaggaggagcctggacctggagagcggcggcccaagcagcggcgcccctcctcccagcggcggcagcccagccggctccccaacctctaccgaggagggcacctctgagtccgccacccccgagagcggccctggcacctccaccgagcccagcgagggcagcgcacccggcagccctgccggcagccccacctccacagaggagggaaccagcaccgagcccagcgaaggcagcgccccaggcaccagcaccgagcctagtgagcaggagattaaacggatcaacaagatcagaagaagacttgtgaaagacagcaacaccaagaaggccggcaagacaggccccatgaaaaccctgctggttagagtgatgacacccgatctgagagagcggctggaaaacctgagaaagaagcctgaaaatatcccccagcccatcagcaatacatctagagccaacctgaataagctgctgaccgattacaccgaaatgaagaaggcgatcctgcatgtgtactgggaagagttccagaaggaccctgtgggcctgatgagccgggtggcccagcctgccagcaagaagatcgatcagaacaagctgaaacctgagatggacgagaagggcaacctgaccaccgccggctttgcctgctctcagtgtggccagcccctgttcgtgtacaagctggagcaggtgtctgagaagggcaaggcttacaccaactacttcggacggtgcaatgtggccgagcacgaaaagctgatcctgctggcccagctgaagcccgagaaggatagcgacgaagccgtgacatatagcctgggaaagtttgggcagagggccctggatttctacagcattcatgtgaccaaggagtccacccaccccgtgaagcccctggcccagatcgccggaaacagatacgcctccggacctgtgggaaaggccctgagcgacgcatgtatgggcacaatcgcctccttcctgtctaagtaccaggacatcatcatcgaacaccagaaggtggtgaagggcaaccagaagagactggagagcctgcgggagctggccggcaaggaaaacctggaataccctagcgtgaccctgccacctcagcctcacaccaaggagggcgttgatgcctacaacgaagtgatcgcccgggtgcgaatgtgggtgaacctgaacctgtggcagaagctgaagctaagcagagatgatgccaagcctctgctgagactgaagggattcccttcctttcctctggtcgagagacaggccaacgaagtggactggtgggacatggtgtgtaacgtgaagaagctgatcaacgagaaaaaggaggatggcaaggtgttttggcagaatctggctggctacaagagacaggaagccctgagaccatacctgagcagcgaggaagatcggaagaagggaaagaaattcgctcggtaccagctgggcgacctgctgctgcacctggaaaagaagcacggcgaggactggggaaaggtgtacgacgaggcctgggagcggattgacaagaaagtggaaggcctgagcaagcacatcaagctggaagaggaacggagaagcgaggacgcccagagcaaggccgccctgaccgactggctgcgggctaaggccagcttcgtgatcgagggcctgaaggaggccgacaaggacgagttctgcagatgcgagctgaagctgcagaagtggtacggggacctgcggggaaagcccttcgccatcgaagccgagaacagcatcctggacatcagcggcttcagcaagcagtacaactgtgccttcatctggcagaaggacggcgtgaagaagctgaacctgtacctgatcatcaactacttcaagggcggcaagctgcggttcaagaagatcaaacctgaagccttcgaagccaacagattctacaccgtgatcaacaaaaagagcggcgagatcgtgcccatggaggtgaacttcaacttcgacgaccccaacctgatcatcctgcctctggcctttggcaagagacagggcagagaattcatctggaacgacctgctgtccctggaaaccggcagcctgaagctggccaacggaagagtgatcgagaagacactgtacaacagaagaacccggcaggatgagcctgccctgttcgtggccctgaccttcgagcggcgggaggtcctggactcctccaatatcaaaccaatgaacctgatcggcgtggcaagaggcgaaaacatccccgccgtgatcgccctgaccgaccccgagggctgcccactgagccggtttaaggatagcctgggaaacccaacccacatcctgagaatcggcgagagctataaggagaagcagcggaccatccaggccaagaaggaggtggagcagcggagagccggcggctacagccggaagtacgccagcaaagccaagaatctggcagacgatatggtgagaaacaccgctagagatctgctgtactacgccgtgacccaggatgccatgctgatcttcgccaacctgagccggggcttcggccggcagggcaagcggaccttcatggccgagagacagtacacacggatggaggactggctgaccgccaagctggcctacgagggcctgagcaagacctacctgtccaagacactggcccagtacacctccaagacatgcagcaactgtgggtttaccatcaccagcgccgactacgacagggtgctggagaagctgaagaagacagcaacaggctggatgaccacaattaacggcaaggagctgaaggtggagggccagattacctactacaacagatacaagagacagaacgtagtcaaggacctgtccgtcgagctggatagactgagcgaagaatctgtgaacaacgacatctcctcctggacaaagggcagaagcggagaagctctgagcctcctgaagaaaagattctcccatagacccgtgcaggagaagttcgtgtgcctgaactgcggcttcgagacacacgcagccgagcaagccgccctgaacatcgccagatcctggctgttcctgcggagccaggagtacaagaaataccagacaaacaagacaaccggcaacaccgataagagagccttcgtcgagacctggcagtccttttaccggaagaagcttaaggaggtgtggaaacctgccgtgcggtctggcggatctggcggaggctccaccagccccaagaaaaagagaaaagtctaagctgccttctgcggggcttgccttctggccatgcccttcttctctcccttgcacctgtacctcttggtctttgaataaagcctgagtaggaaggctagcaaaaaaaaaaaaaaaaaaaaaaaaaaaaaaaaaaaaaaaaaaaaaaaaaaaaaaaaaaaaaaaaaaaaaaaaaaaaaaaa

SEQ ID NO: 12161 - RNA, 5785 nt, synthetic construct
  source 1..5785: mol_type = other RNA
aggaaataagagagaaaagaagagtaagaagaaatataagagccaccatggcccctaagaagaagcgtaaagtgagccggatggaacgcctcgtctacgaggtgcggcagaagtgcagaaacatcgaggacatctgcatctcctgcggatctctgaacgtgaccctggagcacccactgttcatcggcggcatgtgccagaactgtaaaaactgttttctggagtgtgcctatcaatacgacgatgacggctaccagagctactgcaccatctgttgcggcggaagagaggtgctgatgtgtggaaataacaactgctgccggtgcttctgcgtggaatgcgtggacctgctggtgggccccggcgccgcccaggccgctattaaggaagatccttggaactgctacatgtgcggccacaagggcacatacggcctgctgagacggagagaggactggcctagcagactgcagatgttcttcgccaataaccacgaccaggagttcgacccccctaaggtgtaccctcccgtccccgccgagaagagaaagcccatccgggtcctgagcctgttcgatggcatcgccaccggtctgctggtgctgaaggacctgggcatccaggtggataggtacattgcctccgaggtgtgcgaggactccatcaccgtgggaatggtgcgtcatcagggcaagatcatgtacgtgggcgacgtgcggagcgtgacacagaagcatatccaggagtggggccctttcgacctggtgatcggcggcagcccttgcaatgacctgagcatcgtgaacccagcccggaagggcctgtacgagggaaccggcagactgttcttcgagttttacagactgctgcacgacgcccggcctaaggaaggcgacgaccggcccttcttttggctgttcgagaatgtggtggccatgggagtcagcgacaagcgggatattagccggttcctggagagcaaccccgtgatgatcgatgccaaggaagtgagcgccgcccaccgggccagatacttctggggcaatctgcctggcatgaacagacccctggccagcaccgtgaacgacaagctggagctgcaggagtgcctggagcacggccggatcgccaagttcagcaaggtgagaaccatcaccacccgaagcaacagcatcaaacaaggcaaggaccagcactttcctgtgttcatgaacgagaaggaggacatcctgtggtgtaccgagatggagagagtgttcgggttcccagtccactacacagatgtcagcaacatgtctagactggccagacagagactgctgggaagaagctggtccgtccctgtgatcagacacctgttcgcccctctgaaggagtacttcgcctgcgtgagcagcggcaacagcaacgccaacagccggggccccagcttctctagcggcctggtgccactgtccctgagagggagccacatgggccccatggagatctacaaaaccgtgagcgcctggaagcggcagcctgtgcgcgtgctgagcctgtttcggaatatcgataaagtcctgaaaagcctgggattcctggagagcggctctggctccggcggtggcaccctgaagtacgtggaggatgtgacaaacgtggtcagacgggatgtggagaagtggggccccttcgatctggtgtacggcagcacccaacccctgggcagctcttgtgaccggtgccctggctggtacatgtttcagttccaccggatcctgcagtacgccctgccgagacaggagtcccagcggccattcttttggattttcatggacaacttgctgctgaccgaggatgaccaggaaactaccactcggttcctgcagaccgaagccgtgaccctgcaggacgtgagaggccgggactaccagaacgccatgcgggtgtggtccaacatccctggactgaaaagcaagcacgcacctctgacccctaaagaagaggagtacctgcaggcccaggtgcggagcagaagcaagctggacgcccctaaggtggatctgctggtgaagaattgcctcctgcccctgagagagtacttcaagtatttcagccagaatagtctgcccctgggaggcagcggcggcggcgccatcaggagcgtgatgttcagcgacatcagcatcgacttcagccccgaggagtgggagtacctggacctggagcagaaggacctgtacagggacgtgatgctggagaactacagcaacctggtgagcctgggctgcttcatcagcaagcccgacgtgatcagcctgctggagcagggcaaggagccctggaaggtggtgaggaagaggaggaggcagtaccccgagatgctgctgctgctgggcggcccaagcagcggcgcccctcctcccagcggcggcagcccagccggctccccaacctctaccgaggagggcacctctgagtccgccacccccgagagcggccctggcacctccaccgagcccagcgagggcagcgcacccggcagccctgccggcagccccacctccacagaggagggaaccagcaccgagcccagcgaaggcagcgccccaggcaccagcaccgagcctagtgagcaggagattaaacggatcaacaagatcagaagaagacttgtgaaagacagcaacaccaagaaggccggcaagacaggccccatgaaaaccctgctggttagagtgatgacacccgatctgagagagcggctggaaaacctgagaaagaagcctgaaaatatcccccagcccatcagcaatacatctagagccaacctgaataagctgctgaccgattacaccgaaatgaagaaggcgatcctgcatgtgtactgggaagagttccagaaggaccctgtgggcctgatgagccgggtggcccagcctgccagcaagaagatcgatcagaacaagctgaaacctgagatggacgagaagggcaacctgaccaccgccggctttgcctgctctcagtgtggccagcccctgttcgtgtacaagctggagcaggtgtctgagaagggcaaggcttacaccaactacttcggacggtgcaatgtggccgagcacgaaaagctgatcctgctggcccagctgaagcccgagaaggatagcgacgaagccgtgacatatagcctgggaaagtttgggcagagggccctggatttctacagcattcatgtgaccaaggagtccacccaccccgtgaagcccctggcccagatcgccggaaacagatacgcctccggacctgtgggaaaggccctgagcgacgcatgtatgggcacaatcgcctccttcctgtctaagtaccaggacatcatcatcgaacaccagaaggtggtgaagggcaaccagaagagactggagagcctgcgggagctggccggcaaggaaaacctggaataccctagcgtgaccctgccacctcagcctcacaccaaggagggcgttgatgcctacaacgaagtgatcgcccgggtgcgaatgtgggtgaacctgaacctgtggcagaagctgaagctaagcagagatgatgccaagcctctgctgagactgaagggattcccttcctttcctctggtcgagagacaggccaacgaagtggactggtgggacatggtgtgtaacgtgaagaagctgatcaacgagaaaaaggaggatggcaaggtgttttggcagaatctggctggctacaagagacaggaagccctgagaccatacctgagcagcgaggaagatcggaagaagggaaagaaattcgctcggtaccagctgggcgacctgctgctgcacctggaaaagaagcacggcgaggactggggaaaggtgtacgacgaggcctgggagcggattgacaagaaagtggaaggcctgagcaagcacatcaagctggaagaggaacggagaagcgaggacgcccagagcaaggccgccctgaccgactggctgcgggctaaggccagcttcgtgatcgagggcctgaaggaggccgacaaggacgagttctgcagatgcgagctgaagctgcagaagtggtacggggacctgcggggaaagcccttcgccatcgaagccgagaacagcatcctggacatcagcggcttcagcaagcagtacaactgtgccttcatctggcagaaggacggcgtgaagaagctgaacctgtacctgatcatcaactacttcaagggcggcaagctgcggttcaagaagatcaaacctgaagccttcgaagccaacagattctacaccgtgatcaacaaaaagagcggcgagatcgtgcccatggaggtgaacttcaacttcgacgaccccaacctgatcatcctgcctctggcctttggcaagagacagggcagagaattcatctggaacgacctgctgtccctggaaaccggcagcctgaagctggccaacggaagagtgatcgagaagacactgtacaacagaagaacccggcaggatgagcctgccctgttcgtggccctgaccttcgagcggcgggaggtcctggactcctccaatatcaaaccaatgaacctgatcggcgtggcaagaggcgaaaacatccccgccgtgatcgccctgaccgaccccgagggctgcccactgagccggtttaaggatagcctgggaaacccaacccacatcctgagaatcggcgagagctataaggagaagcagcggaccatccaggccaagaaggaggtggagcagcggagagccggcggctacagccggaagtacgccagcaaagccaagaatctggcagacgatatggtgagaaacaccgctagagatctgctgtactacgccgtgacccaggatgccatgctgatcttcgccaacctgagccggggcttcggccggcagggcaagcggaccttcatggccgagagacagtacacacggatggaggactggctgaccgccaagctggcctacgagggcctgagcaagacctacctgtccaagacactggcccagtacacctccaagacatgcagcaactgtgggtttaccatcaccagcgccgactacgacagggtgctggagaagctgaagaagacagcaacaggctggatgaccacaattaacggcaaggagctgaaggtggagggccagattacctactacaacagatacaagagacagaacgtagtcaaggacctgtccgtcgagctggatagactgagcgaagaatctgtgaacaacgacatctcctcctggacaaagggcagaagcggagaagctctgagcctcctgaagaaaagattctcccatagacccgtgcaggagaagttcgtgtgcctgaactgcggcttcgagacacacgcagccgagcaagccgccctgaacatcgccagatcctggctgttcctgcggagccaggagtacaagaaataccagacaaacaagacaaccggcaacaccgataagagagccttcgtcgagacctggcagtccttttaccggaagaagcttaaggaggtgtggaaacctgccgtgcggtctggcggatctggcggaggctccaccagccccaagaaaaagagaaaagtctaagctgccttctgcggggcttgccttctggccatgcccttcttctctcccttgcacctgtacctcttggtctttgaataaagcctgagtaggaaggctagcaaaaaaaaaaaaaaaaaaaaaaaaaaaaaaaaaaaaaaaaaaaaaaaaaaaaaaaaaaaaaaaaaaaaaaaaaaaaaaaa

SEQ ID NO: 12162 - RNA, 5782 nt, synthetic construct
  source 1..5782: mol_type = other RNA
aggaaataagagagaaaagaagagtaagaagaaatataagagccaccatggcccctaagaagaagcgtaaagtgagccggatggaacgcctcgtctacgaggtgcggcagaagtgcagaaacatcgaggacatctgcatctcctgcggatctctgaacgtgaccctggagcacccactgttcatcggcggcatgtgccagaactgtaaaaactgttttctggagtgtgcctatcaatacgacgatgacggctaccagagctactgcaccatctgttgcggcggaagagaggtgctgatgtgtggaaataacaactgctgccggtgcttctgcgtggaatgcgtggacctgctggtgggccccggcgccgcccaggccgctattaaggaagatccttggaactgctacatgtgcggccacaagggcacatacggcctgctgagacggagagaggactggcctagcagactgcagatgttcttcgccaataaccacgaccaggagttcgacccccctaaggtgtaccctcccgtccccgccgagaagagaaagcccatccgggtcctgagcctgttcgatggcatcgccaccggtctgctggtgctgaaggacctgggcatccaggtggataggtacattgcctccgaggtgtgcgaggactccatcaccgtgggaatggtgcgtcatcagggcaagatcatgtacgtgggcgacgtgcggagcgtgacacagaagcatatccaggagtggggccctttcgacctggtgatcggcggcagcccttgcaatgacctgagcatcgtgaacccagcccggaagggcctgtacgagggaaccggcagactgttcttcgagttttacagactgctgcacgacgcccggcctaaggaaggcgacgaccggcccttcttttggctgttcgagaatgtggtggccatgggagtcagcgacaagcgggatattagccggttcctggagagcaaccccgtgatgatcgatgccaaggaagtgagcgccgcccaccgggccagatacttctggggcaatctgcctggcatgaacagacccctggccagcaccgtgaacgacaagctggagctgcaggagtgcctggagcacggccggatcgccaagttcagcaaggtgagaaccatcaccacccgaagcaacagcatcaaacaaggcaaggaccagcactttcctgtgttcatgaacgagaaggaggacatcctgtggtgtaccgagatggagagagtgttcgggttcccagtccactacacagatgtcagcaacatgtctagactggccagacagagactgctgggaagaagctggtccgtccctgtgatcagacacctgttcgcccctctgaaggagtacttcgcctgcgtgagcagcggcaacagcaacgccaacagccggggccccagcttctctagcggcctggtgccactgtccctgagagggagccacatgggccccatggagatctacaaaaccgtgagcgcctggaagcggcagcctgtgcgcgtgctgagcctgtttcggaatatcgataaagtcctgaaaagcctgggattcctggagagcggctctggctccggcggtggcaccctgaagtacgtggaggatgtgacaaacgtggtcagacgggatgtggagaagtggggccccttcgatctggtgtacggcagcacccaacccctgggcagctcttgtgaccggtgccctggctggtacatgtttcagttccaccggatcctgcagtacgccctgccgagacaggagtcccagcggccattcttttggattttcatggacaacttgctgctgaccgaggatgaccaggaaactaccactcggttcctgcagaccgaagccgtgaccctgcaggacgtgagaggccgggactaccagaacgccatgcgggtgtggtccaacatccctggactgaaaagcaagcacgcacctctgacccctaaagaagaggagtacctgcaggcccaggtgcggagcagaagcaagctggacgcccctaaggtggatctgctggtgaagaattgcctcctgcccctgagagagtacttcaagtatttcagccagaatagtctgcccctgggaggcagcggcggcggcatggcccccagccagggcaggctgaccttcgaggacgtggccatcgagttcagccaggaggagtgggagtgcctggaccccgcccagagggccctgtacggcgaggtgatgctggagacctacaggaacctggtgagcctgggcctgaccagcaaggacagctgcagcctgaggaagaagcccaggaggaggaggaggggccagaagaggaccagggagtggcccctgctgaggtaccacggcggcccaagcagcggcgcccctcctcccagcggcggcagcccagccggctccccaacctctaccgaggagggcacctctgagtccgccacccccgagagcggccctggcacctccaccgagcccagcgagggcagcgcacccggcagccctgccggcagccccacctccacagaggagggaaccagcaccgagcccagcgaaggcagcgccccaggcaccagcaccgagcctagtgagcaggagattaaacggatcaacaagatcagaagaagacttgtgaaagacagcaacaccaagaaggccggcaagacaggccccatgaaaaccctgctggttagagtgatgacacccgatctgagagagcggctggaaaacctgagaaagaagcctgaaaatatcccccagcccatcagcaatacatctagagccaacctgaataagctgctgaccgattacaccgaaatgaagaaggcgatcctgcatgtgtactgggaagagttccagaaggaccctgtgggcctgatgagccgggtggcccagcctgccagcaagaagatcgatcagaacaagctgaaacctgagatggacgagaagggcaacctgaccaccgccggctttgcctgctctcagtgtggccagcccctgttcgtgtacaagctggagcaggtgtctgagaagggcaaggcttacaccaactacttcggacggtgcaatgtggccgagcacgaaaagctgatcctgctggcccagctgaagcccgagaaggatagcgacgaagccgtgacatatagcctgggaaagtttgggcagagggccctggatttctacagcattcatgtgaccaaggagtccacccaccccgtgaagcccctggcccagatcgccggaaacagatacgcctccggacctgtgggaaaggccctgagcgacgcatgtatgggcacaatcgcctccttcctgtctaagtaccaggacatcatcatcgaacaccagaaggtggtgaagggcaaccagaagagactggagagcctgcgggagctggccggcaaggaaaacctggaataccctagcgtgaccctgccacctcagcctcacaccaaggagggcgttgatgcctacaacgaagtgatcgcccgggtgcgaatgtgggtgaacctgaacctgtggcagaagctgaagctaagcagagatgatgccaagcctctgctgagactgaagggattcccttcctttcctctggtcgagagacaggccaacgaagtggactggtgggacatggtgtgtaacgtgaagaagctgatcaacgagaaaaaggaggatggcaaggtgttttggcagaatctggctggctacaagagacaggaagccctgagaccatacctgagcagcgaggaagatcggaagaagggaaagaaattcgctcggtaccagctgggcgacctgctgctgcacctggaaaagaagcacggcgaggactggggaaaggtgtacgacgaggcctgggagcggattgacaagaaagtggaaggcctgagcaagcacatcaagctggaagaggaacggagaagcgaggacgcccagagcaaggccgccctgaccgactggctgcgggctaaggccagcttcgtgatcgagggcctgaaggaggccgacaaggacgagttctgcagatgcgagctgaagctgcagaagtggtacggggacctgcggggaaagcccttcgccatcgaagccgagaacagcatcctggacatcagcggcttcagcaagcagtacaactgtgccttcatctggcagaaggacggcgtgaagaagctgaacctgtacctgatcatcaactacttcaagggcggcaagctgcggttcaagaagatcaaacctgaagccttcgaagccaacagattctacaccgtgatcaacaaaaagagcggcgagatcgtgcccatggaggtgaacttcaacttcgacgaccccaacctgatcatcctgcctctggcctttggcaagagacagggcagagaattcatctggaacgacctgctgtccctggaaaccggcagcctgaagctggccaacggaagagtgatcgagaagacactgtacaacagaagaacccggcaggatgagcctgccctgttcgtggccctgaccttcgagcggcgggaggtcctggactcctccaatatcaaaccaatgaacctgatcggcgtggcaagaggcgaaaacatccccgccgtgatcgccctgaccgaccccgagggctgcccactgagccggtttaaggatagcctgggaaacccaacccacatcctgagaatcggcgagagctataaggagaagcagcggaccatccaggccaagaaggaggtggagcagcggagagccggcggctacagccggaagtacgccagcaaagccaagaatctggcagacgatatggtgagaaacaccgctagagatctgctgtactacgccgtgacccaggatgccatgctgatcttcgccaacctgagccggggcttcggccggcagggcaagcggaccttcatggccgagagacagtacacacggatggaggactggctgaccgccaagctggcctacgagggcctgagcaagacctacctgtccaagacactggcccagtacacctccaagacatgcagcaactgtgggtttaccatcaccagcgccgactacgacagggtgctggagaagctgaagaagacagcaacaggctggatgaccacaattaacggcaaggagctgaaggtggagggccagattacctactacaacagatacaagagacagaacgtagtcaaggacctgtccgtcgagctggatagactgagcgaagaatctgtgaacaacgacatctcctcctggacaaagggcagaagcggagaagctctgagcctcctgaagaaaagattctcccatagacccgtgcaggagaagttcgtgtgcctgaactgcggcttcgagacacacgcagccgagcaagccgccctgaacatcgccagatcctggctgttcctgcggagccaggagtacaagaaataccagacaaacaagacaaccggcaacaccgataagagagccttcgtcgagacctggcagtccttttaccggaagaagcttaaggaggtgtggaaacctgccgtgcggtctggcggatctggcggaggctccaccagccccaagaaaaagagaaaagtctaagctgccttctgcggggcttgccttctggccatgcccttcttctctcccttgcacctgtacctcttggtctttgaataaagcctgagtaggaaggctagcaaaaaaaaaaaaaaaaaaaaaaaaaaaaaaaaaaaaaaaaaaaaaaaaaaaaaaaaaaaaaaaaaaaaaaaaaaaaaaaa

SEQ ID NO: 12163 - RNA, 5785 nt, synthetic construct
  source 1..5785: mol_type = other RNA
aggaaataagagagaaaagaagagtaagaagaaatataagagccaccatggcccctaagaagaagcgtaaagtgagccggatggaacgcctcgtctacgaggtgcggcagaagtgcagaaacatcgaggacatctgcatctcctgcggatctctgaacgtgaccctggagcacccactgttcatcggcggcatgtgccagaactgtaaaaactgttttctggagtgtgcctatcaatacgacgatgacggctaccagagctactgcaccatctgttgcggcggaagagaggtgctgatgtgtggaaataacaactgctgccggtgcttctgcgtggaatgcgtggacctgctggtgggccccggcgccgcccaggccgctattaaggaagatccttggaactgctacatgtgcggccacaagggcacatacggcctgctgagacggagagaggactggcctagcagactgcagatgttcttcgccaataaccacgaccaggagttcgacccccctaaggtgtaccctcccgtccccgccgagaagagaaagcccatccgggtcctgagcctgttcgatggcatcgccaccggtctgctggtgctgaaggacctgggcatccaggtggataggtacattgcctccgaggtgtgcgaggactccatcaccgtgggaatggtgcgtcatcagggcaagatcatgtacgtgggcgacgtgcggagcgtgacacagaagcatatccaggagtggggccctttcgacctggtgatcggcggcagcccttgcaatgacctgagcatcgtgaacccagcccggaagggcctgtacgagggaaccggcagactgttcttcgagttttacagactgctgcacgacgcccggcctaaggaaggcgacgaccggcccttcttttggctgttcgagaatgtggtggccatgggagtcagcgacaagcgggatattagccggttcctggagagcaaccccgtgatgatcgatgccaaggaagtgagcgccgcccaccgggccagatacttctggggcaatctgcctggcatgaacagacccctggccagcaccgtgaacgacaagctggagctgcaggagtgcctggagcacggccggatcgccaagttcagcaaggtgagaaccatcaccacccgaagcaacagcatcaaacaaggcaaggaccagcactttcctgtgttcatgaacgagaaggaggacatcctgtggtgtaccgagatggagagagtgttcgggttcccagtccactacacagatgtcagcaacatgtctagactggccagacagagactgctgggaagaagctggtccgtccctgtgatcagacacctgttcgcccctctgaaggagtacttcgcctgcgtgagcagcggcaacagcaacgccaacagccggggccccagcttctctagcggcctggtgccactgtccctgagagggagccacatgggccccatggagatctacaaaaccgtgagcgcctggaagcggcagcctgtgcgcgtgctgagcctgtttcggaatatcgataaagtcctgaaaagcctgggattcctggagagcggctctggctccggcggtggcaccctgaagtacgtggaggatgtgacaaacgtggtcagacgggatgtggagaagtggggccccttcgatctggtgtacggcagcacccaacccctgggcagctcttgtgaccggtgccctggctggtacatgtttcagttccaccggatcctgcagtacgccctgccgagacaggagtcccagcggccattcttttggattttcatggacaacttgctgctgaccgaggatgaccaggaaactaccactcggttcctgcagaccgaagccgtgaccctgcaggacgtgagaggccgggactaccagaacgccatgcgggtgtggtccaacatccctggactgaaaagcaagcacgcacctctgacccctaaagaagaggagtacctgcaggcccaggtgcggagcagaagcaagctggacgcccctaaggtggatctgctggtgaagaattgcctcctgcccctgagagagtacttcaagtatttcagccagaatagtctgcccctgggaggcagcggcggcggcagccagagcctggtgaccttcggcgacgtggccgtggagttcagccccgaggagtgggagtggctggacagcgcccagaggagcctgtacaggagcgtgatgctggagaactacaggagcctggtgagcctgggcctgtgcgtgagcaagcccaagatgatcagcagcctggagcagaggaaggagccctgggccgccaagaggaccctgaccaggggcggctgcagcgacagcagggccctgggcggcccaagcagcggcgcccctcctcccagcggcggcagcccagccggctccccaacctctaccgaggagggcacctctgagtccgccacccccgagagcggccctggcacctccaccgagcccagcgagggcagcgcacccggcagccctgccggcagccccacctccacagaggagggaaccagcaccgagcccagcgaaggcagcgccccaggcaccagcaccgagcctagtgagcaggagattaaacggatcaacaagatcagaagaagacttgtgaaagacagcaacaccaagaaggccggcaagacaggccccatgaaaaccctgctggttagagtgatgacacccgatctgagagagcggctggaaaacctgagaaagaagcctgaaaatatcccccagcccatcagcaatacatctagagccaacctgaataagctgctgaccgattacaccgaaatgaagaaggcgatcctgcatgtgtactgggaagagttccagaaggaccctgtgggcctgatgagccgggtggcccagcctgccagcaagaagatcgatcagaacaagctgaaacctgagatggacgagaagggcaacctgaccaccgccggctttgcctgctctcagtgtggccagcccctgttcgtgtacaagctggagcaggtgtctgagaagggcaaggcttacaccaactacttcggacggtgcaatgtggccgagcacgaaaagctgatcctgctggcccagctgaagcccgagaaggatagcgacgaagccgtgacatatagcctgggaaagtttgggcagagggccctggatttctacagcattcatgtgaccaaggagtccacccaccccgtgaagcccctggcccagatcgccggaaacagatacgcctccggacctgtgggaaaggccctgagcgacgcatgtatgggcacaatcgcctccttcctgtctaagtaccaggacatcatcatcgaacaccagaaggtggtgaagggcaaccagaagagactggagagcctgcgggagctggccggcaaggaaaacctggaataccctagcgtgaccctgccacctcagcctcacaccaaggagggcgttgatgcctacaacgaagtgatcgcccgggtgcgaatgtgggtgaacctgaacctgtggcagaagctgaagctaagcagagatgatgccaagcctctgctgagactgaagggattcccttcctttcctctggtcgagagacaggccaacgaagtggactggtgggacatggtgtgtaacgtgaagaagctgatcaacgagaaaaaggaggatggcaaggtgttttggcagaatctggctggctacaagagacaggaagccctgagaccatacctgagcagcgaggaagatcggaagaagggaaagaaattcgctcggtaccagctgggcgacctgctgctgcacctggaaaagaagcacggcgaggactggggaaaggtgtacgacgaggcctgggagcggattgacaagaaagtggaaggcctgagcaagcacatcaagctggaagaggaacggagaagcgaggacgcccagagcaaggccgccctgaccgactggctgcgggctaaggccagcttcgtgatcgagggcctgaaggaggccgacaaggacgagttctgcagatgcgagctgaagctgcagaagtggtacggggacctgcggggaaagcccttcgccatcgaagccgagaacagcatcctggacatcagcggcttcagcaagcagtacaactgtgccttcatctggcagaaggacggcgtgaagaagctgaacctgtacctgatcatcaactacttcaagggcggcaagctgcggttcaagaagatcaaacctgaagccttcgaagccaacagattctacaccgtgatcaacaaaaagagcggcgagatcgtgcccatggaggtgaacttcaacttcgacgaccccaacctgatcatcctgcctctggcctttggcaagagacagggcagagaattcatctggaacgacctgctgtccctggaaaccggcagcctgaagctggccaacggaagagtgatcgagaagacactgtacaacagaagaacccggcaggatgagcctgccctgttcgtggccctgaccttcgagcggcgggaggtcctggactcctccaatatcaaaccaatgaacctgatcggcgtggcaagaggcgaaaacatccccgccgtgatcgccctgaccgaccccgagggctgcccactgagccggtttaaggatagcctgggaaacccaacccacatcctgagaatcggcgagagctataaggagaagcagcggaccatccaggccaagaaggaggtggagcagcggagagccggcggctacagccggaagtacgccagcaaagccaagaatctggcagacgatatggtgagaaacaccgctagagatctgctgtactacgccgtgacccaggatgccatgctgatcttcgccaacctgagccggggcttcggccggcagggcaagcggaccttcatggccgagagacagtacacacggatggaggactggctgaccgccaagctggcctacgagggcctgagcaagacctacctgtccaagacactggcccagtacacctccaagacatgcagcaactgtgggtttaccatcaccagcgccgactacgacagggtgctggagaagctgaagaagacagcaacaggctggatgaccacaattaacggcaaggagctgaaggtggagggccagattacctactacaacagatacaagagacagaacgtagtcaaggacctgtccgtcgagctggatagactgagcgaagaatctgtgaacaacgacatctcctcctggacaaagggcagaagcggagaagctctgagcctcctgaagaaaagattctcccatagacccgtgcaggagaagttcgtgtgcctgaactgcggcttcgagacacacgcagccgagcaagccgccctgaacatcgccagatcctggctgttcctgcggagccaggagtacaagaaataccagacaaacaagacaaccggcaacaccgataagagagccttcgtcgagacctggcagtccttttaccggaagaagcttaaggaggtgtggaaacctgccgtgcggtctggcggatctggcggaggctccaccagccccaagaaaaagagaaaagtctaagctgccttctgcggggcttgccttctggccatgcccttcttctctcccttgcacctgtacctcttggtctttgaataaagcctgagtaggaaggctagcaaaaaaaaaaaaaaaaaaaaaaaaaaaaaaaaaaaaaaaaaaaaaaaaaaaaaaaaaaaaaaaaaaaaaaaaaaaaaaaa

SEQ ID NO: 12164 - RNA, 5785 nt, synthetic construct
  source 1..5785: mol_type = other RNA
aggaaataagagagaaaagaagagtaagaagaaatataagagccaccatggcccctaagaagaagcgtaaagtgagccggatggaacgcctcgtctacgaggtgcggcagaagtgcagaaacatcgaggacatctgcatctcctgcggatctctgaacgtgaccctggagcacccactgttcatcggcggcatgtgccagaactgtaaaaactgttttctggagtgtgcctatcaatacgacgatgacggctaccagagctactgcaccatctgttgcggcggaagagaggtgctgatgtgtggaaataacaactgctgccggtgcttctgcgtggaatgcgtggacctgctggtgggccccggcgccgcccaggccgctattaaggaagatccttggaactgctacatgtgcggccacaagggcacatacggcctgctgagacggagagaggactggcctagcagactgcagatgttcttcgccaataaccacgaccaggagttcgacccccctaaggtgtaccctcccgtccccgccgagaagagaaagcccatccgggtcctgagcctgttcgatggcatcgccaccggtctgctggtgctgaaggacctgggcatccaggtggataggtacattgcctccgaggtgtgcgaggactccatcaccgtgggaatggtgcgtcatcagggcaagatcatgtacgtgggcgacgtgcggagcgtgacacagaagcatatccaggagtggggccctttcgacctggtgatcggcggcagcccttgcaatgacctgagcatcgtgaacccagcccggaagggcctgtacgagggaaccggcagactgttcttcgagttttacagactgctgcacgacgcccggcctaaggaaggcgacgaccggcccttcttttggctgttcgagaatgtggtggccatgggagtcagcgacaagcgggatattagccggttcctggagagcaaccccgtgatgatcgatgccaaggaagtgagcgccgcccaccgggccagatacttctggggcaatctgcctggcatgaacagacccctggccagcaccgtgaacgacaagctggagctgcaggagtgcctggagcacggccggatcgccaagttcagcaaggtgagaaccatcaccacccgaagcaacagcatcaaacaaggcaaggaccagcactttcctgtgttcatgaacgagaaggaggacatcctgtggtgtaccgagatggagagagtgttcgggttcccagtccactacacagatgtcagcaacatgtctagactggccagacagagactgctgggaagaagctggtccgtccctgtgatcagacacctgttcgcccctctgaaggagtacttcgcctgcgtgagcagcggcaacagcaacgccaacagccggggccccagcttctctagcggcctggtgccactgtccctgagagggagccacatgggccccatggagatctacaaaaccgtgagcgcctggaagcggcagcctgtgcgcgtgctgagcctgtttcggaatatcgataaagtcctgaaaagcctgggattcctggagagcggctctggctccggcggtggcaccctgaagtacgtggaggatgtgacaaacgtggtcagacgggatgtggagaagtggggccccttcgatctggtgtacggcagcacccaacccctgggcagctcttgtgaccggtgccctggctggtacatgtttcagttccaccggatcctgcagtacgccctgccgagacaggagtcccagcggccattcttttggattttcatggacaacttgctgctgaccgaggatgaccaggaaactaccactcggttcctgcagaccgaagccgtgaccctgcaggacgtgagaggccgggactaccagaacgccatgcgggtgtggtccaacatccctggactgaaaagcaagcacgcacctctgacccctaaagaagaggagtacctgcaggcccaggtgcggagcagaagcaagctggacgcccctaaggtggatctgctggtgaagaattgcctcctgcccctgagagagtacttcaagtatttcagccagaatagtctgcccctgggaggcagcggcggcggcagcaagctgcccgtgaccttcggcgacctggccatctacttcagccaggaggagtgggagtggctgagccccatccagaaggacctgtacgaggacgtgatgctggagaactaccagaacctggtgagcctgggcctgagcttcaggaggcccaacgtgatcaccctgctggagaagggcaaggccccctggatggtggagcccgtgaggaagaggaggggcctggacagcaagagcaagtgcggcggcccaagcagcggcgcccctcctcccagcggcggcagcccagccggctccccaacctctaccgaggagggcacctctgagtccgccacccccgagagcggccctggcacctccaccgagcccagcgagggcagcgcacccggcagccctgccggcagccccacctccacagaggagggaaccagcaccgagcccagcgaaggcagcgccccaggcaccagcaccgagcctagtgagcaggagattaaacggatcaacaagatcagaagaagacttgtgaaagacagcaacaccaagaaggccggcaagacaggccccatgaaaaccctgctggttagagtgatgacacccgatctgagagagcggctggaaaacctgagaaagaagcctgaaaatatcccccagcccatcagcaatacatctagagccaacctgaataagctgctgaccgattacaccgaaatgaagaaggcgatcctgcatgtgtactgggaagagttccagaaggaccctgtgggcctgatgagccgggtggcccagcctgccagcaagaagatcgatcagaacaagctgaaacctgagatggacgagaagggcaacctgaccaccgccggctttgcctgctctcagtgtggccagcccctgttcgtgtacaagctggagcaggtgtctgagaagggcaaggcttacaccaactacttcggacggtgcaatgtggccgagcacgaaaagctgatcctgctggcccagctgaagcccgagaaggatagcgacgaagccgtgacatatagcctgggaaagtttgggcagagggccctggatttctacagcattcatgtgaccaaggagtccacccaccccgtgaagcccctggcccagatcgccggaaacagatacgcctccggacctgtgggaaaggccctgagcgacgcatgtatgggcacaatcgcctccttcctgtctaagtaccaggacatcatcatcgaacaccagaaggtggtgaagggcaaccagaagagactggagagcctgcgggagctggccggcaaggaaaacctggaataccctagcgtgaccctgccacctcagcctcacaccaaggagggcgttgatgcctacaacgaagtgatcgcccgggtgcgaatgtgggtgaacctgaacctgtggcagaagctgaagctaagcagagatgatgccaagcctctgctgagactgaagggattcccttcctttcctctggtcgagagacaggccaacgaagtggactggtgggacatggtgtgtaacgtgaagaagctgatcaacgagaaaaaggaggatggcaaggtgttttggcagaatctggctggctacaagagacaggaagccctgagaccatacctgagcagcgaggaagatcggaagaagggaaagaaattcgctcggtaccagctgggcgacctgctgctgcacctggaaaagaagcacggcgaggactggggaaaggtgtacgacgaggcctgggagcggattgacaagaaagtggaaggcctgagcaagcacatcaagctggaagaggaacggagaagcgaggacgcccagagcaaggccgccctgaccgactggctgcgggctaaggccagcttcgtgatcgagggcctgaaggaggccgacaaggacgagttctgcagatgcgagctgaagctgcagaagtggtacggggacctgcggggaaagcccttcgccatcgaagccgagaacagcatcctggacatcagcggcttcagcaagcagtacaactgtgccttcatctggcagaaggacggcgtgaagaagctgaacctgtacctgatcatcaactacttcaagggcggcaagctgcggttcaagaagatcaaacctgaagccttcgaagccaacagattctacaccgtgatcaacaaaaagagcggcgagatcgtgcccatggaggtgaacttcaacttcgacgaccccaacctgatcatcctgcctctggcctttggcaagagacagggcagagaattcatctggaacgacctgctgtccctggaaaccggcagcctgaagctggccaacggaagagtgatcgagaagacactgtacaacagaagaacccggcaggatgagcctgccctgttcgtggccctgaccttcgagcggcgggaggtcctggactcctccaatatcaaaccaatgaacctgatcggcgtggcaagaggcgaaaacatccccgccgtgatcgccctgaccgaccccgagggctgcccactgagccggtttaaggatagcctgggaaacccaacccacatcctgagaatcggcgagagctataaggagaagcagcggaccatccaggccaagaaggaggtggagcagcggagagccggcggctacagccggaagtacgccagcaaagccaagaatctggcagacgatatggtgagaaacaccgctagagatctgctgtactacgccgtgacccaggatgccatgctgatcttcgccaacctgagccggggcttcggccggcagggcaagcggaccttcatggccgagagacagtacacacggatggaggactggctgaccgccaagctggcctacgagggcctgagcaagacctacctgtccaagacactggcccagtacacctccaagacatgcagcaactgtgggtttaccatcaccagcgccgactacgacagggtgctggagaagctgaagaagacagcaacaggctggatgaccacaattaacggcaaggagctgaaggtggagggccagattacctactacaacagatacaagagacagaacgtagtcaaggacctgtccgtcgagctggatagactgagcgaagaatctgtgaacaacgacatctcctcctggacaaagggcagaagcggagaagctctgagcctcctgaagaaaagattctcccatagacccgtgcaggagaagttcgtgtgcctgaactgcggcttcgagacacacgcagccgagcaagccgccctgaacatcgccagatcctggctgttcctgcggagccaggagtacaagaaataccagacaaacaagacaaccggcaacaccgataagagagccttcgtcgagacctggcagtccttttaccggaagaagcttaaggaggtgtggaaacctgccgtgcggtctggcggatctggcggaggctccaccagccccaagaaaaagagaaaagtctaagctgccttctgcggggcttgccttctggccatgcccttcttctctcccttgcacctgtacctcttggtctttgaataaagcctgagtaggaaggctagcaaaaaaaaaaaaaaaaaaaaaaaaaaaaaaaaaaaaaaaaaaaaaaaaaaaaaaaaaaaaaaaaaaaaaaaaaaaaaaaa

SEQ ID NO: 12165 - RNA, 5785 nt, synthetic construct
  source 1..5785: mol_type = other RNA
aggaaataagagagaaaagaagagtaagaagaaatataagagccaccatggcccctaagaagaagcgtaaagtgagccggatggaacgcctcgtctacgaggtgcggcagaagtgcagaaacatcgaggacatctgcatctcctgcggatctctgaacgtgaccctggagcacccactgttcatcggcggcatgtgccagaactgtaaaaactgttttctggagtgtgcctatcaatacgacgatgacggctaccagagctactgcaccatctgttgcggcggaagagaggtgctgatgtgtggaaataacaactgctgccggtgcttctgcgtggaatgcgtggacctgctggtgggccccggcgccgcccaggccgctattaaggaagatccttggaactgctacatgtgcggccacaagggcacatacggcctgctgagacggagagaggactggcctagcagactgcagatgttcttcgccaataaccacgaccaggagttcgacccccctaaggtgtaccctcccgtccccgccgagaagagaaagcccatccgggtcctgagcctgttcgatggcatcgccaccggtctgctggtgctgaaggacctgggcatccaggtggataggtacattgcctccgaggtgtgcgaggactccatcaccgtgggaatggtgcgtcatcagggcaagatcatgtacgtgggcgacgtgcggagcgtgacacagaagcatatccaggagtggggccctttcgacctggtgatcggcggcagcccttgcaatgacctgagcatcgtgaacccagcccggaagggcctgtacgagggaaccggcagactgttcttcgagttttacagactgctgcacgacgcccggcctaaggaaggcgacgaccggcccttcttttggctgttcgagaatgtggtggccatgggagtcagcgacaagcgggatattagccggttcctggagagcaaccccgtgatgatcgatgccaaggaagtgagcgccgcccaccgggccagatacttctggggcaatctgcctggcatgaacagacccctggccagcaccgtgaacgacaagctggagctgcaggagtgcctggagcacggccggatcgccaagttcagcaaggtgagaaccatcaccacccgaagcaacagcatcaaacaaggcaaggaccagcactttcctgtgttcatgaacgagaaggaggacatcctgtggtgtaccgagatggagagagtgttcgggttcccagtccactacacagatgtcagcaacatgtctagactggccagacagagactgctgggaagaagctggtccgtccctgtgatcagacacctgttcgcccctctgaaggagtacttcgcctgcgtgagcagcggcaacagcaacgccaacagccggggccccagcttctctagcggcctggtgccactgtccctgagagggagccacatgggccccatggagatctacaaaaccgtgagcgcctggaagcggcagcctgtgcgcgtgctgagcctgtttcggaatatcgataaagtcctgaaaagcctgggattcctggagagcggctctggctccggcggtggcaccctgaagtacgtggaggatgtgacaaacgtggtcagacgggatgtggagaagtggggccccttcgatctggtgtacggcagcacccaacccctgggcagctcttgtgaccggtgccctggctggtacatgtttcagttccaccggatcctgcagtacgccctgccgagacaggagtcccagcggccattcttttggattttcatggacaacttgctgctgaccgaggatgaccaggaaactaccactcggttcctgcagaccgaagccgtgaccctgcaggacgtgagaggccgggactaccagaacgccatgcgggtgtggtccaacatccctggactgaaaagcaagcacgcacctctgacccctaaagaagaggagtacctgcaggcccaggtgcggagcagaagcaagctggacgcccctaaggtggatctgctggtgaagaattgcctcctgcccctgagagagtacttcaagtatttcagccagaatagtctgcccctgggaggcagcggcggcggccaggaccccagcgccgagggcctgagcgaggaggtgcccgtggtgttcgaggagctgcccgtggtgttcgaggacgtggccgtgtacttcaccagggaggagtggggcatgctggacaagaggcagaaggagctgtacagggacgtgatgaggatgaactacgagctgctggccagcctgggccccgccgccgccaagcccgacctgatcagcaagctggagaggagggccgccccctggatcggcggcccaagcagcggcgcccctcctcccagcggcggcagcccagccggctccccaacctctaccgaggagggcacctctgagtccgccacccccgagagcggccctggcacctccaccgagcccagcgagggcagcgcacccggcagccctgccggcagccccacctccacagaggagggaaccagcaccgagcccagcgaaggcagcgccccaggcaccagcaccgagcctagtgagcaggagattaaacggatcaacaagatcagaagaagacttgtgaaagacagcaacaccaagaaggccggcaagacaggccccatgaaaaccctgctggttagagtgatgacacccgatctgagagagcggctggaaaacctgagaaagaagcctgaaaatatcccccagcccatcagcaatacatctagagccaacctgaataagctgctgaccgattacaccgaaatgaagaaggcgatcctgcatgtgtactgggaagagttccagaaggaccctgtgggcctgatgagccgggtggcccagcctgccagcaagaagatcgatcagaacaagctgaaacctgagatggacgagaagggcaacctgaccaccgccggctttgcctgctctcagtgtggccagcccctgttcgtgtacaagctggagcaggtgtctgagaagggcaaggcttacaccaactacttcggacggtgcaatgtggccgagcacgaaaagctgatcctgctggcccagctgaagcccgagaaggatagcgacgaagccgtgacatatagcctgggaaagtttgggcagagggccctggatttctacagcattcatgtgaccaaggagtccacccaccccgtgaagcccctggcccagatcgccggaaacagatacgcctccggacctgtgggaaaggccctgagcgacgcatgtatgggcacaatcgcctccttcctgtctaagtaccaggacatcatcatcgaacaccagaaggtggtgaagggcaaccagaagagactggagagcctgcgggagctggccggcaaggaaaacctggaataccctagcgtgaccctgccacctcagcctcacaccaaggagggcgttgatgcctacaacgaagtgatcgcccgggtgcgaatgtgggtgaacctgaacctgtggcagaagctgaagctaagcagagatgatgccaagcctctgctgagactgaagggattcccttcctttcctctggtcgagagacaggccaacgaagtggactggtgggacatggtgtgtaacgtgaagaagctgatcaacgagaaaaaggaggatggcaaggtgttttggcagaatctggctggctacaagagacaggaagccctgagaccatacctgagcagcgaggaagatcggaagaagggaaagaaattcgctcggtaccagctgggcgacctgctgctgcacctggaaaagaagcacggcgaggactggggaaaggtgtacgacgaggcctgggagcggattgacaagaaagtggaaggcctgagcaagcacatcaagctggaagaggaacggagaagcgaggacgcccagagcaaggccgccctgaccgactggctgcgggctaaggccagcttcgtgatcgagggcctgaaggaggccgacaaggacgagttctgcagatgcgagctgaagctgcagaagtggtacggggacctgcggggaaagcccttcgccatcgaagccgagaacagcatcctggacatcagcggcttcagcaagcagtacaactgtgccttcatctggcagaaggacggcgtgaagaagctgaacctgtacctgatcatcaactacttcaagggcggcaagctgcggttcaagaagatcaaacctgaagccttcgaagccaacagattctacaccgtgatcaacaaaaagagcggcgagatcgtgcccatggaggtgaacttcaacttcgacgaccccaacctgatcatcctgcctctggcctttggcaagagacagggcagagaattcatctggaacgacctgctgtccctggaaaccggcagcctgaagctggccaacggaagagtgatcgagaagacactgtacaacagaagaacccggcaggatgagcctgccctgttcgtggccctgaccttcgagcggcgggaggtcctggactcctccaatatcaaaccaatgaacctgatcggcgtggcaagaggcgaaaacatccccgccgtgatcgccctgaccgaccccgagggctgcccactgagccggtttaaggatagcctgggaaacccaacccacatcctgagaatcggcgagagctataaggagaagcagcggaccatccaggccaagaaggaggtggagcagcggagagccggcggctacagccggaagtacgccagcaaagccaagaatctggcagacgatatggtgagaaacaccgctagagatctgctgtactacgccgtgacccaggatgccatgctgatcttcgccaacctgagccggggcttcggccggcagggcaagcggaccttcatggccgagagacagtacacacggatggaggactggctgaccgccaagctggcctacgagggcctgagcaagacctacctgtccaagacactggcccagtacacctccaagacatgcagcaactgtgggtttaccatcaccagcgccgactacgacagggtgctggagaagctgaagaagacagcaacaggctggatgaccacaattaacggcaaggagctgaaggtggagggccagattacctactacaacagatacaagagacagaacgtagtcaaggacctgtccgtcgagctggatagactgagcgaagaatctgtgaacaacgacatctcctcctggacaaagggcagaagcggagaagctctgagcctcctgaagaaaagattctcccatagacccgtgcaggagaagttcgtgtgcctgaactgcggcttcgagacacacgcagccgagcaagccgccctgaacatcgccagatcctggctgttcctgcggagccaggagtacaagaaataccagacaaacaagacaaccggcaacaccgataagagagccttcgtcgagacctggcagtccttttaccggaagaagcttaaggaggtgtggaaacctgccgtgcggtctggcggatctggcggaggctccaccagccccaagaaaaagagaaaagtctaagctgccttctgcggggcttgccttctggccatgcccttcttctctcccttgcacctgtacctcttggtctttgaataaagcctgagtaggaaggctagcaaaaaaaaaaaaaaaaaaaaaaaaaaaaaaaaaaaaaaaaaaaaaaaaaaaaaaaaaaaaaaaaaaaaaaaaaaaaaaaa

SEQ ID NO: 12166 - RNA, 5785 nt, synthetic construct
  source 1..5785: mol_type = other RNA
aggaaataagagagaaaagaagagtaagaagaaatataagagccaccatggcccctaagaagaagcgtaaagtgagccggatggaacgcctcgtctacgaggtgcggcagaagtgcagaaacatcgaggacatctgcatctcctgcggatctctgaacgtgaccctggagcacccactgttcatcggcggcatgtgccagaactgtaaaaactgttttctggagtgtgcctatcaatacgacgatgacggctaccagagctactgcaccatctgttgcggcggaagagaggtgctgatgtgtggaaataacaactgctgccggtgcttctgcgtggaatgcgtggacctgctggtgggccccggcgccgcccaggccgctattaaggaagatccttggaactgctacatgtgcggccacaagggcacatacggcctgctgagacggagagaggactggcctagcagactgcagatgttcttcgccaataaccacgaccaggagttcgacccccctaaggtgtaccctcccgtccccgccgagaagagaaagcccatccgggtcctgagcctgttcgatggcatcgccaccggtctgctggtgctgaaggacctgggcatccaggtggataggtacattgcctccgaggtgtgcgaggactccatcaccgtgggaatggtgcgtcatcagggcaagatcatgtacgtgggcgacgtgcggagcgtgacacagaagcatatccaggagtggggccctttcgacctggtgatcggcggcagcccttgcaatgacctgagcatcgtgaacccagcccggaagggcctgtacgagggaaccggcagactgttcttcgagttttacagactgctgcacgacgcccggcctaaggaaggcgacgaccggcccttcttttggctgttcgagaatgtggtggccatgggagtcagcgacaagcgggatattagccggttcctggagagcaaccccgtgatgatcgatgccaaggaagtgagcgccgcccaccgggccagatacttctggggcaatctgcctggcatgaacagacccctggccagcaccgtgaacgacaagctggagctgcaggagtgcctggagcacggccggatcgccaagttcagcaaggtgagaaccatcaccacccgaagcaacagcatcaaacaaggcaaggaccagcactttcctgtgttcatgaacgagaaggaggacatcctgtggtgtaccgagatggagagagtgttcgggttcccagtccactacacagatgtcagcaacatgtctagactggccagacagagactgctgggaagaagctggtccgtccctgtgatcagacacctgttcgcccctctgaaggagtacttcgcctgcgtgagcagcggcaacagcaacgccaacagccggggccccagcttctctagcggcctggtgccactgtccctgagagggagccacatgggccccatggagatctacaaaaccgtgagcgcctggaagcggcagcctgtgcgcgtgctgagcctgtttcggaatatcgataaagtcctgaaaagcctgggattcctggagagcggctctggctccggcggtggcaccctgaagtacgtggaggatgtgacaaacgtggtcagacgggatgtggagaagtggggccccttcgatctggtgtacggcagcacccaacccctgggcagctcttgtgaccggtgccctggctggtacatgtttcagttccaccggatcctgcagtacgccctgccgagacaggagtcccagcggccattcttttggattttcatggacaacttgctgctgaccgaggatgaccaggaaactaccactcggttcctgcagaccgaagccgtgaccctgcaggacgtgagaggccgggactaccagaacgccatgcgggtgtggtccaacatccctggactgaaaagcaagcacgcacctctgacccctaaagaagaggagtacctgcaggcccaggtgcggagcagaagcaagctggacgcccctaaggtggatctgctggtgaagaattgcctcctgcccctgagagagtacttcaagtatttcagccagaatagtctgcccctgggaggcagcggcggcggcatccagaacaccgtgacctacgacgacgtgcacatcgacttcacctgggaggagtggaccctgctggaccccagccagaggaacctgtacaaggacgtgatggtggagacctacaccaacctgaccgccgtgggctacagctgggaggaccacaacatggaggagcactgccagagcagccagaggcagaggaggtacaagaggagcaacaccggcgagaagccctgcgagtacacccagtgcggcggcccaagcagcggcgcccctcctcccagcggcggcagcccagccggctccccaacctctaccgaggagggcacctctgagtccgccacccccgagagcggccctggcacctccaccgagcccagcgagggcagcgcacccggcagccctgccggcagccccacctccacagaggagggaaccagcaccgagcccagcgaaggcagcgccccaggcaccagcaccgagcctagtgagcaggagattaaacggatcaacaagatcagaagaagacttgtgaaagacagcaacaccaagaaggccggcaagacaggccccatgaaaaccctgctggttagagtgatgacacccgatctgagagagcggctggaaaacctgagaaagaagcctgaaaatatcccccagcccatcagcaatacatctagagccaacctgaataagctgctgaccgattacaccgaaatgaagaaggcgatcctgcatgtgtactgggaagagttccagaaggaccctgtgggcctgatgagccgggtggcccagcctgccagcaagaagatcgatcagaacaagctgaaacctgagatggacgagaagggcaacctgaccaccgccggctttgcctgctctcagtgtggccagcccctgttcgtgtacaagctggagcaggtgtctgagaagggcaaggcttacaccaactacttcggacggtgcaatgtggccgagcacgaaaagctgatcctgctggcccagctgaagcccgagaaggatagcgacgaagccgtgacatatagcctgggaaagtttgggcagagggccctggatttctacagcattcatgtgaccaaggagtccacccaccccgtgaagcccctggcccagatcgccggaaacagatacgcctccggacctgtgggaaaggccctgagcgacgcatgtatgggcacaatcgcctccttcctgtctaagtaccaggacatcatcatcgaacaccagaaggtggtgaagggcaaccagaagagactggagagcctgcgggagctggccggcaaggaaaacctggaataccctagcgtgaccctgccacctcagcctcacaccaaggagggcgttgatgcctacaacgaagtgatcgcccgggtgcgaatgtgggtgaacctgaacctgtggcagaagctgaagctaagcagagatgatgccaagcctctgctgagactgaagggattcccttcctttcctctggtcgagagacaggccaacgaagtggactggtgggacatggtgtgtaacgtgaagaagctgatcaacgagaaaaaggaggatggcaaggtgttttggcagaatctggctggctacaagagacaggaagccctgagaccatacctgagcagcgaggaagatcggaagaagggaaagaaattcgctcggtaccagctgggcgacctgctgctgcacctggaaaagaagcacggcgaggactggggaaaggtgtacgacgaggcctgggagcggattgacaagaaagtggaaggcctgagcaagcacatcaagctggaagaggaacggagaagcgaggacgcccagagcaaggccgccctgaccgactggctgcgggctaaggccagcttcgtgatcgagggcctgaaggaggccgacaaggacgagttctgcagatgcgagctgaagctgcagaagtggtacggggacctgcggggaaagcccttcgccatcgaagccgagaacagcatcctggacatcagcggcttcagcaagcagtacaactgtgccttcatctggcagaaggacggcgtgaagaagctgaacctgtacctgatcatcaactacttcaagggcggcaagctgcggttcaagaagatcaaacctgaagccttcgaagccaacagattctacaccgtgatcaacaaaaagagcggcgagatcgtgcccatggaggtgaacttcaacttcgacgaccccaacctgatcatcctgcctctggcctttggcaagagacagggcagagaattcatctggaacgacctgctgtccctggaaaccggcagcctgaagctggccaacggaagagtgatcgagaagacactgtacaacagaagaacccggcaggatgagcctgccctgttcgtggccctgaccttcgagcggcgggaggtcctggactcctccaatatcaaaccaatgaacctgatcggcgtggcaagaggcgaaaacatccccgccgtgatcgccctgaccgaccccgagggctgcccactgagccggtttaaggatagcctgggaaacccaacccacatcctgagaatcggcgagagctataaggagaagcagcggaccatccaggccaagaaggaggtggagcagcggagagccggcggctacagccggaagtacgccagcaaagccaagaatctggcagacgatatggtgagaaacaccgctagagatctgctgtactacgccgtgacccaggatgccatgctgatcttcgccaacctgagccggggcttcggccggcagggcaagcggaccttcatggccgagagacagtacacacggatggaggactggctgaccgccaagctggcctacgagggcctgagcaagacctacctgtccaagacactggcccagtacacctccaagacatgcagcaactgtgggtttaccatcaccagcgccgactacgacagggtgctggagaagctgaagaagacagcaacaggctggatgaccacaattaacggcaaggagctgaaggtggagggccagattacctactacaacagatacaagagacagaacgtagtcaaggacctgtccgtcgagctggatagactgagcgaagaatctgtgaacaacgacatctcctcctggacaaagggcagaagcggagaagctctgagcctcctgaagaaaagattctcccatagacccgtgcaggagaagttcgtgtgcctgaactgcggcttcgagacacacgcagccgagcaagccgccctgaacatcgccagatcctggctgttcctgcggagccaggagtacaagaaataccagacaaacaagacaaccggcaacaccgataagagagccttcgtcgagacctggcagtccttttaccggaagaagcttaaggaggtgtggaaacctgccgtgcggtctggcggatctggcggaggctccaccagccccaagaaaaagagaaaagtctaagctgccttctgcggggcttgccttctggccatgcccttcttctctcccttgcacctgtacctcttggtctttgaataaagcctgagtaggaaggctagcaaaaaaaaaaaaaaaaaaaaaaaaaaaaaaaaaaaaaaaaaaaaaaaaaaaaaaaaaaaaaaaaaaaaaaaaaaaaaaaa

SEQ ID NO: 12167 - RNA, 5785 nt, synthetic construct
  source 1..5785: mol_type = other RNA
aggaaataagagagaaaagaagagtaagaagaaatataagagccaccatggcccctaagaagaagcgtaaagtgagccggatggaacgcctcgtctacgaggtgcggcagaagtgcagaaacatcgaggacatctgcatctcctgcggatctctgaacgtgaccctggagcacccactgttcatcggcggcatgtgccagaactgtaaaaactgttttctggagtgtgcctatcaatacgacgatgacggctaccagagctactgcaccatctgttgcggcggaagagaggtgctgatgtgtggaaataacaactgctgccggtgcttctgcgtggaatgcgtggacctgctggtgggccccggcgccgcccaggccgctattaaggaagatccttggaactgctacatgtgcggccacaagggcacatacggcctgctgagacggagagaggactggcctagcagactgcagatgttcttcgccaataaccacgaccaggagttcgacccccctaaggtgtaccctcccgtccccgccgagaagagaaagcccatccgggtcctgagcctgttcgatggcatcgccaccggtctgctggtgctgaaggacctgggcatccaggtggataggtacattgcctccgaggtgtgcgaggactccatcaccgtgggaatggtgcgtcatcagggcaagatcatgtacgtgggcgacgtgcggagcgtgacacagaagcatatccaggagtggggccctttcgacctggtgatcggcggcagcccttgcaatgacctgagcatcgtgaacccagcccggaagggcctgtacgagggaaccggcagactgttcttcgagttttacagactgctgcacgacgcccggcctaaggaaggcgacgaccggcccttcttttggctgttcgagaatgtggtggccatgggagtcagcgacaagcgggatattagccggttcctggagagcaaccccgtgatgatcgatgccaaggaagtgagcgccgcccaccgggccagatacttctggggcaatctgcctggcatgaacagacccctggccagcaccgtgaacgacaagctggagctgcaggagtgcctggagcacggccggatcgccaagttcagcaaggtgagaaccatcaccacccgaagcaacagcatcaaacaaggcaaggaccagcactttcctgtgttcatgaacgagaaggaggacatcctgtggtgtaccgagatggagagagtgttcgggttcccagtccactacacagatgtcagcaacatgtctagactggccagacagagactgctgggaagaagctggtccgtccctgtgatcagacacctgttcgcccctctgaaggagtacttcgcctgcgtgagcagcggcaacagcaacgccaacagccggggccccagcttctctagcggcctggtgccactgtccctgagagggagccacatgggccccatggagatctacaaaaccgtgagcgcctggaagcggcagcctgtgcgcgtgctgagcctgtttcggaatatcgataaagtcctgaaaagcctgggattcctggagagcggctctggctccggcggtggcaccctgaagtacgtggaggatgtgacaaacgtggtcagacgggatgtggagaagtggggccccttcgatctggtgtacggcagcacccaacccctgggcagctcttgtgaccggtgccctggctggtacatgtttcagttccaccggatcctgcagtacgccctgccgagacaggagtcccagcggccattcttttggattttcatggacaacttgctgctgaccgaggatgaccaggaaactaccactcggttcctgcagaccgaagccgtgaccctgcaggacgtgagaggccgggactaccagaacgccatgcgggtgtggtccaacatccctggactgaaaagcaagcacgcacctctgacccctaaagaagaggagtacctgcaggcccaggtgcggagcagaagcaagctggacgcccctaaggtggatctgctggtgaagaattgcctcctgcccctgagagagtacttcaagtatttcagccagaatagtctgcccctgggaggcagcggcggcggccaggaccccagcgccgagggcctgagcgaggaggtgcccgtggtgttcgaggagctgcccgtggtgttcgaggacgtggccgtgtacttcaccagggaggagtggggcatgctggacaagtggcagaaggagctgtacagggacgtgatgaggatgaactacgagctgctggccagcctgggccccgccgccgccaagcccgacctgatcagcaagctggagaggagggccgccccctggatcggcggcccaagcagcggcgcccctcctcccagcggcggcagcccagccggctccccaacctctaccgaggagggcacctctgagtccgccacccccgagagcggccctggcacctccaccgagcccagcgagggcagcgcacccggcagccctgccggcagccccacctccacagaggagggaaccagcaccgagcccagcgaaggcagcgccccaggcaccagcaccgagcctagtgagcaggagattaaacggatcaacaagatcagaagaagacttgtgaaagacagcaacaccaagaaggccggcaagacaggccccatgaaaaccctgctggttagagtgatgacacccgatctgagagagcggctggaaaacctgagaaagaagcctgaaaatatcccccagcccatcagcaatacatctagagccaacctgaataagctgctgaccgattacaccgaaatgaagaaggcgatcctgcatgtgtactgggaagagttccagaaggaccctgtgggcctgatgagccgggtggcccagcctgccagcaagaagatcgatcagaacaagctgaaacctgagatggacgagaagggcaacctgaccaccgccggctttgcctgctctcagtgtggccagcccctgttcgtgtacaagctggagcaggtgtctgagaagggcaaggcttacaccaactacttcggacggtgcaatgtggccgagcacgaaaagctgatcctgctggcccagctgaagcccgagaaggatagcgacgaagccgtgacatatagcctgggaaagtttgggcagagggccctggatttctacagcattcatgtgaccaaggagtccacccaccccgtgaagcccctggcccagatcgccggaaacagatacgcctccggacctgtgggaaaggccctgagcgacgcatgtatgggcacaatcgcctccttcctgtctaagtaccaggacatcatcatcgaacaccagaaggtggtgaagggcaaccagaagagactggagagcctgcgggagctggccggcaaggaaaacctggaataccctagcgtgaccctgccacctcagcctcacaccaaggagggcgttgatgcctacaacgaagtgatcgcccgggtgcgaatgtgggtgaacctgaacctgtggcagaagctgaagctaagcagagatgatgccaagcctctgctgagactgaagggattcccttcctttcctctggtcgagagacaggccaacgaagtggactggtgggacatggtgtgtaacgtgaagaagctgatcaacgagaaaaaggaggatggcaaggtgttttggcagaatctggctggctacaagagacaggaagccctgagaccatacctgagcagcgaggaagatcggaagaagggaaagaaattcgctcggtaccagctgggcgacctgctgctgcacctggaaaagaagcacggcgaggactggggaaaggtgtacgacgaggcctgggagcggattgacaagaaagtggaaggcctgagcaagcacatcaagctggaagaggaacggagaagcgaggacgcccagagcaaggccgccctgaccgactggctgcgggctaaggccagcttcgtgatcgagggcctgaaggaggccgacaaggacgagttctgcagatgcgagctgaagctgcagaagtggtacggggacctgcggggaaagcccttcgccatcgaagccgagaacagcatcctggacatcagcggcttcagcaagcagtacaactgtgccttcatctggcagaaggacggcgtgaagaagctgaacctgtacctgatcatcaactacttcaagggcggcaagctgcggttcaagaagatcaaacctgaagccttcgaagccaacagattctacaccgtgatcaacaaaaagagcggcgagatcgtgcccatggaggtgaacttcaacttcgacgaccccaacctgatcatcctgcctctggcctttggcaagagacagggcagagaattcatctggaacgacctgctgtccctggaaaccggcagcctgaagctggccaacggaagagtgatcgagaagacactgtacaacagaagaacccggcaggatgagcctgccctgttcgtggccctgaccttcgagcggcgggaggtcctggactcctccaatatcaaaccaatgaacctgatcggcgtggcaagaggcgaaaacatccccgccgtgatcgccctgaccgaccccgagggctgcccactgagccggtttaaggatagcctgggaaacccaacccacatcctgagaatcggcgagagctataaggagaagcagcggaccatccaggccaagaaggaggtggagcagcggagagccggcggctacagccggaagtacgccagcaaagccaagaatctggcagacgatatggtgagaaacaccgctagagatctgctgtactacgccgtgacccaggatgccatgctgatcttcgccaacctgagccggggcttcggccggcagggcaagcggaccttcatggccgagagacagtacacacggatggaggactggctgaccgccaagctggcctacgagggcctgagcaagacctacctgtccaagacactggcccagtacacctccaagacatgcagcaactgtgggtttaccatcaccagcgccgactacgacagggtgctggagaagctgaagaagacagcaacaggctggatgaccacaattaacggcaaggagctgaaggtggagggccagattacctactacaacagatacaagagacagaacgtagtcaaggacctgtccgtcgagctggatagactgagcgaagaatctgtgaacaacgacatctcctcctggacaaagggcagaagcggagaagctctgagcctcctgaagaaaagattctcccatagacccgtgcaggagaagttcgtgtgcctgaactgcggcttcgagacacacgcagccgagcaagccgccctgaacatcgccagatcctggctgttcctgcggagccaggagtacaagaaataccagacaaacaagacaaccggcaacaccgataagagagccttcgtcgagacctggcagtccttttaccggaagaagcttaaggaggtgtggaaacctgccgtgcggtctggcggatctggcggaggctccaccagccccaagaaaaagagaaaagtctaagctgccttctgcggggcttgccttctggccatgcccttcttctctcccttgcacctgtacctcttggtctttgaataaagcctgagtaggaaggctagcaaaaaaaaaaaaaaaaaaaaaaaaaaaaaaaaaaaaaaaaaaaaaaaaaaaaaaaaaaaaaaaaaaaaaaaaaaaaaaaa

SEQ ID NO: 12168 - RNA, 5785 nt, synthetic construct
  source 1..5785: mol_type = other RNA
aggaaataagagagaaaagaagagtaagaagaaatataagagccaccatggcccctaagaagaagcgtaaagtgagccggatggaacgcctcgtctacgaggtgcggcagaagtgcagaaacatcgaggacatctgcatctcctgcggatctctgaacgtgaccctggagcacccactgttcatcggcggcatgtgccagaactgtaaaaactgttttctggagtgtgcctatcaatacgacgatgacggctaccagagctactgcaccatctgttgcggcggaagagaggtgctgatgtgtggaaataacaactgctgccggtgcttctgcgtggaatgcgtggacctgctggtgggccccggcgccgcccaggccgctattaaggaagatccttggaactgctacatgtgcggccacaagggcacatacggcctgctgagacggagagaggactggcctagcagactgcagatgttcttcgccaataaccacgaccaggagttcgacccccctaaggtgtaccctcccgtccccgccgagaagagaaagcccatccgggtcctgagcctgttcgatggcatcgccaccggtctgctggtgctgaaggacctgggcatccaggtggataggtacattgcctccgaggtgtgcgaggactccatcaccgtgggaatggtgcgtcatcagggcaagatcatgtacgtgggcgacgtgcggagcgtgacacagaagcatatccaggagtggggccctttcgacctggtgatcggcggcagcccttgcaatgacctgagcatcgtgaacccagcccggaagggcctgtacgagggaaccggcagactgttcttcgagttttacagactgctgcacgacgcccggcctaaggaaggcgacgaccggcccttcttttggctgttcgagaatgtggtggccatgggagtcagcgacaagcgggatattagccggttcctggagagcaaccccgtgatgatcgatgccaaggaagtgagcgccgcccaccgggccagatacttctggggcaatctgcctggcatgaacagacccctggccagcaccgtgaacgacaagctggagctgcaggagtgcctggagcacggccggatcgccaagttcagcaaggtgagaaccatcaccacccgaagcaacagcatcaaacaaggcaaggaccagcactttcctgtgttcatgaacgagaaggaggacatcctgtggtgtaccgagatggagagagtgttcgggttcccagtccactacacagatgtcagcaacatgtctagactggccagacagagactgctgggaagaagctggtccgtccctgtgatcagacacctgttcgcccctctgaaggagtacttcgcctgcgtgagcagcggcaacagcaacgccaacagccggggccccagcttctctagcggcctggtgccactgtccctgagagggagccacatgggccccatggagatctacaaaaccgtgagcgcctggaagcggcagcctgtgcgcgtgctgagcctgtttcggaatatcgataaagtcctgaaaagcctgggattcctggagagcggctctggctccggcggtggcaccctgaagtacgtggaggatgtgacaaacgtggtcagacgggatgtggagaagtggggccccttcgatctggtgtacggcagcacccaacccctgggcagctcttgtgaccggtgccctggctggtacatgtttcagttccaccggatcctgcagtacgccctgccgagacaggagtcccagcggccattcttttggattttcatggacaacttgctgctgaccgaggatgaccaggaaactaccactcggttcctgcagaccgaagccgtgaccctgcaggacgtgagaggccgggactaccagaacgccatgcgggtgtggtccaacatccctggactgaaaagcaagcacgcacctctgacccctaaagaagaggagtacctgcaggcccaggtgcggagcagaagcaagctggacgcccctaaggtggatctgctggtgaagaattgcctcctgcccctgagagagtacttcaagtatttcagccagaatagtctgcccctgggaggcagcggcggcggcgcccacgagctggtgatgttcagggacgtggccatcgacttcagcaaggaggagtgggagtgcctggacctggagcagagggacctgtacagggacgtgatgctggagaactacagcaacatggtgctgctgggcctgtgcatccaccagcccgacatgttcagcctgctggagaagggcaaggagccctggaaggtgctgaggtaccagaccaggggcccctgccccgacatgcagagcaggggcggcccaagcagcggcgcccctcctcccagcggcggcagcccagccggctccccaacctctaccgaggagggcacctctgagtccgccacccccgagagcggccctggcacctccaccgagcccagcgagggcagcgcacccggcagccctgccggcagccccacctccacagaggagggaaccagcaccgagcccagcgaaggcagcgccccaggcaccagcaccgagcctagtgagcaggagattaaacggatcaacaagatcagaagaagacttgtgaaagacagcaacaccaagaaggccggcaagacaggccccatgaaaaccctgctggttagagtgatgacacccgatctgagagagcggctggaaaacctgagaaagaagcctgaaaatatcccccagcccatcagcaatacatctagagccaacctgaataagctgctgaccgattacaccgaaatgaagaaggcgatcctgcatgtgtactgggaagagttccagaaggaccctgtgggcctgatgagccgggtggcccagcctgccagcaagaagatcgatcagaacaagctgaaacctgagatggacgagaagggcaacctgaccaccgccggctttgcctgctctcagtgtggccagcccctgttcgtgtacaagctggagcaggtgtctgagaagggcaaggcttacaccaactacttcggacggtgcaatgtggccgagcacgaaaagctgatcctgctggcccagctgaagcccgagaaggatagcgacgaagccgtgacatatagcctgggaaagtttgggcagagggccctggatttctacagcattcatgtgaccaaggagtccacccaccccgtgaagcccctggcccagatcgccggaaacagatacgcctccggacctgtgggaaaggccctgagcgacgcatgtatgggcacaatcgcctccttcctgtctaagtaccaggacatcatcatcgaacaccagaaggtggtgaagggcaaccagaagagactggagagcctgcgggagctggccggcaaggaaaacctggaataccctagcgtgaccctgccacctcagcctcacaccaaggagggcgttgatgcctacaacgaagtgatcgcccgggtgcgaatgtgggtgaacctgaacctgtggcagaagctgaagctaagcagagatgatgccaagcctctgctgagactgaagggattcccttcctttcctctggtcgagagacaggccaacgaagtggactggtgggacatggtgtgtaacgtgaagaagctgatcaacgagaaaaaggaggatggcaaggtgttttggcagaatctggctggctacaagagacaggaagccctgagaccatacctgagcagcgaggaagatcggaagaagggaaagaaattcgctcggtaccagctgggcgacctgctgctgcacctggaaaagaagcacggcgaggactggggaaaggtgtacgacgaggcctgggagcggattgacaagaaagtggaaggcctgagcaagcacatcaagctggaagaggaacggagaagcgaggacgcccagagcaaggccgccctgaccgactggctgcgggctaaggccagcttcgtgatcgagggcctgaaggaggccgacaaggacgagttctgcagatgcgagctgaagctgcagaagtggtacggggacctgcggggaaagcccttcgccatcgaagccgagaacagcatcctggacatcagcggcttcagcaagcagtacaactgtgccttcatctggcagaaggacggcgtgaagaagctgaacctgtacctgatcatcaactacttcaagggcggcaagctgcggttcaagaagatcaaacctgaagccttcgaagccaacagattctacaccgtgatcaacaaaaagagcggcgagatcgtgcccatggaggtgaacttcaacttcgacgaccccaacctgatcatcctgcctctggcctttggcaagagacagggcagagaattcatctggaacgacctgctgtccctggaaaccggcagcctgaagctggccaacggaagagtgatcgagaagacactgtacaacagaagaacccggcaggatgagcctgccctgttcgtggccctgaccttcgagcggcgggaggtcctggactcctccaatatcaaaccaatgaacctgatcggcgtggcaagaggcgaaaacatccccgccgtgatcgccctgaccgaccccgagggctgcccactgagccggtttaaggatagcctgggaaacccaacccacatcctgagaatcggcgagagctataaggagaagcagcggaccatccaggccaagaaggaggtggagcagcggagagccggcggctacagccggaagtacgccagcaaagccaagaatctggcagacgatatggtgagaaacaccgctagagatctgctgtactacgccgtgacccaggatgccatgctgatcttcgccaacctgagccggggcttcggccggcagggcaagcggaccttcatggccgagagacagtacacacggatggaggactggctgaccgccaagctggcctacgagggcctgagcaagacctacctgtccaagacactggcccagtacacctccaagacatgcagcaactgtgggtttaccatcaccagcgccgactacgacagggtgctggagaagctgaagaagacagcaacaggctggatgaccacaattaacggcaaggagctgaaggtggagggccagattacctactacaacagatacaagagacagaacgtagtcaaggacctgtccgtcgagctggatagactgagcgaagaatctgtgaacaacgacatctcctcctggacaaagggcagaagcggagaagctctgagcctcctgaagaaaagattctcccatagacccgtgcaggagaagttcgtgtgcctgaactgcggcttcgagacacacgcagccgagcaagccgccctgaacatcgccagatcctggctgttcctgcggagccaggagtacaagaaataccagacaaacaagacaaccggcaacaccgataagagagccttcgtcgagacctggcagtccttttaccggaagaagcttaaggaggtgtggaaacctgccgtgcggtctggcggatctggcggaggctccaccagccccaagaaaaagagaaaagtctaagctgccttctgcggggcttgccttctggccatgcccttcttctctcccttgcacctgtacctcttggtctttgaataaagcctgagtaggaaggctagcaaaaaaaaaaaaaaaaaaaaaaaaaaaaaaaaaaaaaaaaaaaaaaaaaaaaaaaaaaaaaaaaaaaaaaaaaaaaaaaa

SEQ ID NO: 12169 - RNA, 5785 nt, synthetic construct
  source 1..5785: mol_type = other RNA
aggaaataagagagaaaagaagagtaagaagaaatataagagccaccatggcccctaagaagaagcgtaaagtgagccggatggaacgcctcgtctacgaggtgcggcagaagtgcagaaacatcgaggacatctgcatctcctgcggatctctgaacgtgaccctggagcacccactgttcatcggcggcatgtgccagaactgtaaaaactgttttctggagtgtgcctatcaatacgacgatgacggctaccagagctactgcaccatctgttgcggcggaagagaggtgctgatgtgtggaaataacaactgctgccggtgcttctgcgtggaatgcgtggacctgctggtgggccccggcgccgcccaggccgctattaaggaagatccttggaactgctacatgtgcggccacaagggcacatacggcctgctgagacggagagaggactggcctagcagactgcagatgttcttcgccaataaccacgaccaggagttcgacccccctaaggtgtaccctcccgtccccgccgagaagagaaagcccatccgggtcctgagcctgttcgatggcatcgccaccggtctgctggtgctgaaggacctgggcatccaggtggataggtacattgcctccgaggtgtgcgaggactccatcaccgtgggaatggtgcgtcatcagggcaagatcatgtacgtgggcgacgtgcggagcgtgacacagaagcatatccaggagtggggccctttcgacctggtgatcggcggcagcccttgcaatgacctgagcatcgtgaacccagcccggaagggcctgtacgagggaaccggcagactgttcttcgagttttacagactgctgcacgacgcccggcctaaggaaggcgacgaccggcccttcttttggctgttcgagaatgtggtggccatgggagtcagcgacaagcgggatattagccggttcctggagagcaaccccgtgatgatcgatgccaaggaagtgagcgccgcccaccgggccagatacttctggggcaatctgcctggcatgaacagacccctggccagcaccgtgaacgacaagctggagctgcaggagtgcctggagcacggccggatcgccaagttcagcaaggtgagaaccatcaccacccgaagcaacagcatcaaacaaggcaaggaccagcactttcctgtgttcatgaacgagaaggaggacatcctgtggtgtaccgagatggagagagtgttcgggttcccagtccactacacagatgtcagcaacatgtctagactggccagacagagactgctgggaagaagctggtccgtccctgtgatcagacacctgttcgcccctctgaaggagtacttcgcctgcgtgagcagcggcaacagcaacgccaacagccggggccccagcttctctagcggcctggtgccactgtccctgagagggagccacatgggccccatggagatctacaaaaccgtgagcgcctggaagcggcagcctgtgcgcgtgctgagcctgtttcggaatatcgataaagtcctgaaaagcctgggattcctggagagcggctctggctccggcggtggcaccctgaagtacgtggaggatgtgacaaacgtggtcagacgggatgtggagaagtggggccccttcgatctggtgtacggcagcacccaacccctgggcagctcttgtgaccggtgccctggctggtacatgtttcagttccaccggatcctgcagtacgccctgccgagacaggagtcccagcggccattcttttggattttcatggacaacttgctgctgaccgaggatgaccaggaaactaccactcggttcctgcagaccgaagccgtgaccctgcaggacgtgagaggccgggactaccagaacgccatgcgggtgtggtccaacatccctggactgaaaagcaagcacgcacctctgacccctaaagaagaggagtacctgcaggcccaggtgcggagcagaagcaagctggacgcccctaaggtggatctgctggtgaagaattgcctcctgcccctgagagagtacttcaagtatttcagccagaatagtctgcccctgggaggcagcggcggcggccaggaccccagcgccgagggcctgagcgaggaggtgcccgtggtgttcgaggagctgcccgtggtgttcgaggacgtggccgtgtacttcaccaggaaggagtggggcatgctggacaagaggcagaaggagctgtacagggacgtgatgaggatgaactacgagctgctggccagcctgggccccgccgccgccaagcccgacctgatcagcaagctggagaggagggccgccccctggatcggcggcccaagcagcggcgcccctcctcccagcggcggcagcccagccggctccccaacctctaccgaggagggcacctctgagtccgccacccccgagagcggccctggcacctccaccgagcccagcgagggcagcgcacccggcagccctgccggcagccccacctccacagaggagggaaccagcaccgagcccagcgaaggcagcgccccaggcaccagcaccgagcctagtgagcaggagattaaacggatcaacaagatcagaagaagacttgtgaaagacagcaacaccaagaaggccggcaagacaggccccatgaaaaccctgctggttagagtgatgacacccgatctgagagagcggctggaaaacctgagaaagaagcctgaaaatatcccccagcccatcagcaatacatctagagccaacctgaataagctgctgaccgattacaccgaaatgaagaaggcgatcctgcatgtgtactgggaagagttccagaaggaccctgtgggcctgatgagccgggtggcccagcctgccagcaagaagatcgatcagaacaagctgaaacctgagatggacgagaagggcaacctgaccaccgccggctttgcctgctctcagtgtggccagcccctgttcgtgtacaagctggagcaggtgtctgagaagggcaaggcttacaccaactacttcggacggtgcaatgtggccgagcacgaaaagctgatcctgctggcccagctgaagcccgagaaggatagcgacgaagccgtgacatatagcctgggaaagtttgggcagagggccctggatttctacagcattcatgtgaccaaggagtccacccaccccgtgaagcccctggcccagatcgccggaaacagatacgcctccggacctgtgggaaaggccctgagcgacgcatgtatgggcacaatcgcctccttcctgtctaagtaccaggacatcatcatcgaacaccagaaggtggtgaagggcaaccagaagagactggagagcctgcgggagctggccggcaaggaaaacctggaataccctagcgtgaccctgccacctcagcctcacaccaaggagggcgttgatgcctacaacgaagtgatcgcccgggtgcgaatgtgggtgaacctgaacctgtggcagaagctgaagctaagcagagatgatgccaagcctctgctgagactgaagggattcccttcctttcctctggtcgagagacaggccaacgaagtggactggtgggacatggtgtgtaacgtgaagaagctgatcaacgagaaaaaggaggatggcaaggtgttttggcagaatctggctggctacaagagacaggaagccctgagaccatacctgagcagcgaggaagatcggaagaagggaaagaaattcgctcggtaccagctgggcgacctgctgctgcacctggaaaagaagcacggcgaggactggggaaaggtgtacgacgaggcctgggagcggattgacaagaaagtggaaggcctgagcaagcacatcaagctggaagaggaacggagaagcgaggacgcccagagcaaggccgccctgaccgactggctgcgggctaaggccagcttcgtgatcgagggcctgaaggaggccgacaaggacgagttctgcagatgcgagctgaagctgcagaagtggtacggggacctgcggggaaagcccttcgccatcgaagccgagaacagcatcctggacatcagcggcttcagcaagcagtacaactgtgccttcatctggcagaaggacggcgtgaagaagctgaacctgtacctgatcatcaactacttcaagggcggcaagctgcggttcaagaagatcaaacctgaagccttcgaagccaacagattctacaccgtgatcaacaaaaagagcggcgagatcgtgcccatggaggtgaacttcaacttcgacgaccccaacctgatcatcctgcctctggcctttggcaagagacagggcagagaattcatctggaacgacctgctgtccctggaaaccggcagcctgaagctggccaacggaagagtgatcgagaagacactgtacaacagaagaacccggcaggatgagcctgccctgttcgtggccctgaccttcgagcggcgggaggtcctggactcctccaatatcaaaccaatgaacctgatcggcgtggcaagaggcgaaaacatccccgccgtgatcgccctgaccgaccccgagggctgcccactgagccggtttaaggatagcctgggaaacccaacccacatcctgagaatcggcgagagctataaggagaagcagcggaccatccaggccaagaaggaggtggagcagcggagagccggcggctacagccggaagtacgccagcaaagccaagaatctggcagacgatatggtgagaaacaccgctagagatctgctgtactacgccgtgacccaggatgccatgctgatcttcgccaacctgagccggggcttcggccggcagggcaagcggaccttcatggccgagagacagtacacacggatggaggactggctgaccgccaagctggcctacgagggcctgagcaagacctacctgtccaagacactggcccagtacacctccaagacatgcagcaactgtgggtttaccatcaccagcgccgactacgacagggtgctggagaagctgaagaagacagcaacaggctggatgaccacaattaacggcaaggagctgaaggtggagggccagattacctactacaacagatacaagagacagaacgtagtcaaggacctgtccgtcgagctggatagactgagcgaagaatctgtgaacaacgacatctcctcctggacaaagggcagaagcggagaagctctgagcctcctgaagaaaagattctcccatagacccgtgcaggagaagttcgtgtgcctgaactgcggcttcgagacacacgcagccgagcaagccgccctgaacatcgccagatcctggctgttcctgcggagccaggagtacaagaaataccagacaaacaagacaaccggcaacaccgataagagagccttcgtcgagacctggcagtccttttaccggaagaagcttaaggaggtgtggaaacctgccgtgcggtctggcggatctggcggaggctccaccagccccaagaaaaagagaaaagtctaagctgccttctgcggggcttgccttctggccatgcccttcttctctcccttgcacctgtacctcttggtctttgaataaagcctgagtaggaaggctagcaaaaaaaaaaaaaaaaaaaaaaaaaaaaaaaaaaaaaaaaaaaaaaaaaaaaaaaaaaaaaaaaaaaaaaaaaaaaaaaa

SEQ ID NO: 12170 - RNA, 5785 nt, synthetic construct
  source 1..5785: mol_type = other RNA
aggaaataagagagaaaagaagagtaagaagaaatataagagccaccatggcccctaagaagaagcgtaaagtgagccggatggaacgcctcgtctacgaggtgcggcagaagtgcagaaacatcgaggacatctgcatctcctgcggatctctgaacgtgaccctggagcacccactgttcatcggcggcatgtgccagaactgtaaaaactgttttctggagtgtgcctatcaatacgacgatgacggctaccagagctactgcaccatctgttgcggcggaagagaggtgctgatgtgtggaaataacaactgctgccggtgcttctgcgtggaatgcgtggacctgctggtgggccccggcgccgcccaggccgctattaaggaagatccttggaactgctacatgtgcggccacaagggcacatacggcctgctgagacggagagaggactggcctagcagactgcagatgttcttcgccaataaccacgaccaggagttcgacccccctaaggtgtaccctcccgtccccgccgagaagagaaagcccatccgggtcctgagcctgttcgatggcatcgccaccggtctgctggtgctgaaggacctgggcatccaggtggataggtacattgcctccgaggtgtgcgaggactccatcaccgtgggaatggtgcgtcatcagggcaagatcatgtacgtgggcgacgtgcggagcgtgacacagaagcatatccaggagtggggccctttcgacctggtgatcggcggcagcccttgcaatgacctgagcatcgtgaacccagcccggaagggcctgtacgagggaaccggcagactgttcttcgagttttacagactgctgcacgacgcccggcctaaggaaggcgacgaccggcccttcttttggctgttcgagaatgtggtggccatgggagtcagcgacaagcgggatattagccggttcctggagagcaaccccgtgatgatcgatgccaaggaagtgagcgccgcccaccgggccagatacttctggggcaatctgcctggcatgaacagacccctggccagcaccgtgaacgacaagctggagctgcaggagtgcctggagcacggccggatcgccaagttcagcaaggtgagaaccatcaccacccgaagcaacagcatcaaacaaggcaaggaccagcactttcctgtgttcatgaacgagaaggaggacatcctgtggtgtaccgagatggagagagtgttcgggttcccagtccactacacagatgtcagcaacatgtctagactggccagacagagactgctgggaagaagctggtccgtccctgtgatcagacacctgttcgcccctctgaaggagtacttcgcctgcgtgagcagcggcaacagcaacgccaacagccggggccccagcttctctagcggcctggtgccactgtccctgagagggagccacatgggccccatggagatctacaaaaccgtgagcgcctggaagcggcagcctgtgcgcgtgctgagcctgtttcggaatatcgataaagtcctgaaaagcctgggattcctggagagcggctctggctccggcggtggcaccctgaagtacgtggaggatgtgacaaacgtggtcagacgggatgtggagaagtggggccccttcgatctggtgtacggcagcacccaacccctgggcagctcttgtgaccggtgccctggctggtacatgtttcagttccaccggatcctgcagtacgccctgccgagacaggagtcccagcggccattcttttggattttcatggacaacttgctgctgaccgaggatgaccaggaaactaccactcggttcctgcagaccgaagccgtgaccctgcaggacgtgagaggccgggactaccagaacgccatgcgggtgtggtccaacatccctggactgaaaagcaagcacgcacctctgacccctaaagaagaggagtacctgcaggcccaggtgcggagcagaagcaagctggacgcccctaaggtggatctgctggtgaagaattgcctcctgcccctgagagagtacttcaagtatttcagccagaatagtctgcccctgggaggcagcggcggcggcgccgtgaccatggaggacgtgaccgtgaccttcaccaacgaggagtgggccctgctgaaccccgcccagaagaggctgtacggcgacgtgatgtgggagaccttcaggaccatcagcgccatcggcaggacctgggacagccagcagatggaggaggagtacaagaactacctgaggaacctgagcaacgaggaggtggccaagtgctgcaggtacaccaccttcaaccagcacgagaacatcggcggcccaagcagcggcgcccctcctcccagcggcggcagcccagccggctccccaacctctaccgaggagggcacctctgagtccgccacccccgagagcggccctggcacctccaccgagcccagcgagggcagcgcacccggcagccctgccggcagccccacctccacagaggagggaaccagcaccgagcccagcgaaggcagcgccccaggcaccagcaccgagcctagtgagcaggagattaaacggatcaacaagatcagaagaagacttgtgaaagacagcaacaccaagaaggccggcaagacaggccccatgaaaaccctgctggttagagtgatgacacccgatctgagagagcggctggaaaacctgagaaagaagcctgaaaatatcccccagcccatcagcaatacatctagagccaacctgaataagctgctgaccgattacaccgaaatgaagaaggcgatcctgcatgtgtactgggaagagttccagaaggaccctgtgggcctgatgagccgggtggcccagcctgccagcaagaagatcgatcagaacaagctgaaacctgagatggacgagaagggcaacctgaccaccgccggctttgcctgctctcagtgtggccagcccctgttcgtgtacaagctggagcaggtgtctgagaagggcaaggcttacaccaactacttcggacggtgcaatgtggccgagcacgaaaagctgatcctgctggcccagctgaagcccgagaaggatagcgacgaagccgtgacatatagcctgggaaagtttgggcagagggccctggatttctacagcattcatgtgaccaaggagtccacccaccccgtgaagcccctggcccagatcgccggaaacagatacgcctccggacctgtgggaaaggccctgagcgacgcatgtatgggcacaatcgcctccttcctgtctaagtaccaggacatcatcatcgaacaccagaaggtggtgaagggcaaccagaagagactggagagcctgcgggagctggccggcaaggaaaacctggaataccctagcgtgaccctgccacctcagcctcacaccaaggagggcgttgatgcctacaacgaagtgatcgcccgggtgcgaatgtgggtgaacctgaacctgtggcagaagctgaagctaagcagagatgatgccaagcctctgctgagactgaagggattcccttcctttcctctggtcgagagacaggccaacgaagtggactggtgggacatggtgtgtaacgtgaagaagctgatcaacgagaaaaaggaggatggcaaggtgttttggcagaatctggctggctacaagagacaggaagccctgagaccatacctgagcagcgaggaagatcggaagaagggaaagaaattcgctcggtaccagctgggcgacctgctgctgcacctggaaaagaagcacggcgaggactggggaaaggtgtacgacgaggcctgggagcggattgacaagaaagtggaaggcctgagcaagcacatcaagctggaagaggaacggagaagcgaggacgcccagagcaaggccgccctgaccgactggctgcgggctaaggccagcttcgtgatcgagggcctgaaggaggccgacaaggacgagttctgcagatgcgagctgaagctgcagaagtggtacggggacctgcggggaaagcccttcgccatcgaagccgagaacagcatcctggacatcagcggcttcagcaagcagtacaactgtgccttcatctggcagaaggacggcgtgaagaagctgaacctgtacctgatcatcaactacttcaagggcggcaagctgcggttcaagaagatcaaacctgaagccttcgaagccaacagattctacaccgtgatcaacaaaaagagcggcgagatcgtgcccatggaggtgaacttcaacttcgacgaccccaacctgatcatcctgcctctggcctttggcaagagacagggcagagaattcatctggaacgacctgctgtccctggaaaccggcagcctgaagctggccaacggaagagtgatcgagaagacactgtacaacagaagaacccggcaggatgagcctgccctgttcgtggccctgaccttcgagcggcgggaggtcctggactcctccaatatcaaaccaatgaacctgatcggcgtggcaagaggcgaaaacatccccgccgtgatcgccctgaccgaccccgagggctgcccactgagccggtttaaggatagcctgggaaacccaacccacatcctgagaatcggcgagagctataaggagaagcagcggaccatccaggccaagaaggaggtggagcagcggagagccggcggctacagccggaagtacgccagcaaagccaagaatctggcagacgatatggtgagaaacaccgctagagatctgctgtactacgccgtgacccaggatgccatgctgatcttcgccaacctgagccggggcttcggccggcagggcaagcggaccttcatggccgagagacagtacacacggatggaggactggctgaccgccaagctggcctacgagggcctgagcaagacctacctgtccaagacactggcccagtacacctccaagacatgcagcaactgtgggtttaccatcaccagcgccgactacgacagggtgctggagaagctgaagaagacagcaacaggctggatgaccacaattaacggcaaggagctgaaggtggagggccagattacctactacaacagatacaagagacagaacgtagtcaaggacctgtccgtcgagctggatagactgagcgaagaatctgtgaacaacgacatctcctcctggacaaagggcagaagcggagaagctctgagcctcctgaagaaaagattctcccatagacccgtgcaggagaagttcgtgtgcctgaactgcggcttcgagacacacgcagccgagcaagccgccctgaacatcgccagatcctggctgttcctgcggagccaggagtacaagaaataccagacaaacaagacaaccggcaacaccgataagagagccttcgtcgagacctggcagtccttttaccggaagaagcttaaggaggtgtggaaacctgccgtgcggtctggcggatctggcggaggctccaccagccccaagaaaaagagaaaagtctaagctgccttctgcggggcttgccttctggccatgcccttcttctctcccttgcacctgtacctcttggtctttgaataaagcctgagtaggaaggctagcaaaaaaaaaaaaaaaaaaaaaaaaaaaaaaaaaaaaaaaaaaaaaaaaaaaaaaaaaaaaaaaaaaaaaaaaaaaaaaaa

SEQ ID NO: 12171 - RNA, 5785 nt, synthetic construct
  source 1..5785: mol_type = other RNA
aggaaataagagagaaaagaagagtaagaagaaatataagagccaccatggcccctaagaagaagcgtaaagtgagccggatggaacgcctcgtctacgaggtgcggcagaagtgcagaaacatcgaggacatctgcatctcctgcggatctctgaacgtgaccctggagcacccactgttcatcggcggcatgtgccagaactgtaaaaactgttttctggagtgtgcctatcaatacgacgatgacggctaccagagctactgcaccatctgttgcggcggaagagaggtgctgatgtgtggaaataacaactgctgccggtgcttctgcgtggaatgcgtggacctgctggtgggccccggcgccgcccaggccgctattaaggaagatccttggaactgctacatgtgcggccacaagggcacatacggcctgctgagacggagagaggactggcctagcagactgcagatgttcttcgccaataaccacgaccaggagttcgacccccctaaggtgtaccctcccgtccccgccgagaagagaaagcccatccgggtcctgagcctgttcgatggcatcgccaccggtctgctggtgctgaaggacctgggcatccaggtggataggtacattgcctccgaggtgtgcgaggactccatcaccgtgggaatggtgcgtcatcagggcaagatcatgtacgtgggcgacgtgcggagcgtgacacagaagcatatccaggagtggggccctttcgacctggtgatcggcggcagcccttgcaatgacctgagcatcgtgaacccagcccggaagggcctgtacgagggaaccggcagactgttcttcgagttttacagactgctgcacgacgcccggcctaaggaaggcgacgaccggcccttcttttggctgttcgagaatgtggtggccatgggagtcagcgacaagcgggatattagccggttcctggagagcaaccccgtgatgatcgatgccaaggaagtgagcgccgcccaccgggccagatacttctggggcaatctgcctggcatgaacagacccctggccagcaccgtgaacgacaagctggagctgcaggagtgcctggagcacggccggatcgccaagttcagcaaggtgagaaccatcaccacccgaagcaacagcatcaaacaaggcaaggaccagcactttcctgtgttcatgaacgagaaggaggacatcctgtggtgtaccgagatggagagagtgttcgggttcccagtccactacacagatgtcagcaacatgtctagactggccagacagagactgctgggaagaagctggtccgtccctgtgatcagacacctgttcgcccctctgaaggagtacttcgcctgcgtgagcagcggcaacagcaacgccaacagccggggccccagcttctctagcggcctggtgccactgtccctgagagggagccacatgggccccatggagatctacaaaaccgtgagcgcctggaagcggcagcctgtgcgcgtgctgagcctgtttcggaatatcgataaagtcctgaaaagcctgggattcctggagagcggctctggctccggcggtggcaccctgaagtacgtggaggatgtgacaaacgtggtcagacgggatgtggagaagtggggccccttcgatctggtgtacggcagcacccaacccctgggcagctcttgtgaccggtgccctggctggtacatgtttcagttccaccggatcctgcagtacgccctgccgagacaggagtcccagcggccattcttttggattttcatggacaacttgctgctgaccgaggatgaccaggaaactaccactcggttcctgcagaccgaagccgtgaccctgcaggacgtgagaggccgggactaccagaacgccatgcgggtgtggtccaacatccctggactgaaaagcaagcacgcacctctgacccctaaagaagaggagtacctgcaggcccaggtgcggagcagaagcaagctggacgcccctaaggtggatctgctggtgaagaattgcctcctgcccctgagagagtacttcaagtatttcagccagaatagtctgcccctgggaggcagcggcggcggcatgaacaccgtgacctacgacgacgtgcacatcggcttcacctgggaggagtggaccctgctggaccccagccagaagaacctgtacaaggacgtgatgctggagacctacaggaacctggccatcatcggctacagctgggaggaccacaacatcgaggagcactaccagaacagcaggaggcacgagaggcacgagaggagccagaccggcatgaagaccagcgtgcacacccagtgcagcggcggcccaagcagcggcgcccctcctcccagcggcggcagcccagccggctccccaacctctaccgaggagggcacctctgagtccgccacccccgagagcggccctggcacctccaccgagcccagcgagggcagcgcacccggcagccctgccggcagccccacctccacagaggagggaaccagcaccgagcccagcgaaggcagcgccccaggcaccagcaccgagcctagtgagcaggagattaaacggatcaacaagatcagaagaagacttgtgaaagacagcaacaccaagaaggccggcaagacaggccccatgaaaaccctgctggttagagtgatgacacccgatctgagagagcggctggaaaacctgagaaagaagcctgaaaatatcccccagcccatcagcaatacatctagagccaacctgaataagctgctgaccgattacaccgaaatgaagaaggcgatcctgcatgtgtactgggaagagttccagaaggaccctgtgggcctgatgagccgggtggcccagcctgccagcaagaagatcgatcagaacaagctgaaacctgagatggacgagaagggcaacctgaccaccgccggctttgcctgctctcagtgtggccagcccctgttcgtgtacaagctggagcaggtgtctgagaagggcaaggcttacaccaactacttcggacggtgcaatgtggccgagcacgaaaagctgatcctgctggcccagctgaagcccgagaaggatagcgacgaagccgtgacatatagcctgggaaagtttgggcagagggccctggatttctacagcattcatgtgaccaaggagtccacccaccccgtgaagcccctggcccagatcgccggaaacagatacgcctccggacctgtgggaaaggccctgagcgacgcatgtatgggcacaatcgcctccttcctgtctaagtaccaggacatcatcatcgaacaccagaaggtggtgaagggcaaccagaagagactggagagcctgcgggagctggccggcaaggaaaacctggaataccctagcgtgaccctgccacctcagcctcacaccaaggagggcgttgatgcctacaacgaagtgatcgcccgggtgcgaatgtgggtgaacctgaacctgtggcagaagctgaagctaagcagagatgatgccaagcctctgctgagactgaagggattcccttcctttcctctggtcgagagacaggccaacgaagtggactggtgggacatggtgtgtaacgtgaagaagctgatcaacgagaaaaaggaggatggcaaggtgttttggcagaatctggctggctacaagagacaggaagccctgagaccatacctgagcagcgaggaagatcggaagaagggaaagaaattcgctcggtaccagctgggcgacctgctgctgcacctggaaaagaagcacggcgaggactggggaaaggtgtacgacgaggcctgggagcggattgacaagaaagtggaaggcctgagcaagcacatcaagctggaagaggaacggagaagcgaggacgcccagagcaaggccgccctgaccgactggctgcgggctaaggccagcttcgtgatcgagggcctgaaggaggccgacaaggacgagttctgcagatgcgagctgaagctgcagaagtggtacggggacctgcggggaaagcccttcgccatcgaagccgagaacagcatcctggacatcagcggcttcagcaagcagtacaactgtgccttcatctggcagaaggacggcgtgaagaagctgaacctgtacctgatcatcaactacttcaagggcggcaagctgcggttcaagaagatcaaacctgaagccttcgaagccaacagattctacaccgtgatcaacaaaaagagcggcgagatcgtgcccatggaggtgaacttcaacttcgacgaccccaacctgatcatcctgcctctggcctttggcaagagacagggcagagaattcatctggaacgacctgctgtccctggaaaccggcagcctgaagctggccaacggaagagtgatcgagaagacactgtacaacagaagaacccggcaggatgagcctgccctgttcgtggccctgaccttcgagcggcgggaggtcctggactcctccaatatcaaaccaatgaacctgatcggcgtggcaagaggcgaaaacatccccgccgtgatcgccctgaccgaccccgagggctgcccactgagccggtttaaggatagcctgggaaacccaacccacatcctgagaatcggcgagagctataaggagaagcagcggaccatccaggccaagaaggaggtggagcagcggagagccggcggctacagccggaagtacgccagcaaagccaagaatctggcagacgatatggtgagaaacaccgctagagatctgctgtactacgccgtgacccaggatgccatgctgatcttcgccaacctgagccggggcttcggccggcagggcaagcggaccttcatggccgagagacagtacacacggatggaggactggctgaccgccaagctggcctacgagggcctgagcaagacctacctgtccaagacactggcccagtacacctccaagacatgcagcaactgtgggtttaccatcaccagcgccgactacgacagggtgctggagaagctgaagaagacagcaacaggctggatgaccacaattaacggcaaggagctgaaggtggagggccagattacctactacaacagatacaagagacagaacgtagtcaaggacctgtccgtcgagctggatagactgagcgaagaatctgtgaacaacgacatctcctcctggacaaagggcagaagcggagaagctctgagcctcctgaagaaaagattctcccatagacccgtgcaggagaagttcgtgtgcctgaactgcggcttcgagacacacgcagccgagcaagccgccctgaacatcgccagatcctggctgttcctgcggagccaggagtacaagaaataccagacaaacaagacaaccggcaacaccgataagagagccttcgtcgagacctggcagtccttttaccggaagaagcttaaggaggtgtggaaacctgccgtgcggtctggcggatctggcggaggctccaccagccccaagaaaaagagaaaagtctaagctgccttctgcggggcttgccttctggccatgcccttcttctctcccttgcacctgtacctcttggtctttgaataaagcctgagtaggaaggctagcaaaaaaaaaaaaaaaaaaaaaaaaaaaaaaaaaaaaaaaaaaaaaaaaaaaaaaaaaaaaaaaaaaaaaaaaaaaaaaaa

SEQ ID NO: 12172 - RNA, 5785 nt, synthetic construct
  source 1..5785: mol_type = other RNA
aggaaataagagagaaaagaagagtaagaagaaatataagagccaccatggcccctaagaagaagcgtaaagtgagccggatggaacgcctcgtctacgaggtgcggcagaagtgcagaaacatcgaggacatctgcatctcctgcggatctctgaacgtgaccctggagcacccactgttcatcggcggcatgtgccagaactgtaaaaactgttttctggagtgtgcctatcaatacgacgatgacggctaccagagctactgcaccatctgttgcggcggaagagaggtgctgatgtgtggaaataacaactgctgccggtgcttctgcgtggaatgcgtggacctgctggtgggccccggcgccgcccaggccgctattaaggaagatccttggaactgctacatgtgcggccacaagggcacatacggcctgctgagacggagagaggactggcctagcagactgcagatgttcttcgccaataaccacgaccaggagttcgacccccctaaggtgtaccctcccgtccccgccgagaagagaaagcccatccgggtcctgagcctgttcgatggcatcgccaccggtctgctggtgctgaaggacctgggcatccaggtggataggtacattgcctccgaggtgtgcgaggactccatcaccgtgggaatggtgcgtcatcagggcaagatcatgtacgtgggcgacgtgcggagcgtgacacagaagcatatccaggagtggggccctttcgacctggtgatcggcggcagcccttgcaatgacctgagcatcgtgaacccagcccggaagggcctgtacgagggaaccggcagactgttcttcgagttttacagactgctgcacgacgcccggcctaaggaaggcgacgaccggcccttcttttggctgttcgagaatgtggtggccatgggagtcagcgacaagcgggatattagccggttcctggagagcaaccccgtgatgatcgatgccaaggaagtgagcgccgcccaccgggccagatacttctggggcaatctgcctggcatgaacagacccctggccagcaccgtgaacgacaagctggagctgcaggagtgcctggagcacggccggatcgccaagttcagcaaggtgagaaccatcaccacccgaagcaacagcatcaaacaaggcaaggaccagcactttcctgtgttcatgaacgagaaggaggacatcctgtggtgtaccgagatggagagagtgttcgggttcccagtccactacacagatgtcagcaacatgtctagactggccagacagagactgctgggaagaagctggtccgtccctgtgatcagacacctgttcgcccctctgaaggagtacttcgcctgcgtgagcagcggcaacagcaacgccaacagccggggccccagcttctctagcggcctggtgccactgtccctgagagggagccacatgggccccatggagatctacaaaaccgtgagcgcctggaagcggcagcctgtgcgcgtgctgagcctgtttcggaatatcgataaagtcctgaaaagcctgggattcctggagagcggctctggctccggcggtggcaccctgaagtacgtggaggatgtgacaaacgtggtcagacgggatgtggagaagtggggccccttcgatctggtgtacggcagcacccaacccctgggcagctcttgtgaccggtgccctggctggtacatgtttcagttccaccggatcctgcagtacgccctgccgagacaggagtcccagcggccattcttttggattttcatggacaacttgctgctgaccgaggatgaccaggaaactaccactcggttcctgcagaccgaagccgtgaccctgcaggacgtgagaggccgggactaccagaacgccatgcgggtgtggtccaacatccctggactgaaaagcaagcacgcacctctgacccctaaagaagaggagtacctgcaggcccaggtgcggagcagaagcaagctggacgcccctaaggtggatctgctggtgaagaattgcctcctgcccctgagagagtacttcaagtatttcagccagaatagtctgcccctgggaggcagcggcggcggcttccagaacagcctgacctacgacgacgtgcacatcaacttcacctgcgaggagtgggccctgctggacgccagccagaagaggctgtacaaggacgtgatgctggagacctacagcaacctgaccgccatcggctacaagtgggaggaccacaacatcgaggagcactgccagaggttcaggaggaggggcaggcacaagaggagcaggaccgaggagaggccctacgagtgcaagcagtgcggcggcccaagcagcggcgcccctcctcccagcggcggcagcccagccggctccccaacctctaccgaggagggcacctctgagtccgccacccccgagagcggccctggcacctccaccgagcccagcgagggcagcgcacccggcagccctgccggcagccccacctccacagaggagggaaccagcaccgagcccagcgaaggcagcgccccaggcaccagcaccgagcctagtgagcaggagattaaacggatcaacaagatcagaagaagacttgtgaaagacagcaacaccaagaaggccggcaagacaggccccatgaaaaccctgctggttagagtgatgacacccgatctgagagagcggctggaaaacctgagaaagaagcctgaaaatatcccccagcccatcagcaatacatctagagccaacctgaataagctgctgaccgattacaccgaaatgaagaaggcgatcctgcatgtgtactgggaagagttccagaaggaccctgtgggcctgatgagccgggtggcccagcctgccagcaagaagatcgatcagaacaagctgaaacctgagatggacgagaagggcaacctgaccaccgccggctttgcctgctctcagtgtggccagcccctgttcgtgtacaagctggagcaggtgtctgagaagggcaaggcttacaccaactacttcggacggtgcaatgtggccgagcacgaaaagctgatcctgctggcccagctgaagcccgagaaggatagcgacgaagccgtgacatatagcctgggaaagtttgggcagagggccctggatttctacagcattcatgtgaccaaggagtccacccaccccgtgaagcccctggcccagatcgccggaaacagatacgcctccggacctgtgggaaaggccctgagcgacgcatgtatgggcacaatcgcctccttcctgtctaagtaccaggacatcatcatcgaacaccagaaggtggtgaagggcaaccagaagagactggagagcctgcgggagctggccggcaaggaaaacctggaataccctagcgtgaccctgccacctcagcctcacaccaaggagggcgttgatgcctacaacgaagtgatcgcccgggtgcgaatgtgggtgaacctgaacctgtggcagaagctgaagctaagcagagatgatgccaagcctctgctgagactgaagggattcccttcctttcctctggtcgagagacaggccaacgaagtggactggtgggacatggtgtgtaacgtgaagaagctgatcaacgagaaaaaggaggatggcaaggtgttttggcagaatctggctggctacaagagacaggaagccctgagaccatacctgagcagcgaggaagatcggaagaagggaaagaaattcgctcggtaccagctgggcgacctgctgctgcacctggaaaagaagcacggcgaggactggggaaaggtgtacgacgaggcctgggagcggattgacaagaaagtggaaggcctgagcaagcacatcaagctggaagaggaacggagaagcgaggacgcccagagcaaggccgccctgaccgactggctgcgggctaaggccagcttcgtgatcgagggcctgaaggaggccgacaaggacgagttctgcagatgcgagctgaagctgcagaagtggtacggggacctgcggggaaagcccttcgccatcgaagccgagaacagcatcctggacatcagcggcttcagcaagcagtacaactgtgccttcatctggcagaaggacggcgtgaagaagctgaacctgtacctgatcatcaactacttcaagggcggcaagctgcggttcaagaagatcaaacctgaagccttcgaagccaacagattctacaccgtgatcaacaaaaagagcggcgagatcgtgcccatggaggtgaacttcaacttcgacgaccccaacctgatcatcctgcctctggcctttggcaagagacagggcagagaattcatctggaacgacctgctgtccctggaaaccggcagcctgaagctggccaacggaagagtgatcgagaagacactgtacaacagaagaacccggcaggatgagcctgccctgttcgtggccctgaccttcgagcggcgggaggtcctggactcctccaatatcaaaccaatgaacctgatcggcgtggcaagaggcgaaaacatccccgccgtgatcgccctgaccgaccccgagggctgcccactgagccggtttaaggatagcctgggaaacccaacccacatcctgagaatcggcgagagctataaggagaagcagcggaccatccaggccaagaaggaggtggagcagcggagagccggcggctacagccggaagtacgccagcaaagccaagaatctggcagacgatatggtgagaaacaccgctagagatctgctgtactacgccgtgacccaggatgccatgctgatcttcgccaacctgagccggggcttcggccggcagggcaagcggaccttcatggccgagagacagtacacacggatggaggactggctgaccgccaagctggcctacgagggcctgagcaagacctacctgtccaagacactggcccagtacacctccaagacatgcagcaactgtgggtttaccatcaccagcgccgactacgacagggtgctggagaagctgaagaagacagcaacaggctggatgaccacaattaacggcaaggagctgaaggtggagggccagattacctactacaacagatacaagagacagaacgtagtcaaggacctgtccgtcgagctggatagactgagcgaagaatctgtgaacaacgacatctcctcctggacaaagggcagaagcggagaagctctgagcctcctgaagaaaagattctcccatagacccgtgcaggagaagttcgtgtgcctgaactgcggcttcgagacacacgcagccgagcaagccgccctgaacatcgccagatcctggctgttcctgcggagccaggagtacaagaaataccagacaaacaagacaaccggcaacaccgataagagagccttcgtcgagacctggcagtccttttaccggaagaagcttaaggaggtgtggaaacctgccgtgcggtctggcggatctggcggaggctccaccagccccaagaaaaagagaaaagtctaagctgccttctgcggggcttgccttctggccatgcccttcttctctcccttgcacctgtacctcttggtctttgaataaagcctgagtaggaaggctagcaaaaaaaaaaaaaaaaaaaaaaaaaaaaaaaaaaaaaaaaaaaaaaaaaaaaaaaaaaaaaaaaaaaaaaaaaaaaaaaa

SEQ ID NO: 12173 - RNA, 5785 nt, synthetic construct
  source 1..5785: mol_type = other RNA
aggaaataagagagaaaagaagagtaagaagaaatataagagccaccatggcccctaagaagaagcgtaaagtgagccggatggaacgcctcgtctacgaggtgcggcagaagtgcagaaacatcgaggacatctgcatctcctgcggatctctgaacgtgaccctggagcacccactgttcatcggcggcatgtgccagaactgtaaaaactgttttctggagtgtgcctatcaatacgacgatgacggctaccagagctactgcaccatctgttgcggcggaagagaggtgctgatgtgtggaaataacaactgctgccggtgcttctgcgtggaatgcgtggacctgctggtgggccccggcgccgcccaggccgctattaaggaagatccttggaactgctacatgtgcggccacaagggcacatacggcctgctgagacggagagaggactggcctagcagactgcagatgttcttcgccaataaccacgaccaggagttcgacccccctaaggtgtaccctcccgtccccgccgagaagagaaagcccatccgggtcctgagcctgttcgatggcatcgccaccggtctgctggtgctgaaggacctgggcatccaggtggataggtacattgcctccgaggtgtgcgaggactccatcaccgtgggaatggtgcgtcatcagggcaagatcatgtacgtgggcgacgtgcggagcgtgacacagaagcatatccaggagtggggccctttcgacctggtgatcggcggcagcccttgcaatgacctgagcatcgtgaacccagcccggaagggcctgtacgagggaaccggcagactgttcttcgagttttacagactgctgcacgacgcccggcctaaggaaggcgacgaccggcccttcttttggctgttcgagaatgtggtggccatgggagtcagcgacaagcgggatattagccggttcctggagagcaaccccgtgatgatcgatgccaaggaagtgagcgccgcccaccgggccagatacttctggggcaatctgcctggcatgaacagacccctggccagcaccgtgaacgacaagctggagctgcaggagtgcctggagcacggccggatcgccaagttcagcaaggtgagaaccatcaccacccgaagcaacagcatcaaacaaggcaaggaccagcactttcctgtgttcatgaacgagaaggaggacatcctgtggtgtaccgagatggagagagtgttcgggttcccagtccactacacagatgtcagcaacatgtctagactggccagacagagactgctgggaagaagctggtccgtccctgtgatcagacacctgttcgcccctctgaaggagtacttcgcctgcgtgagcagcggcaacagcaacgccaacagccggggccccagcttctctagcggcctggtgccactgtccctgagagggagccacatgggccccatggagatctacaaaaccgtgagcgcctggaagcggcagcctgtgcgcgtgctgagcctgtttcggaatatcgataaagtcctgaaaagcctgggattcctggagagcggctctggctccggcggtggcaccctgaagtacgtggaggatgtgacaaacgtggtcagacgggatgtggagaagtggggccccttcgatctggtgtacggcagcacccaacccctgggcagctcttgtgaccggtgccctggctggtacatgtttcagttccaccggatcctgcagtacgccctgccgagacaggagtcccagcggccattcttttggattttcatggacaacttgctgctgaccgaggatgaccaggaaactaccactcggttcctgcagaccgaagccgtgaccctgcaggacgtgagaggccgggactaccagaacgccatgcgggtgtggtccaacatccctggactgaaaagcaagcacgcacctctgacccctaaagaagaggagtacctgcaggcccaggtgcggagcagaagcaagctggacgcccctaaggtggatctgctggtgaagaattgcctcctgcccctgagagagtacttcaagtatttcagccagaatagtctgcccctgggaggcagcggcggcggcagcaaggcccccatcaccttcggcgacctggccatctacttcagccaggaggagtgggagtggctgagccccatccagaaggacctgtacgaggacgtgatgctggagaactacaggaacctggtgagcctgggcctgagcttcaggaggcccaacgtgatcaccctgctggagaagggcaaggccccctggatggtggagcccgtgaggaggaggagggcccccgagctggtgaccgtggccggcggcccaagcagcggcgcccctcctcccagcggcggcagcccagccggctccccaacctctaccgaggagggcacctctgagtccgccacccccgagagcggccctggcacctccaccgagcccagcgagggcagcgcacccggcagccctgccggcagccccacctccacagaggagggaaccagcaccgagcccagcgaaggcagcgccccaggcaccagcaccgagcctagtgagcaggagattaaacggatcaacaagatcagaagaagacttgtgaaagacagcaacaccaagaaggccggcaagacaggccccatgaaaaccctgctggttagagtgatgacacccgatctgagagagcggctggaaaacctgagaaagaagcctgaaaatatcccccagcccatcagcaatacatctagagccaacctgaataagctgctgaccgattacaccgaaatgaagaaggcgatcctgcatgtgtactgggaagagttccagaaggaccctgtgggcctgatgagccgggtggcccagcctgccagcaagaagatcgatcagaacaagctgaaacctgagatggacgagaagggcaacctgaccaccgccggctttgcctgctctcagtgtggccagcccctgttcgtgtacaagctggagcaggtgtctgagaagggcaaggcttacaccaactacttcggacggtgcaatgtggccgagcacgaaaagctgatcctgctggcccagctgaagcccgagaaggatagcgacgaagccgtgacatatagcctgggaaagtttgggcagagggccctggatttctacagcattcatgtgaccaaggagtccacccaccccgtgaagcccctggcccagatcgccggaaacagatacgcctccggacctgtgggaaaggccctgagcgacgcatgtatgggcacaatcgcctccttcctgtctaagtaccaggacatcatcatcgaacaccagaaggtggtgaagggcaaccagaagagactggagagcctgcgggagctggccggcaaggaaaacctggaataccctagcgtgaccctgccacctcagcctcacaccaaggagggcgttgatgcctacaacgaagtgatcgcccgggtgcgaatgtgggtgaacctgaacctgtggcagaagctgaagctaagcagagatgatgccaagcctctgctgagactgaagggattcccttcctttcctctggtcgagagacaggccaacgaagtggactggtgggacatggtgtgtaacgtgaagaagctgatcaacgagaaaaaggaggatggcaaggtgttttggcagaatctggctggctacaagagacaggaagccctgagaccatacctgagcagcgaggaagatcggaagaagggaaagaaattcgctcggtaccagctgggcgacctgctgctgcacctggaaaagaagcacggcgaggactggggaaaggtgtacgacgaggcctgggagcggattgacaagaaagtggaaggcctgagcaagcacatcaagctggaagaggaacggagaagcgaggacgcccagagcaaggccgccctgaccgactggctgcgggctaaggccagcttcgtgatcgagggcctgaaggaggccgacaaggacgagttctgcagatgcgagctgaagctgcagaagtggtacggggacctgcggggaaagcccttcgccatcgaagccgagaacagcatcctggacatcagcggcttcagcaagcagtacaactgtgccttcatctggcagaaggacggcgtgaagaagctgaacctgtacctgatcatcaactacttcaagggcggcaagctgcggttcaagaagatcaaacctgaagccttcgaagccaacagattctacaccgtgatcaacaaaaagagcggcgagatcgtgcccatggaggtgaacttcaacttcgacgaccccaacctgatcatcctgcctctggcctttggcaagagacagggcagagaattcatctggaacgacctgctgtccctggaaaccggcagcctgaagctggccaacggaagagtgatcgagaagacactgtacaacagaagaacccggcaggatgagcctgccctgttcgtggccctgaccttcgagcggcgggaggtcctggactcctccaatatcaaaccaatgaacctgatcggcgtggcaagaggcgaaaacatccccgccgtgatcgccctgaccgaccccgagggctgcccactgagccggtttaaggatagcctgggaaacccaacccacatcctgagaatcggcgagagctataaggagaagcagcggaccatccaggccaagaaggaggtggagcagcggagagccggcggctacagccggaagtacgccagcaaagccaagaatctggcagacgatatggtgagaaacaccgctagagatctgctgtactacgccgtgacccaggatgccatgctgatcttcgccaacctgagccggggcttcggccggcagggcaagcggaccttcatggccgagagacagtacacacggatggaggactggctgaccgccaagctggcctacgagggcctgagcaagacctacctgtccaagacactggcccagtacacctccaagacatgcagcaactgtgggtttaccatcaccagcgccgactacgacagggtgctggagaagctgaagaagacagcaacaggctggatgaccacaattaacggcaaggagctgaaggtggagggccagattacctactacaacagatacaagagacagaacgtagtcaaggacctgtccgtcgagctggatagactgagcgaagaatctgtgaacaacgacatctcctcctggacaaagggcagaagcggagaagctctgagcctcctgaagaaaagattctcccatagacccgtgcaggagaagttcgtgtgcctgaactgcggcttcgagacacacgcagccgagcaagccgccctgaacatcgccagatcctggctgttcctgcggagccaggagtacaagaaataccagacaaacaagacaaccggcaacaccgataagagagccttcgtcgagacctggcagtccttttaccggaagaagcttaaggaggtgtggaaacctgccgtgcggtctggcggatctggcggaggctccaccagccccaagaaaaagagaaaagtctaagctgccttctgcggggcttgccttctggccatgcccttcttctctcccttgcacctgtacctcttggtctttgaataaagcctgagtaggaaggctagcaaaaaaaaaaaaaaaaaaaaaaaaaaaaaaaaaaaaaaaaaaaaaaaaaaaaaaaaaaaaaaaaaaaaaaaaaaaaaaaa

SEQ ID NO: 12174 - RNA, 5785 nt, synthetic construct
  source 1..5785: mol_type = other RNA
aggaaataagagagaaaagaagagtaagaagaaatataagagccaccatggcccctaagaagaagcgtaaagtgagccggatggaacgcctcgtctacgaggtgcggcagaagtgcagaaacatcgaggacatctgcatctcctgcggatctctgaacgtgaccctggagcacccactgttcatcggcggcatgtgccagaactgtaaaaactgttttctggagtgtgcctatcaatacgacgatgacggctaccagagctactgcaccatctgttgcggcggaagagaggtgctgatgtgtggaaataacaactgctgccggtgcttctgcgtggaatgcgtggacctgctggtgggccccggcgccgcccaggccgctattaaggaagatccttggaactgctacatgtgcggccacaagggcacatacggcctgctgagacggagagaggactggcctagcagactgcagatgttcttcgccaataaccacgaccaggagttcgacccccctaaggtgtaccctcccgtccccgccgagaagagaaagcccatccgggtcctgagcctgttcgatggcatcgccaccggtctgctggtgctgaaggacctgggcatccaggtggataggtacattgcctccgaggtgtgcgaggactccatcaccgtgggaatggtgcgtcatcagggcaagatcatgtacgtgggcgacgtgcggagcgtgacacagaagcatatccaggagtggggccctttcgacctggtgatcggcggcagcccttgcaatgacctgagcatcgtgaacccagcccggaagggcctgtacgagggaaccggcagactgttcttcgagttttacagactgctgcacgacgcccggcctaaggaaggcgacgaccggcccttcttttggctgttcgagaatgtggtggccatgggagtcagcgacaagcgggatattagccggttcctggagagcaaccccgtgatgatcgatgccaaggaagtgagcgccgcccaccgggccagatacttctggggcaatctgcctggcatgaacagacccctggccagcaccgtgaacgacaagctggagctgcaggagtgcctggagcacggccggatcgccaagttcagcaaggtgagaaccatcaccacccgaagcaacagcatcaaacaaggcaaggaccagcactttcctgtgttcatgaacgagaaggaggacatcctgtggtgtaccgagatggagagagtgttcgggttcccagtccactacacagatgtcagcaacatgtctagactggccagacagagactgctgggaagaagctggtccgtccctgtgatcagacacctgttcgcccctctgaaggagtacttcgcctgcgtgagcagcggcaacagcaacgccaacagccggggccccagcttctctagcggcctggtgccactgtccctgagagggagccacatgggccccatggagatctacaaaaccgtgagcgcctggaagcggcagcctgtgcgcgtgctgagcctgtttcggaatatcgataaagtcctgaaaagcctgggattcctggagagcggctctggctccggcggtggcaccctgaagtacgtggaggatgtgacaaacgtggtcagacgggatgtggagaagtggggccccttcgatctggtgtacggcagcacccaacccctgggcagctcttgtgaccggtgccctggctggtacatgtttcagttccaccggatcctgcagtacgccctgccgagacaggagtcccagcggccattcttttggattttcatggacaacttgctgctgaccgaggatgaccaggaaactaccactcggttcctgcagaccgaagccgtgaccctgcaggacgtgagaggccgggactaccagaacgccatgcgggtgtggtccaacatccctggactgaaaagcaagcacgcacctctgacccctaaagaagaggagtacctgcaggcccaggtgcggagcagaagcaagctggacgcccctaaggtggatctgctggtgaagaattgcctcctgcccctgagagagtacttcaagtatttcagccagaatagtctgcccctgggaggcagcggcggcggcggcaaccagttcagcttccagagcctgctgaccttcaaggacgtggccatcaacttcagcaaggaggagtgggagtgcctgcacaccagccagaggaacctgtacagggacgtgatgctggagaactacagcaacctggtgagcgtgggcctgagcgagagcaagcccgagctggtgacctgcctggagcagaacaaggagccctggatggtgaacatcgacgaggccgagggcctgggccagggcggcccaagcagcggcgcccctcctcccagcggcggcagcccagccggctccccaacctctaccgaggagggcacctctgagtccgccacccccgagagcggccctggcacctccaccgagcccagcgagggcagcgcacccggcagccctgccggcagccccacctccacagaggagggaaccagcaccgagcccagcgaaggcagcgccccaggcaccagcaccgagcctagtgagcaggagattaaacggatcaacaagatcagaagaagacttgtgaaagacagcaacaccaagaaggccggcaagacaggccccatgaaaaccctgctggttagagtgatgacacccgatctgagagagcggctggaaaacctgagaaagaagcctgaaaatatcccccagcccatcagcaatacatctagagccaacctgaataagctgctgaccgattacaccgaaatgaagaaggcgatcctgcatgtgtactgggaagagttccagaaggaccctgtgggcctgatgagccgggtggcccagcctgccagcaagaagatcgatcagaacaagctgaaacctgagatggacgagaagggcaacctgaccaccgccggctttgcctgctctcagtgtggccagcccctgttcgtgtacaagctggagcaggtgtctgagaagggcaaggcttacaccaactacttcggacggtgcaatgtggccgagcacgaaaagctgatcctgctggcccagctgaagcccgagaaggatagcgacgaagccgtgacatatagcctgggaaagtttgggcagagggccctggatttctacagcattcatgtgaccaaggagtccacccaccccgtgaagcccctggcccagatcgccggaaacagatacgcctccggacctgtgggaaaggccctgagcgacgcatgtatgggcacaatcgcctccttcctgtctaagtaccaggacatcatcatcgaacaccagaaggtggtgaagggcaaccagaagagactggagagcctgcgggagctggccggcaaggaaaacctggaataccctagcgtgaccctgccacctcagcctcacaccaaggagggcgttgatgcctacaacgaagtgatcgcccgggtgcgaatgtgggtgaacctgaacctgtggcagaagctgaagctaagcagagatgatgccaagcctctgctgagactgaagggattcccttcctttcctctggtcgagagacaggccaacgaagtggactggtgggacatggtgtgtaacgtgaagaagctgatcaacgagaaaaaggaggatggcaaggtgttttggcagaatctggctggctacaagagacaggaagccctgagaccatacctgagcagcgaggaagatcggaagaagggaaagaaattcgctcggtaccagctgggcgacctgctgctgcacctggaaaagaagcacggcgaggactggggaaaggtgtacgacgaggcctgggagcggattgacaagaaagtggaaggcctgagcaagcacatcaagctggaagaggaacggagaagcgaggacgcccagagcaaggccgccctgaccgactggctgcgggctaaggccagcttcgtgatcgagggcctgaaggaggccgacaaggacgagttctgcagatgcgagctgaagctgcagaagtggtacggggacctgcggggaaagcccttcgccatcgaagccgagaacagcatcctggacatcagcggcttcagcaagcagtacaactgtgccttcatctggcagaaggacggcgtgaagaagctgaacctgtacctgatcatcaactacttcaagggcggcaagctgcggttcaagaagatcaaacctgaagccttcgaagccaacagattctacaccgtgatcaacaaaaagagcggcgagatcgtgcccatggaggtgaacttcaacttcgacgaccccaacctgatcatcctgcctctggcctttggcaagagacagggcagagaattcatctggaacgacctgctgtccctggaaaccggcagcctgaagctggccaacggaagagtgatcgagaagacactgtacaacagaagaacccggcaggatgagcctgccctgttcgtggccctgaccttcgagcggcgggaggtcctggactcctccaatatcaaaccaatgaacctgatcggcgtggcaagaggcgaaaacatccccgccgtgatcgccctgaccgaccccgagggctgcccactgagccggtttaaggatagcctgggaaacccaacccacatcctgagaatcggcgagagctataaggagaagcagcggaccatccaggccaagaaggaggtggagcagcggagagccggcggctacagccggaagtacgccagcaaagccaagaatctggcagacgatatggtgagaaacaccgctagagatctgctgtactacgccgtgacccaggatgccatgctgatcttcgccaacctgagccggggcttcggccggcagggcaagcggaccttcatggccgagagacagtacacacggatggaggactggctgaccgccaagctggcctacgagggcctgagcaagacctacctgtccaagacactggcccagtacacctccaagacatgcagcaactgtgggtttaccatcaccagcgccgactacgacagggtgctggagaagctgaagaagacagcaacaggctggatgaccacaattaacggcaaggagctgaaggtggagggccagattacctactacaacagatacaagagacagaacgtagtcaaggacctgtccgtcgagctggatagactgagcgaagaatctgtgaacaacgacatctcctcctggacaaagggcagaagcggagaagctctgagcctcctgaagaaaagattctcccatagacccgtgcaggagaagttcgtgtgcctgaactgcggcttcgagacacacgcagccgagcaagccgccctgaacatcgccagatcctggctgttcctgcggagccaggagtacaagaaataccagacaaacaagacaaccggcaacaccgataagagagccttcgtcgagacctggcagtccttttaccggaagaagcttaaggaggtgtggaaacctgccgtgcggtctggcggatctggcggaggctccaccagccccaagaaaaagagaaaagtctaagctgccttctgcggggcttgccttctggccatgcccttcttctctcccttgcacctgtacctcttggtctttgaataaagcctgagtaggaaggctagcaaaaaaaaaaaaaaaaaaaaaaaaaaaaaaaaaaaaaaaaaaaaaaaaaaaaaaaaaaaaaaaaaaaaaaaaaaaaaaaa

SEQ ID NO: 12175 - RNA, 5785 nt, synthetic construct
  source 1..5785: mol_type = other RNA
aggaaataagagagaaaagaagagtaagaagaaatataagagccaccatggcccctaagaagaagcgtaaagtgagccggatggaacgcctcgtctacgaggtgcggcagaagtgcagaaacatcgaggacatctgcatctcctgcggatctctgaacgtgaccctggagcacccactgttcatcggcggcatgtgccagaactgtaaaaactgttttctggagtgtgcctatcaatacgacgatgacggctaccagagctactgcaccatctgttgcggcggaagagaggtgctgatgtgtggaaataacaactgctgccggtgcttctgcgtggaatgcgtggacctgctggtgggccccggcgccgcccaggccgctattaaggaagatccttggaactgctacatgtgcggccacaagggcacatacggcctgctgagacggagagaggactggcctagcagactgcagatgttcttcgccaataaccacgaccaggagttcgacccccctaaggtgtaccctcccgtccccgccgagaagagaaagcccatccgggtcctgagcctgttcgatggcatcgccaccggtctgctggtgctgaaggacctgggcatccaggtggataggtacattgcctccgaggtgtgcgaggactccatcaccgtgggaatggtgcgtcatcagggcaagatcatgtacgtgggcgacgtgcggagcgtgacacagaagcatatccaggagtggggccctttcgacctggtgatcggcggcagcccttgcaatgacctgagcatcgtgaacccagcccggaagggcctgtacgagggaaccggcagactgttcttcgagttttacagactgctgcacgacgcccggcctaaggaaggcgacgaccggcccttcttttggctgttcgagaatgtggtggccatgggagtcagcgacaagcgggatattagccggttcctggagagcaaccccgtgatgatcgatgccaaggaagtgagcgccgcccaccgggccagatacttctggggcaatctgcctggcatgaacagacccctggccagcaccgtgaacgacaagctggagctgcaggagtgcctggagcacggccggatcgccaagttcagcaaggtgagaaccatcaccacccgaagcaacagcatcaaacaaggcaaggaccagcactttcctgtgttcatgaacgagaaggaggacatcctgtggtgtaccgagatggagagagtgttcgggttcccagtccactacacagatgtcagcaacatgtctagactggccagacagagactgctgggaagaagctggtccgtccctgtgatcagacacctgttcgcccctctgaaggagtacttcgcctgcgtgagcagcggcaacagcaacgccaacagccggggccccagcttctctagcggcctggtgccactgtccctgagagggagccacatgggccccatggagatctacaaaaccgtgagcgcctggaagcggcagcctgtgcgcgtgctgagcctgtttcggaatatcgataaagtcctgaaaagcctgggattcctggagagcggctctggctccggcggtggcaccctgaagtacgtggaggatgtgacaaacgtggtcagacgggatgtggagaagtggggccccttcgatctggtgtacggcagcacccaacccctgggcagctcttgtgaccggtgccctggctggtacatgtttcagttccaccggatcctgcagtacgccctgccgagacaggagtcccagcggccattcttttggattttcatggacaacttgctgctgaccgaggatgaccaggaaactaccactcggttcctgcagaccgaagccgtgaccctgcaggacgtgagaggccgggactaccagaacgccatgcgggtgtggtccaacatccctggactgaaaagcaagcacgcacctctgacccctaaagaagaggagtacctgcaggcccaggtgcggagcagaagcaagctggacgcccctaaggtggatctgctggtgaagaattgcctcctgcccctgagagagtacttcaagtatttcagccagaatagtctgcccctgggaggcagcggcggcggcatggccttcgaggacgtggccgtgtacttcagccaggaggagtggggcctgctggacaccgcccagagggccctgtacaggagggtgatgctggacaacttcgccctggtggccagcctgggcctgagcaccagcaggcccagggtggtgatccagctggagaggggcgaggagccctgggtgcccagcaggaccgacaccatcctgagcaggaacacctacaggaggaggaaccccggcagcggcggcccaagcagcggcgcccctcctcccagcggcggcagcccagccggctccccaacctctaccgaggagggcacctctgagtccgccacccccgagagcggccctggcacctccaccgagcccagcgagggcagcgcacccggcagccctgccggcagccccacctccacagaggagggaaccagcaccgagcccagcgaaggcagcgccccaggcaccagcaccgagcctagtgagcaggagattaaacggatcaacaagatcagaagaagacttgtgaaagacagcaacaccaagaaggccggcaagacaggccccatgaaaaccctgctggttagagtgatgacacccgatctgagagagcggctggaaaacctgagaaagaagcctgaaaatatcccccagcccatcagcaatacatctagagccaacctgaataagctgctgaccgattacaccgaaatgaagaaggcgatcctgcatgtgtactgggaagagttccagaaggaccctgtgggcctgatgagccgggtggcccagcctgccagcaagaagatcgatcagaacaagctgaaacctgagatggacgagaagggcaacctgaccaccgccggctttgcctgctctcagtgtggccagcccctgttcgtgtacaagctggagcaggtgtctgagaagggcaaggcttacaccaactacttcggacggtgcaatgtggccgagcacgaaaagctgatcctgctggcccagctgaagcccgagaaggatagcgacgaagccgtgacatatagcctgggaaagtttgggcagagggccctggatttctacagcattcatgtgaccaaggagtccacccaccccgtgaagcccctggcccagatcgccggaaacagatacgcctccggacctgtgggaaaggccctgagcgacgcatgtatgggcacaatcgcctccttcctgtctaagtaccaggacatcatcatcgaacaccagaaggtggtgaagggcaaccagaagagactggagagcctgcgggagctggccggcaaggaaaacctggaataccctagcgtgaccctgccacctcagcctcacaccaaggagggcgttgatgcctacaacgaagtgatcgcccgggtgcgaatgtgggtgaacctgaacctgtggcagaagctgaagctaagcagagatgatgccaagcctctgctgagactgaagggattcccttcctttcctctggtcgagagacaggccaacgaagtggactggtgggacatggtgtgtaacgtgaagaagctgatcaacgagaaaaaggaggatggcaaggtgttttggcagaatctggctggctacaagagacaggaagccctgagaccatacctgagcagcgaggaagatcggaagaagggaaagaaattcgctcggtaccagctgggcgacctgctgctgcacctggaaaagaagcacggcgaggactggggaaaggtgtacgacgaggcctgggagcggattgacaagaaagtggaaggcctgagcaagcacatcaagctggaagaggaacggagaagcgaggacgcccagagcaaggccgccctgaccgactggctgcgggctaaggccagcttcgtgatcgagggcctgaaggaggccgacaaggacgagttctgcagatgcgagctgaagctgcagaagtggtacggggacctgcggggaaagcccttcgccatcgaagccgagaacagcatcctggacatcagcggcttcagcaagcagtacaactgtgccttcatctggcagaaggacggcgtgaagaagctgaacctgtacctgatcatcaactacttcaagggcggcaagctgcggttcaagaagatcaaacctgaagccttcgaagccaacagattctacaccgtgatcaacaaaaagagcggcgagatcgtgcccatggaggtgaacttcaacttcgacgaccccaacctgatcatcctgcctctggcctttggcaagagacagggcagagaattcatctggaacgacctgctgtccctggaaaccggcagcctgaagctggccaacggaagagtgatcgagaagacactgtacaacagaagaacccggcaggatgagcctgccctgttcgtggccctgaccttcgagcggcgggaggtcctggactcctccaatatcaaaccaatgaacctgatcggcgtggcaagaggcgaaaacatccccgccgtgatcgccctgaccgaccccgagggctgcccactgagccggtttaaggatagcctgggaaacccaacccacatcctgagaatcggcgagagctataaggagaagcagcggaccatccaggccaagaaggaggtggagcagcggagagccggcggctacagccggaagtacgccagcaaagccaagaatctggcagacgatatggtgagaaacaccgctagagatctgctgtactacgccgtgacccaggatgccatgctgatcttcgccaacctgagccggggcttcggccggcagggcaagcggaccttcatggccgagagacagtacacacggatggaggactggctgaccgccaagctggcctacgagggcctgagcaagacctacctgtccaagacactggcccagtacacctccaagacatgcagcaactgtgggtttaccatcaccagcgccgactacgacagggtgctggagaagctgaagaagacagcaacaggctggatgaccacaattaacggcaaggagctgaaggtggagggccagattacctactacaacagatacaagagacagaacgtagtcaaggacctgtccgtcgagctggatagactgagcgaagaatctgtgaacaacgacatctcctcctggacaaagggcagaagcggagaagctctgagcctcctgaagaaaagattctcccatagacccgtgcaggagaagttcgtgtgcctgaactgcggcttcgagacacacgcagccgagcaagccgccctgaacatcgccagatcctggctgttcctgcggagccaggagtacaagaaataccagacaaacaagacaaccggcaacaccgataagagagccttcgtcgagacctggcagtccttttaccggaagaagcttaaggaggtgtggaaacctgccgtgcggtctggcggatctggcggaggctccaccagccccaagaaaaagagaaaagtctaagctgccttctgcggggcttgccttctggccatgcccttcttctctcccttgcacctgtacctcttggtctttgaataaagcctgagtaggaaggctagcaaaaaaaaaaaaaaaaaaaaaaaaaaaaaaaaaaaaaaaaaaaaaaaaaaaaaaaaaaaaaaaaaaaaaaaaaaaaaaaa

SEQ ID NO: 12176 - RNA, 5785 nt, synthetic construct
  source 1..5785: mol_type = other RNA
aggaaataagagagaaaagaagagtaagaagaaatataagagccaccatggcccctaagaagaagcgtaaagtgagccggatggaacgcctcgtctacgaggtgcggcagaagtgcagaaacatcgaggacatctgcatctcctgcggatctctgaacgtgaccctggagcacccactgttcatcggcggcatgtgccagaactgtaaaaactgttttctggagtgtgcctatcaatacgacgatgacggctaccagagctactgcaccatctgttgcggcggaagagaggtgctgatgtgtggaaataacaactgctgccggtgcttctgcgtggaatgcgtggacctgctggtgggccccggcgccgcccaggccgctattaaggaagatccttggaactgctacatgtgcggccacaagggcacatacggcctgctgagacggagagaggactggcctagcagactgcagatgttcttcgccaataaccacgaccaggagttcgacccccctaaggtgtaccctcccgtccccgccgagaagagaaagcccatccgggtcctgagcctgttcgatggcatcgccaccggtctgctggtgctgaaggacctgggcatccaggtggataggtacattgcctccgaggtgtgcgaggactccatcaccgtgggaatggtgcgtcatcagggcaagatcatgtacgtgggcgacgtgcggagcgtgacacagaagcatatccaggagtggggccctttcgacctggtgatcggcggcagcccttgcaatgacctgagcatcgtgaacccagcccggaagggcctgtacgagggaaccggcagactgttcttcgagttttacagactgctgcacgacgcccggcctaaggaaggcgacgaccggcccttcttttggctgttcgagaatgtggtggccatgggagtcagcgacaagcgggatattagccggttcctggagagcaaccccgtgatgatcgatgccaaggaagtgagcgccgcccaccgggccagatacttctggggcaatctgcctggcatgaacagacccctggccagcaccgtgaacgacaagctggagctgcaggagtgcctggagcacggccggatcgccaagttcagcaaggtgagaaccatcaccacccgaagcaacagcatcaaacaaggcaaggaccagcactttcctgtgttcatgaacgagaaggaggacatcctgtggtgtaccgagatggagagagtgttcgggttcccagtccactacacagatgtcagcaacatgtctagactggccagacagagactgctgggaagaagctggtccgtccctgtgatcagacacctgttcgcccctctgaaggagtacttcgcctgcgtgagcagcggcaacagcaacgccaacagccggggccccagcttctctagcggcctggtgccactgtccctgagagggagccacatgggccccatggagatctacaaaaccgtgagcgcctggaagcggcagcctgtgcgcgtgctgagcctgtttcggaatatcgataaagtcctgaaaagcctgggattcctggagagcggctctggctccggcggtggcaccctgaagtacgtggaggatgtgacaaacgtggtcagacgggatgtggagaagtggggccccttcgatctggtgtacggcagcacccaacccctgggcagctcttgtgaccggtgccctggctggtacatgtttcagttccaccggatcctgcagtacgccctgccgagacaggagtcccagcggccattcttttggattttcatggacaacttgctgctgaccgaggatgaccaggaaactaccactcggttcctgcagaccgaagccgtgaccctgcaggacgtgagaggccgggactaccagaacgccatgcgggtgtggtccaacatccctggactgaaaagcaagcacgcacctctgacccctaaagaagaggagtacctgcaggcccaggtgcggagcagaagcaagctggacgcccctaaggtggatctgctggtgaagaattgcctcctgcccctgagagagtacttcaagtatttcagccagaatagtctgcccctgggaggcagcggcggcggcatggccttcgaggacgtggccgtgtacttcagccaggaggagtggggcctgctggacaccgcccagagggccctgtacaggagggtgatgctggacaacttcgccctggtggccagcctgggcctgagcaccagcaggcccagggtggtgatccagctggagaggggcgaggagccctgggtgcccagcgagaccgacatgaccatgagcaggaacacccacaggaggaggaaccccggcagcggcggcccaagcagcggcgcccctcctcccagcggcggcagcccagccggctccccaacctctaccgaggagggcacctctgagtccgccacccccgagagcggccctggcacctccaccgagcccagcgagggcagcgcacccggcagccctgccggcagccccacctccacagaggagggaaccagcaccgagcccagcgaaggcagcgccccaggcaccagcaccgagcctagtgagcaggagattaaacggatcaacaagatcagaagaagacttgtgaaagacagcaacaccaagaaggccggcaagacaggccccatgaaaaccctgctggttagagtgatgacacccgatctgagagagcggctggaaaacctgagaaagaagcctgaaaatatcccccagcccatcagcaatacatctagagccaacctgaataagctgctgaccgattacaccgaaatgaagaaggcgatcctgcatgtgtactgggaagagttccagaaggaccctgtgggcctgatgagccgggtggcccagcctgccagcaagaagatcgatcagaacaagctgaaacctgagatggacgagaagggcaacctgaccaccgccggctttgcctgctctcagtgtggccagcccctgttcgtgtacaagctggagcaggtgtctgagaagggcaaggcttacaccaactacttcggacggtgcaatgtggccgagcacgaaaagctgatcctgctggcccagctgaagcccgagaaggatagcgacgaagccgtgacatatagcctgggaaagtttgggcagagggccctggatttctacagcattcatgtgaccaaggagtccacccaccccgtgaagcccctggcccagatcgccggaaacagatacgcctccggacctgtgggaaaggccctgagcgacgcatgtatgggcacaatcgcctccttcctgtctaagtaccaggacatcatcatcgaacaccagaaggtggtgaagggcaaccagaagagactggagagcctgcgggagctggccggcaaggaaaacctggaataccctagcgtgaccctgccacctcagcctcacaccaaggagggcgttgatgcctacaacgaagtgatcgcccgggtgcgaatgtgggtgaacctgaacctgtggcagaagctgaagctaagcagagatgatgccaagcctctgctgagactgaagggattcccttcctttcctctggtcgagagacaggccaacgaagtggactggtgggacatggtgtgtaacgtgaagaagctgatcaacgagaaaaaggaggatggcaaggtgttttggcagaatctggctggctacaagagacaggaagccctgagaccatacctgagcagcgaggaagatcggaagaagggaaagaaattcgctcggtaccagctgggcgacctgctgctgcacctggaaaagaagcacggcgaggactggggaaaggtgtacgacgaggcctgggagcggattgacaagaaagtggaaggcctgagcaagcacatcaagctggaagaggaacggagaagcgaggacgcccagagcaaggccgccctgaccgactggctgcgggctaaggccagcttcgtgatcgagggcctgaaggaggccgacaaggacgagttctgcagatgcgagctgaagctgcagaagtggtacggggacctgcggggaaagcccttcgccatcgaagccgagaacagcatcctggacatcagcggcttcagcaagcagtacaactgtgccttcatctggcagaaggacggcgtgaagaagctgaacctgtacctgatcatcaactacttcaagggcggcaagctgcggttcaagaagatcaaacctgaagccttcgaagccaacagattctacaccgtgatcaacaaaaagagcggcgagatcgtgcccatggaggtgaacttcaacttcgacgaccccaacctgatcatcctgcctctggcctttggcaagagacagggcagagaattcatctggaacgacctgctgtccctggaaaccggcagcctgaagctggccaacggaagagtgatcgagaagacactgtacaacagaagaacccggcaggatgagcctgccctgttcgtggccctgaccttcgagcggcgggaggtcctggactcctccaatatcaaaccaatgaacctgatcggcgtggcaagaggcgaaaacatccccgccgtgatcgccctgaccgaccccgagggctgcccactgagccggtttaaggatagcctgggaaacccaacccacatcctgagaatcggcgagagctataaggagaagcagcggaccatccaggccaagaaggaggtggagcagcggagagccggcggctacagccggaagtacgccagcaaagccaagaatctggcagacgatatggtgagaaacaccgctagagatctgctgtactacgccgtgacccaggatgccatgctgatcttcgccaacctgagccggggcttcggccggcagggcaagcggaccttcatggccgagagacagtacacacggatggaggactggctgaccgccaagctggcctacgagggcctgagcaagacctacctgtccaagacactggcccagtacacctccaagacatgcagcaactgtgggtttaccatcaccagcgccgactacgacagggtgctggagaagctgaagaagacagcaacaggctggatgaccacaattaacggcaaggagctgaaggtggagggccagattacctactacaacagatacaagagacagaacgtagtcaaggacctgtccgtcgagctggatagactgagcgaagaatctgtgaacaacgacatctcctcctggacaaagggcagaagcggagaagctctgagcctcctgaagaaaagattctcccatagacccgtgcaggagaagttcgtgtgcctgaactgcggcttcgagacacacgcagccgagcaagccgccctgaacatcgccagatcctggctgttcctgcggagccaggagtacaagaaataccagacaaacaagacaaccggcaacaccgataagagagccttcgtcgagacctggcagtccttttaccggaagaagcttaaggaggtgtggaaacctgccgtgcggtctggcggatctggcggaggctccaccagccccaagaaaaagagaaaagtctaagctgccttctgcggggcttgccttctggccatgcccttcttctctcccttgcacctgtacctcttggtctttgaataaagcctgagtaggaaggctagcaaaaaaaaaaaaaaaaaaaaaaaaaaaaaaaaaaaaaaaaaaaaaaaaaaaaaaaaaaaaaaaaaaaaaaaaaaaaaaaa

SEQ ID NO: 12177 - RNA, 5785 nt, synthetic construct
  source 1..5785: mol_type = other RNA
aggaaataagagagaaaagaagagtaagaagaaatataagagccaccatggcccctaagaagaagcgtaaagtgagccggatggaacgcctcgtctacgaggtgcggcagaagtgcagaaacatcgaggacatctgcatctcctgcggatctctgaacgtgaccctggagcacccactgttcatcggcggcatgtgccagaactgtaaaaactgttttctggagtgtgcctatcaatacgacgatgacggctaccagagctactgcaccatctgttgcggcggaagagaggtgctgatgtgtggaaataacaactgctgccggtgcttctgcgtggaatgcgtggacctgctggtgggccccggcgccgcccaggccgctattaaggaagatccttggaactgctacatgtgcggccacaagggcacatacggcctgctgagacggagagaggactggcctagcagactgcagatgttcttcgccaataaccacgaccaggagttcgacccccctaaggtgtaccctcccgtccccgccgagaagagaaagcccatccgggtcctgagcctgttcgatggcatcgccaccggtctgctggtgctgaaggacctgggcatccaggtggataggtacattgcctccgaggtgtgcgaggactccatcaccgtgggaatggtgcgtcatcagggcaagatcatgtacgtgggcgacgtgcggagcgtgacacagaagcatatccaggagtggggccctttcgacctggtgatcggcggcagcccttgcaatgacctgagcatcgtgaacccagcccggaagggcctgtacgagggaaccggcagactgttcttcgagttttacagactgctgcacgacgcccggcctaaggaaggcgacgaccggcccttcttttggctgttcgagaatgtggtggccatgggagtcagcgacaagcgggatattagccggttcctggagagcaaccccgtgatgatcgatgccaaggaagtgagcgccgcccaccgggccagatacttctggggcaatctgcctggcatgaacagacccctggccagcaccgtgaacgacaagctggagctgcaggagtgcctggagcacggccggatcgccaagttcagcaaggtgagaaccatcaccacccgaagcaacagcatcaaacaaggcaaggaccagcactttcctgtgttcatgaacgagaaggaggacatcctgtggtgtaccgagatggagagagtgttcgggttcccagtccactacacagatgtcagcaacatgtctagactggccagacagagactgctgggaagaagctggtccgtccctgtgatcagacacctgttcgcccctctgaaggagtacttcgcctgcgtgagcagcggcaacagcaacgccaacagccggggccccagcttctctagcggcctggtgccactgtccctgagagggagccacatgggccccatggagatctacaaaaccgtgagcgcctggaagcggcagcctgtgcgcgtgctgagcctgtttcggaatatcgataaagtcctgaaaagcctgggattcctggagagcggctctggctccggcggtggcaccctgaagtacgtggaggatgtgacaaacgtggtcagacgggatgtggagaagtggggccccttcgatctggtgtacggcagcacccaacccctgggcagctcttgtgaccggtgccctggctggtacatgtttcagttccaccggatcctgcagtacgccctgccgagacaggagtcccagcggccattcttttggattttcatggacaacttgctgctgaccgaggatgaccaggaaactaccactcggttcctgcagaccgaagccgtgaccctgcaggacgtgagaggccgggactaccagaacgccatgcgggtgtggtccaacatccctggactgaaaagcaagcacgcacctctgacccctaaagaagaggagtacctgcaggcccaggtgcggagcagaagcaagctggacgcccctaaggtggatctgctggtgaagaattgcctcctgcccctgagagagtacttcaagtatttcagccagaatagtctgcccctgggaggcagcggcggcggccaccaggaggtggtgaccttcgaggacgtggccgtgtacttcacccagaccgagtgggccggcctgagccccgcccagagggccctgtacaggagcgtgatgctggagatctacggcaacctgaccagcctgggctaccccgtgcccaagcccgccctggtgagcctgctggagaggggcgacctgccctggggcctggagaccagggacgacaggcccgcccagggcaccaaggacatctgcggcggcccaagcagcggcgcccctcctcccagcggcggcagcccagccggctccccaacctctaccgaggagggcacctctgagtccgccacccccgagagcggccctggcacctccaccgagcccagcgagggcagcgcacccggcagccctgccggcagccccacctccacagaggagggaaccagcaccgagcccagcgaaggcagcgccccaggcaccagcaccgagcctagtgagcaggagattaaacggatcaacaagatcagaagaagacttgtgaaagacagcaacaccaagaaggccggcaagacaggccccatgaaaaccctgctggttagagtgatgacacccgatctgagagagcggctggaaaacctgagaaagaagcctgaaaatatcccccagcccatcagcaatacatctagagccaacctgaataagctgctgaccgattacaccgaaatgaagaaggcgatcctgcatgtgtactgggaagagttccagaaggaccctgtgggcctgatgagccgggtggcccagcctgccagcaagaagatcgatcagaacaagctgaaacctgagatggacgagaagggcaacctgaccaccgccggctttgcctgctctcagtgtggccagcccctgttcgtgtacaagctggagcaggtgtctgagaagggcaaggcttacaccaactacttcggacggtgcaatgtggccgagcacgaaaagctgatcctgctggcccagctgaagcccgagaaggatagcgacgaagccgtgacatatagcctgggaaagtttgggcagagggccctggatttctacagcattcatgtgaccaaggagtccacccaccccgtgaagcccctggcccagatcgccggaaacagatacgcctccggacctgtgggaaaggccctgagcgacgcatgtatgggcacaatcgcctccttcctgtctaagtaccaggacatcatcatcgaacaccagaaggtggtgaagggcaaccagaagagactggagagcctgcgggagctggccggcaaggaaaacctggaataccctagcgtgaccctgccacctcagcctcacaccaaggagggcgttgatgcctacaacgaagtgatcgcccgggtgcgaatgtgggtgaacctgaacctgtggcagaagctgaagctaagcagagatgatgccaagcctctgctgagactgaagggattcccttcctttcctctggtcgagagacaggccaacgaagtggactggtgggacatggtgtgtaacgtgaagaagctgatcaacgagaaaaaggaggatggcaaggtgttttggcagaatctggctggctacaagagacaggaagccctgagaccatacctgagcagcgaggaagatcggaagaagggaaagaaattcgctcggtaccagctgggcgacctgctgctgcacctggaaaagaagcacggcgaggactggggaaaggtgtacgacgaggcctgggagcggattgacaagaaagtggaaggcctgagcaagcacatcaagctggaagaggaacggagaagcgaggacgcccagagcaaggccgccctgaccgactggctgcgggctaaggccagcttcgtgatcgagggcctgaaggaggccgacaaggacgagttctgcagatgcgagctgaagctgcagaagtggtacggggacctgcggggaaagcccttcgccatcgaagccgagaacagcatcctggacatcagcggcttcagcaagcagtacaactgtgccttcatctggcagaaggacggcgtgaagaagctgaacctgtacctgatcatcaactacttcaagggcggcaagctgcggttcaagaagatcaaacctgaagccttcgaagccaacagattctacaccgtgatcaacaaaaagagcggcgagatcgtgcccatggaggtgaacttcaacttcgacgaccccaacctgatcatcctgcctctggcctttggcaagagacagggcagagaattcatctggaacgacctgctgtccctggaaaccggcagcctgaagctggccaacggaagagtgatcgagaagacactgtacaacagaagaacccggcaggatgagcctgccctgttcgtggccctgaccttcgagcggcgggaggtcctggactcctccaatatcaaaccaatgaacctgatcggcgtggcaagaggcgaaaacatccccgccgtgatcgccctgaccgaccccgagggctgcccactgagccggtttaaggatagcctgggaaacccaacccacatcctgagaatcggcgagagctataaggagaagcagcggaccatccaggccaagaaggaggtggagcagcggagagccggcggctacagccggaagtacgccagcaaagccaagaatctggcagacgatatggtgagaaacaccgctagagatctgctgtactacgccgtgacccaggatgccatgctgatcttcgccaacctgagccggggcttcggccggcagggcaagcggaccttcatggccgagagacagtacacacggatggaggactggctgaccgccaagctggcctacgagggcctgagcaagacctacctgtccaagacactggcccagtacacctccaagacatgcagcaactgtgggtttaccatcaccagcgccgactacgacagggtgctggagaagctgaagaagacagcaacaggctggatgaccacaattaacggcaaggagctgaaggtggagggccagattacctactacaacagatacaagagacagaacgtagtcaaggacctgtccgtcgagctggatagactgagcgaagaatctgtgaacaacgacatctcctcctggacaaagggcagaagcggagaagctctgagcctcctgaagaaaagattctcccatagacccgtgcaggagaagttcgtgtgcctgaactgcggcttcgagacacacgcagccgagcaagccgccctgaacatcgccagatcctggctgttcctgcggagccaggagtacaagaaataccagacaaacaagacaaccggcaacaccgataagagagccttcgtcgagacctggcagtccttttaccggaagaagcttaaggaggtgtggaaacctgccgtgcggtctggcggatctggcggaggctccaccagccccaagaaaaagagaaaagtctaagctgccttctgcggggcttgccttctggccatgcccttcttctctcccttgcacctgtacctcttggtctttgaataaagcctgagtaggaaggctagcaaaaaaaaaaaaaaaaaaaaaaaaaaaaaaaaaaaaaaaaaaaaaaaaaaaaaaaaaaaaaaaaaaaaaaaaaaaaaaaa

SEQ ID NO: 12178 - RNA, 5785 nt, synthetic construct
  source 1..5785: mol_type = other RNA
aggaaataagagagaaaagaagagtaagaagaaatataagagccaccatggcccctaagaagaagcgtaaagtgagccggatggaacgcctcgtctacgaggtgcggcagaagtgcagaaacatcgaggacatctgcatctcctgcggatctctgaacgtgaccctggagcacccactgttcatcggcggcatgtgccagaactgtaaaaactgttttctggagtgtgcctatcaatacgacgatgacggctaccagagctactgcaccatctgttgcggcggaagagaggtgctgatgtgtggaaataacaactgctgccggtgcttctgcgtggaatgcgtggacctgctggtgggccccggcgccgcccaggccgctattaaggaagatccttggaactgctacatgtgcggccacaagggcacatacggcctgctgagacggagagaggactggcctagcagactgcagatgttcttcgccaataaccacgaccaggagttcgacccccctaaggtgtaccctcccgtccccgccgagaagagaaagcccatccgggtcctgagcctgttcgatggcatcgccaccggtctgctggtgctgaaggacctgggcatccaggtggataggtacattgcctccgaggtgtgcgaggactccatcaccgtgggaatggtgcgtcatcagggcaagatcatgtacgtgggcgacgtgcggagcgtgacacagaagcatatccaggagtggggccctttcgacctggtgatcggcggcagcccttgcaatgacctgagcatcgtgaacccagcccggaagggcctgtacgagggaaccggcagactgttcttcgagttttacagactgctgcacgacgcccggcctaaggaaggcgacgaccggcccttcttttggctgttcgagaatgtggtggccatgggagtcagcgacaagcgggatattagccggttcctggagagcaaccccgtgatgatcgatgccaaggaagtgagcgccgcccaccgggccagatacttctggggcaatctgcctggcatgaacagacccctggccagcaccgtgaacgacaagctggagctgcaggagtgcctggagcacggccggatcgccaagttcagcaaggtgagaaccatcaccacccgaagcaacagcatcaaacaaggcaaggaccagcactttcctgtgttcatgaacgagaaggaggacatcctgtggtgtaccgagatggagagagtgttcgggttcccagtccactacacagatgtcagcaacatgtctagactggccagacagagactgctgggaagaagctggtccgtccctgtgatcagacacctgttcgcccctctgaaggagtacttcgcctgcgtgagcagcggcaacagcaacgccaacagccggggccccagcttctctagcggcctggtgccactgtccctgagagggagccacatgggccccatggagatctacaaaaccgtgagcgcctggaagcggcagcctgtgcgcgtgctgagcctgtttcggaatatcgataaagtcctgaaaagcctgggattcctggagagcggctctggctccggcggtggcaccctgaagtacgtggaggatgtgacaaacgtggtcagacgggatgtggagaagtggggccccttcgatctggtgtacggcagcacccaacccctgggcagctcttgtgaccggtgccctggctggtacatgtttcagttccaccggatcctgcagtacgccctgccgagacaggagtcccagcggccattcttttggattttcatggacaacttgctgctgaccgaggatgaccaggaaactaccactcggttcctgcagaccgaagccgtgaccctgcaggacgtgagaggccgggactaccagaacgccatgcgggtgtggtccaacatccctggactgaaaagcaagcacgcacctctgacccctaaagaagaggagtacctgcaggcccaggtgcggagcagaagcaagctggacgcccctaaggtggatctgctggtgaagaattgcctcctgcccctgagagagtacttcaagtatttcagccagaatagtctgcccctgggaggcagcggcggcggcacccaggtgcccgtgaccttcgaggacgtggccgtgtacttctgcgagggcgagtgggagaccctggccgagtggcagaaggagctgtacagggagaccatgaaggagaactacgagaccctgaccagcctgggcttcagcagcaagaagcccagcctgatcagcaagatcgagagggaggaggacccctgcgtgagggacaagcaggacagcagggacaggaggaggctgaggagctgctggggcggcccaagcagcggcgcccctcctcccagcggcggcagcccagccggctccccaacctctaccgaggagggcacctctgagtccgccacccccgagagcggccctggcacctccaccgagcccagcgagggcagcgcacccggcagccctgccggcagccccacctccacagaggagggaaccagcaccgagcccagcgaaggcagcgccccaggcaccagcaccgagcctagtgagcaggagattaaacggatcaacaagatcagaagaagacttgtgaaagacagcaacaccaagaaggccggcaagacaggccccatgaaaaccctgctggttagagtgatgacacccgatctgagagagcggctggaaaacctgagaaagaagcctgaaaatatcccccagcccatcagcaatacatctagagccaacctgaataagctgctgaccgattacaccgaaatgaagaaggcgatcctgcatgtgtactgggaagagttccagaaggaccctgtgggcctgatgagccgggtggcccagcctgccagcaagaagatcgatcagaacaagctgaaacctgagatggacgagaagggcaacctgaccaccgccggctttgcctgctctcagtgtggccagcccctgttcgtgtacaagctggagcaggtgtctgagaagggcaaggcttacaccaactacttcggacggtgcaatgtggccgagcacgaaaagctgatcctgctggcccagctgaagcccgagaaggatagcgacgaagccgtgacatatagcctgggaaagtttgggcagagggccctggatttctacagcattcatgtgaccaaggagtccacccaccccgtgaagcccctggcccagatcgccggaaacagatacgcctccggacctgtgggaaaggccctgagcgacgcatgtatgggcacaatcgcctccttcctgtctaagtaccaggacatcatcatcgaacaccagaaggtggtgaagggcaaccagaagagactggagagcctgcgggagctggccggcaaggaaaacctggaataccctagcgtgaccctgccacctcagcctcacaccaaggagggcgttgatgcctacaacgaagtgatcgcccgggtgcgaatgtgggtgaacctgaacctgtggcagaagctgaagctaagcagagatgatgccaagcctctgctgagactgaagggattcccttcctttcctctggtcgagagacaggccaacgaagtggactggtgggacatggtgtgtaacgtgaagaagctgatcaacgagaaaaaggaggatggcaaggtgttttggcagaatctggctggctacaagagacaggaagccctgagaccatacctgagcagcgaggaagatcggaagaagggaaagaaattcgctcggtaccagctgggcgacctgctgctgcacctggaaaagaagcacggcgaggactggggaaaggtgtacgacgaggcctgggagcggattgacaagaaagtggaaggcctgagcaagcacatcaagctggaagaggaacggagaagcgaggacgcccagagcaaggccgccctgaccgactggctgcgggctaaggccagcttcgtgatcgagggcctgaaggaggccgacaaggacgagttctgcagatgcgagctgaagctgcagaagtggtacggggacctgcggggaaagcccttcgccatcgaagccgagaacagcatcctggacatcagcggcttcagcaagcagtacaactgtgccttcatctggcagaaggacggcgtgaagaagctgaacctgtacctgatcatcaactacttcaagggcggcaagctgcggttcaagaagatcaaacctgaagccttcgaagccaacagattctacaccgtgatcaacaaaaagagcggcgagatcgtgcccatggaggtgaacttcaacttcgacgaccccaacctgatcatcctgcctctggcctttggcaagagacagggcagagaattcatctggaacgacctgctgtccctggaaaccggcagcctgaagctggccaacggaagagtgatcgagaagacactgtacaacagaagaacccggcaggatgagcctgccctgttcgtggccctgaccttcgagcggcgggaggtcctggactcctccaatatcaaaccaatgaacctgatcggcgtggcaagaggcgaaaacatccccgccgtgatcgccctgaccgaccccgagggctgcccactgagccggtttaaggatagcctgggaaacccaacccacatcctgagaatcggcgagagctataaggagaagcagcggaccatccaggccaagaaggaggtggagcagcggagagccggcggctacagccggaagtacgccagcaaagccaagaatctggcagacgatatggtgagaaacaccgctagagatctgctgtactacgccgtgacccaggatgccatgctgatcttcgccaacctgagccggggcttcggccggcagggcaagcggaccttcatggccgagagacagtacacacggatggaggactggctgaccgccaagctggcctacgagggcctgagcaagacctacctgtccaagacactggcccagtacacctccaagacatgcagcaactgtgggtttaccatcaccagcgccgactacgacagggtgctggagaagctgaagaagacagcaacaggctggatgaccacaattaacggcaaggagctgaaggtggagggccagattacctactacaacagatacaagagacagaacgtagtcaaggacctgtccgtcgagctggatagactgagcgaagaatctgtgaacaacgacatctcctcctggacaaagggcagaagcggagaagctctgagcctcctgaagaaaagattctcccatagacccgtgcaggagaagttcgtgtgcctgaactgcggcttcgagacacacgcagccgagcaagccgccctgaacatcgccagatcctggctgttcctgcggagccaggagtacaagaaataccagacaaacaagacaaccggcaacaccgataagagagccttcgtcgagacctggcagtccttttaccggaagaagcttaaggaggtgtggaaacctgccgtgcggtctggcggatctggcggaggctccaccagccccaagaaaaagagaaaagtctaagctgccttctgcggggcttgccttctggccatgcccttcttctctcccttgcacctgtacctcttggtctttgaataaagcctgagtaggaaggctagcaaaaaaaaaaaaaaaaaaaaaaaaaaaaaaaaaaaaaaaaaaaaaaaaaaaaaaaaaaaaaaaaaaaaaaaaaaaaaaaa

SEQ ID NO: 12179 - RNA, 5785 nt, synthetic construct
  source 1..5785: mol_type = other RNA
aggaaataagagagaaaagaagagtaagaagaaatataagagccaccatggcccctaagaagaagcgtaaagtgagccggatggaacgcctcgtctacgaggtgcggcagaagtgcagaaacatcgaggacatctgcatctcctgcggatctctgaacgtgaccctggagcacccactgttcatcggcggcatgtgccagaactgtaaaaactgttttctggagtgtgcctatcaatacgacgatgacggctaccagagctactgcaccatctgttgcggcggaagagaggtgctgatgtgtggaaataacaactgctgccggtgcttctgcgtggaatgcgtggacctgctggtgggccccggcgccgcccaggccgctattaaggaagatccttggaactgctacatgtgcggccacaagggcacatacggcctgctgagacggagagaggactggcctagcagactgcagatgttcttcgccaataaccacgaccaggagttcgacccccctaaggtgtaccctcccgtccccgccgagaagagaaagcccatccgggtcctgagcctgttcgatggcatcgccaccggtctgctggtgctgaaggacctgggcatccaggtggataggtacattgcctccgaggtgtgcgaggactccatcaccgtgggaatggtgcgtcatcagggcaagatcatgtacgtgggcgacgtgcggagcgtgacacagaagcatatccaggagtggggccctttcgacctggtgatcggcggcagcccttgcaatgacctgagcatcgtgaacccagcccggaagggcctgtacgagggaaccggcagactgttcttcgagttttacagactgctgcacgacgcccggcctaaggaaggcgacgaccggcccttcttttggctgttcgagaatgtggtggccatgggagtcagcgacaagcgggatattagccggttcctggagagcaaccccgtgatgatcgatgccaaggaagtgagcgccgcccaccgggccagatacttctggggcaatctgcctggcatgaacagacccctggccagcaccgtgaacgacaagctggagctgcaggagtgcctggagcacggccggatcgccaagttcagcaaggtgagaaccatcaccacccgaagcaacagcatcaaacaaggcaaggaccagcactttcctgtgttcatgaacgagaaggaggacatcctgtggtgtaccgagatggagagagtgttcgggttcccagtccactacacagatgtcagcaacatgtctagactggccagacagagactgctgggaagaagctggtccgtccctgtgatcagacacctgttcgcccctctgaaggagtacttcgcctgcgtgagcagcggcaacagcaacgccaacagccggggccccagcttctctagcggcctggtgccactgtccctgagagggagccacatgggccccatggagatctacaaaaccgtgagcgcctggaagcggcagcctgtgcgcgtgctgagcctgtttcggaatatcgataaagtcctgaaaagcctgggattcctggagagcggctctggctccggcggtggcaccctgaagtacgtggaggatgtgacaaacgtggtcagacgggatgtggagaagtggggccccttcgatctggtgtacggcagcacccaacccctgggcagctcttgtgaccggtgccctggctggtacatgtttcagttccaccggatcctgcagtacgccctgccgagacaggagtcccagcggccattcttttggattttcatggacaacttgctgctgaccgaggatgaccaggaaactaccactcggttcctgcagaccgaagccgtgaccctgcaggacgtgagaggccgggactaccagaacgccatgcgggtgtggtccaacatccctggactgaaaagcaagcacgcacctctgacccctaaagaagaggagtacctgcaggcccaggtgcggagcagaagcaagctggacgcccctaaggtggatctgctggtgaagaattgcctcctgcccctgagagagtacttcaagtatttcagccagaatagtctgcccctgggaggcagcggcggcggcgcccacggcagcctgatgttcagcgacgtgagcatcgtgttcagccaggaggagtgggagtgcctggacctggagcagagggacctgtacagggacgtgatgctggagaactacaccaacctggtgagcctgggctgcttcatcagcaagcccgacgtgatcagcctgctggagcagggcaaggagccctggaaggtggtgaggaagaggaggggccagtacgccgacctggagaccaggtacggcggcccaagcagcggcgcccctcctcccagcggcggcagcccagccggctccccaacctctaccgaggagggcacctctgagtccgccacccccgagagcggccctggcacctccaccgagcccagcgagggcagcgcacccggcagccctgccggcagccccacctccacagaggagggaaccagcaccgagcccagcgaaggcagcgccccaggcaccagcaccgagcctagtgagcaggagattaaacggatcaacaagatcagaagaagacttgtgaaagacagcaacaccaagaaggccggcaagacaggccccatgaaaaccctgctggttagagtgatgacacccgatctgagagagcggctggaaaacctgagaaagaagcctgaaaatatcccccagcccatcagcaatacatctagagccaacctgaataagctgctgaccgattacaccgaaatgaagaaggcgatcctgcatgtgtactgggaagagttccagaaggaccctgtgggcctgatgagccgggtggcccagcctgccagcaagaagatcgatcagaacaagctgaaacctgagatggacgagaagggcaacctgaccaccgccggctttgcctgctctcagtgtggccagcccctgttcgtgtacaagctggagcaggtgtctgagaagggcaaggcttacaccaactacttcggacggtgcaatgtggccgagcacgaaaagctgatcctgctggcccagctgaagcccgagaaggatagcgacgaagccgtgacatatagcctgggaaagtttgggcagagggccctggatttctacagcattcatgtgaccaaggagtccacccaccccgtgaagcccctggcccagatcgccggaaacagatacgcctccggacctgtgggaaaggccctgagcgacgcatgtatgggcacaatcgcctccttcctgtctaagtaccaggacatcatcatcgaacaccagaaggtggtgaagggcaaccagaagagactggagagcctgcgggagctggccggcaaggaaaacctggaataccctagcgtgaccctgccacctcagcctcacaccaaggagggcgttgatgcctacaacgaagtgatcgcccgggtgcgaatgtgggtgaacctgaacctgtggcagaagctgaagctaagcagagatgatgccaagcctctgctgagactgaagggattcccttcctttcctctggtcgagagacaggccaacgaagtggactggtgggacatggtgtgtaacgtgaagaagctgatcaacgagaaaaaggaggatggcaaggtgttttggcagaatctggctggctacaagagacaggaagccctgagaccatacctgagcagcgaggaagatcggaagaagggaaagaaattcgctcggtaccagctgggcgacctgctgctgcacctggaaaagaagcacggcgaggactggggaaaggtgtacgacgaggcctgggagcggattgacaagaaagtggaaggcctgagcaagcacatcaagctggaagaggaacggagaagcgaggacgcccagagcaaggccgccctgaccgactggctgcgggctaaggccagcttcgtgatcgagggcctgaaggaggccgacaaggacgagttctgcagatgcgagctgaagctgcagaagtggtacggggacctgcggggaaagcccttcgccatcgaagccgagaacagcatcctggacatcagcggcttcagcaagcagtacaactgtgccttcatctggcagaaggacggcgtgaagaagctgaacctgtacctgatcatcaactacttcaagggcggcaagctgcggttcaagaagatcaaacctgaagccttcgaagccaacagattctacaccgtgatcaacaaaaagagcggcgagatcgtgcccatggaggtgaacttcaacttcgacgaccccaacctgatcatcctgcctctggcctttggcaagagacagggcagagaattcatctggaacgacctgctgtccctggaaaccggcagcctgaagctggccaacggaagagtgatcgagaagacactgtacaacagaagaacccggcaggatgagcctgccctgttcgtggccctgaccttcgagcggcgggaggtcctggactcctccaatatcaaaccaatgaacctgatcggcgtggcaagaggcgaaaacatccccgccgtgatcgccctgaccgaccccgagggctgcccactgagccggtttaaggatagcctgggaaacccaacccacatcctgagaatcggcgagagctataaggagaagcagcggaccatccaggccaagaaggaggtggagcagcggagagccggcggctacagccggaagtacgccagcaaagccaagaatctggcagacgatatggtgagaaacaccgctagagatctgctgtactacgccgtgacccaggatgccatgctgatcttcgccaacctgagccggggcttcggccggcagggcaagcggaccttcatggccgagagacagtacacacggatggaggactggctgaccgccaagctggcctacgagggcctgagcaagacctacctgtccaagacactggcccagtacacctccaagacatgcagcaactgtgggtttaccatcaccagcgccgactacgacagggtgctggagaagctgaagaagacagcaacaggctggatgaccacaattaacggcaaggagctgaaggtggagggccagattacctactacaacagatacaagagacagaacgtagtcaaggacctgtccgtcgagctggatagactgagcgaagaatctgtgaacaacgacatctcctcctggacaaagggcagaagcggagaagctctgagcctcctgaagaaaagattctcccatagacccgtgcaggagaagttcgtgtgcctgaactgcggcttcgagacacacgcagccgagcaagccgccctgaacatcgccagatcctggctgttcctgcggagccaggagtacaagaaataccagacaaacaagacaaccggcaacaccgataagagagccttcgtcgagacctggcagtccttttaccggaagaagcttaaggaggtgtggaaacctgccgtgcggtctggcggatctggcggaggctccaccagccccaagaaaaagagaaaagtctaagctgccttctgcggggcttgccttctggccatgcccttcttctctcccttgcacctgtacctcttggtctttgaataaagcctgagtaggaaggctagcaaaaaaaaaaaaaaaaaaaaaaaaaaaaaaaaaaaaaaaaaaaaaaaaaaaaaaaaaaaaaaaaaaaaaaaaaaaaaaaa

SEQ ID NO: 12180 - RNA, 5785 nt, synthetic construct
  source 1..5785: mol_type = other RNA
aggaaataagagagaaaagaagagtaagaagaaatataagagccaccatggcccctaagaagaagcgtaaagtgagccggatggaacgcctcgtctacgaggtgcggcagaagtgcagaaacatcgaggacatctgcatctcctgcggatctctgaacgtgaccctggagcacccactgttcatcggcggcatgtgccagaactgtaaaaactgttttctggagtgtgcctatcaatacgacgatgacggctaccagagctactgcaccatctgttgcggcggaagagaggtgctgatgtgtggaaataacaactgctgccggtgcttctgcgtggaatgcgtggacctgctggtgggccccggcgccgcccaggccgctattaaggaagatccttggaactgctacatgtgcggccacaagggcacatacggcctgctgagacggagagaggactggcctagcagactgcagatgttcttcgccaataaccacgaccaggagttcgacccccctaaggtgtaccctcccgtccccgccgagaagagaaagcccatccgggtcctgagcctgttcgatggcatcgccaccggtctgctggtgctgaaggacctgggcatccaggtggataggtacattgcctccgaggtgtgcgaggactccatcaccgtgggaatggtgcgtcatcagggcaagatcatgtacgtgggcgacgtgcggagcgtgacacagaagcatatccaggagtggggccctttcgacctggtgatcggcggcagcccttgcaatgacctgagcatcgtgaacccagcccggaagggcctgtacgagggaaccggcagactgttcttcgagttttacagactgctgcacgacgcccggcctaaggaaggcgacgaccggcccttcttttggctgttcgagaatgtggtggccatgggagtcagcgacaagcgggatattagccggttcctggagagcaaccccgtgatgatcgatgccaaggaagtgagcgccgcccaccgggccagatacttctggggcaatctgcctggcatgaacagacccctggccagcaccgtgaacgacaagctggagctgcaggagtgcctggagcacggccggatcgccaagttcagcaaggtgagaaccatcaccacccgaagcaacagcatcaaacaaggcaaggaccagcactttcctgtgttcatgaacgagaaggaggacatcctgtggtgtaccgagatggagagagtgttcgggttcccagtccactacacagatgtcagcaacatgtctagactggccagacagagactgctgggaagaagctggtccgtccctgtgatcagacacctgttcgcccctctgaaggagtacttcgcctgcgtgagcagcggcaacagcaacgccaacagccggggccccagcttctctagcggcctggtgccactgtccctgagagggagccacatgggccccatggagatctacaaaaccgtgagcgcctggaagcggcagcctgtgcgcgtgctgagcctgtttcggaatatcgataaagtcctgaaaagcctgggattcctggagagcggctctggctccggcggtggcaccctgaagtacgtggaggatgtgacaaacgtggtcagacgggatgtggagaagtggggccccttcgatctggtgtacggcagcacccaacccctgggcagctcttgtgaccggtgccctggctggtacatgtttcagttccaccggatcctgcagtacgccctgccgagacaggagtcccagcggccattcttttggattttcatggacaacttgctgctgaccgaggatgaccaggaaactaccactcggttcctgcagaccgaagccgtgaccctgcaggacgtgagaggccgggactaccagaacgccatgcgggtgtggtccaacatccctggactgaaaagcaagcacgcacctctgacccctaaagaagaggagtacctgcaggcccaggtgcggagcagaagcaagctggacgcccctaaggtggatctgctggtgaagaattgcctcctgcccctgagagagtacttcaagtatttcagccagaatagtctgcccctgggaggcagcggcggcggcagcaaggcccccgtgaccttcggcgacctggccatctacttcagccaggaggagtgggagtggctgagccccatccagaaggacctgtacgaggacgtgatgctggagaactacaggaacctggtgagcctgggcctgagcttcaggaggcccaacgtgatcaccctgctggagaagggcaaggccccctggatggtggagcccgtgaggaggaggagggcccccggctggaccaccatgatgggcggcccaagcagcggcgcccctcctcccagcggcggcagcccagccggctccccaacctctaccgaggagggcacctctgagtccgccacccccgagagcggccctggcacctccaccgagcccagcgagggcagcgcacccggcagccctgccggcagccccacctccacagaggagggaaccagcaccgagcccagcgaaggcagcgccccaggcaccagcaccgagcctagtgagcaggagattaaacggatcaacaagatcagaagaagacttgtgaaagacagcaacaccaagaaggccggcaagacaggccccatgaaaaccctgctggttagagtgatgacacccgatctgagagagcggctggaaaacctgagaaagaagcctgaaaatatcccccagcccatcagcaatacatctagagccaacctgaataagctgctgaccgattacaccgaaatgaagaaggcgatcctgcatgtgtactgggaagagttccagaaggaccctgtgggcctgatgagccgggtggcccagcctgccagcaagaagatcgatcagaacaagctgaaacctgagatggacgagaagggcaacctgaccaccgccggctttgcctgctctcagtgtggccagcccctgttcgtgtacaagctggagcaggtgtctgagaagggcaaggcttacaccaactacttcggacggtgcaatgtggccgagcacgaaaagctgatcctgctggcccagctgaagcccgagaaggatagcgacgaagccgtgacatatagcctgggaaagtttgggcagagggccctggatttctacagcattcatgtgaccaaggagtccacccaccccgtgaagcccctggcccagatcgccggaaacagatacgcctccggacctgtgggaaaggccctgagcgacgcatgtatgggcacaatcgcctccttcctgtctaagtaccaggacatcatcatcgaacaccagaaggtggtgaagggcaaccagaagagactggagagcctgcgggagctggccggcaaggaaaacctggaataccctagcgtgaccctgccacctcagcctcacaccaaggagggcgttgatgcctacaacgaagtgatcgcccgggtgcgaatgtgggtgaacctgaacctgtggcagaagctgaagctaagcagagatgatgccaagcctctgctgagactgaagggattcccttcctttcctctggtcgagagacaggccaacgaagtggactggtgggacatggtgtgtaacgtgaagaagctgatcaacgagaaaaaggaggatggcaaggtgttttggcagaatctggctggctacaagagacaggaagccctgagaccatacctgagcagcgaggaagatcggaagaagggaaagaaattcgctcggtaccagctgggcgacctgctgctgcacctggaaaagaagcacggcgaggactggggaaaggtgtacgacgaggcctgggagcggattgacaagaaagtggaaggcctgagcaagcacatcaagctggaagaggaacggagaagcgaggacgcccagagcaaggccgccctgaccgactggctgcgggctaaggccagcttcgtgatcgagggcctgaaggaggccgacaaggacgagttctgcagatgcgagctgaagctgcagaagtggtacggggacctgcggggaaagcccttcgccatcgaagccgagaacagcatcctggacatcagcggcttcagcaagcagtacaactgtgccttcatctggcagaaggacggcgtgaagaagctgaacctgtacctgatcatcaactacttcaagggcggcaagctgcggttcaagaagatcaaacctgaagccttcgaagccaacagattctacaccgtgatcaacaaaaagagcggcgagatcgtgcccatggaggtgaacttcaacttcgacgaccccaacctgatcatcctgcctctggcctttggcaagagacagggcagagaattcatctggaacgacctgctgtccctggaaaccggcagcctgaagctggccaacggaagagtgatcgagaagacactgtacaacagaagaacccggcaggatgagcctgccctgttcgtggccctgaccttcgagcggcgggaggtcctggactcctccaatatcaaaccaatgaacctgatcggcgtggcaagaggcgaaaacatccccgccgtgatcgccctgaccgaccccgagggctgcccactgagccggtttaaggatagcctgggaaacccaacccacatcctgagaatcggcgagagctataaggagaagcagcggaccatccaggccaagaaggaggtggagcagcggagagccggcggctacagccggaagtacgccagcaaagccaagaatctggcagacgatatggtgagaaacaccgctagagatctgctgtactacgccgtgacccaggatgccatgctgatcttcgccaacctgagccggggcttcggccggcagggcaagcggaccttcatggccgagagacagtacacacggatggaggactggctgaccgccaagctggcctacgagggcctgagcaagacctacctgtccaagacactggcccagtacacctccaagacatgcagcaactgtgggtttaccatcaccagcgccgactacgacagggtgctggagaagctgaagaagacagcaacaggctggatgaccacaattaacggcaaggagctgaaggtggagggccagattacctactacaacagatacaagagacagaacgtagtcaaggacctgtccgtcgagctggatagactgagcgaagaatctgtgaacaacgacatctcctcctggacaaagggcagaagcggagaagctctgagcctcctgaagaaaagattctcccatagacccgtgcaggagaagttcgtgtgcctgaactgcggcttcgagacacacgcagccgagcaagccgccctgaacatcgccagatcctggctgttcctgcggagccaggagtacaagaaataccagacaaacaagacaaccggcaacaccgataagagagccttcgtcgagacctggcagtccttttaccggaagaagcttaaggaggtgtggaaacctgccgtgcggtctggcggatctggcggaggctccaccagccccaagaaaaagagaaaagtctaagctgccttctgcggggcttgccttctggccatgcccttcttctctcccttgcacctgtacctcttggtctttgaataaagcctgagtaggaaggctagcaaaaaaaaaaaaaaaaaaaaaaaaaaaaaaaaaaaaaaaaaaaaaaaaaaaaaaaaaaaaaaaaaaaaaaaaaaaaaaaa

SEQ ID NO: 12181 - RNA, 5785 nt, synthetic construct
  source 1..5785: mol_type = other RNA
aggaaataagagagaaaagaagagtaagaagaaatataagagccaccatggcccctaagaagaagcgtaaagtgagccggatggaacgcctcgtctacgaggtgcggcagaagtgcagaaacatcgaggacatctgcatctcctgcggatctctgaacgtgaccctggagcacccactgttcatcggcggcatgtgccagaactgtaaaaactgttttctggagtgtgcctatcaatacgacgatgacggctaccagagctactgcaccatctgttgcggcggaagagaggtgctgatgtgtggaaataacaactgctgccggtgcttctgcgtggaatgcgtggacctgctggtgggccccggcgccgcccaggccgctattaaggaagatccttggaactgctacatgtgcggccacaagggcacatacggcctgctgagacggagagaggactggcctagcagactgcagatgttcttcgccaataaccacgaccaggagttcgacccccctaaggtgtaccctcccgtccccgccgagaagagaaagcccatccgggtcctgagcctgttcgatggcatcgccaccggtctgctggtgctgaaggacctgggcatccaggtggataggtacattgcctccgaggtgtgcgaggactccatcaccgtgggaatggtgcgtcatcagggcaagatcatgtacgtgggcgacgtgcggagcgtgacacagaagcatatccaggagtggggccctttcgacctggtgatcggcggcagcccttgcaatgacctgagcatcgtgaacccagcccggaagggcctgtacgagggaaccggcagactgttcttcgagttttacagactgctgcacgacgcccggcctaaggaaggcgacgaccggcccttcttttggctgttcgagaatgtggtggccatgggagtcagcgacaagcgggatattagccggttcctggagagcaaccccgtgatgatcgatgccaaggaagtgagcgccgcccaccgggccagatacttctggggcaatctgcctggcatgaacagacccctggccagcaccgtgaacgacaagctggagctgcaggagtgcctggagcacggccggatcgccaagttcagcaaggtgagaaccatcaccacccgaagcaacagcatcaaacaaggcaaggaccagcactttcctgtgttcatgaacgagaaggaggacatcctgtggtgtaccgagatggagagagtgttcgggttcccagtccactacacagatgtcagcaacatgtctagactggccagacagagactgctgggaagaagctggtccgtccctgtgatcagacacctgttcgcccctctgaaggagtacttcgcctgcgtgagcagcggcaacagcaacgccaacagccggggccccagcttctctagcggcctggtgccactgtccctgagagggagccacatgggccccatggagatctacaaaaccgtgagcgcctggaagcggcagcctgtgcgcgtgctgagcctgtttcggaatatcgataaagtcctgaaaagcctgggattcctggagagcggctctggctccggcggtggcaccctgaagtacgtggaggatgtgacaaacgtggtcagacgggatgtggagaagtggggccccttcgatctggtgtacggcagcacccaacccctgggcagctcttgtgaccggtgccctggctggtacatgtttcagttccaccggatcctgcagtacgccctgccgagacaggagtcccagcggccattcttttggattttcatggacaacttgctgctgaccgaggatgaccaggaaactaccactcggttcctgcagaccgaagccgtgaccctgcaggacgtgagaggccgggactaccagaacgccatgcgggtgtggtccaacatccctggactgaaaagcaagcacgcacctctgacccctaaagaagaggagtacctgcaggcccaggtgcggagcagaagcaagctggacgcccctaaggtggatctgctggtgaagaattgcctcctgcccctgagagagtacttcaagtatttcagccagaatagtctgcccctgggaggcagcggcggcggcttccaggaggccgtgaccttcaaggacgtggccgtggtgttcaccgaggaggagctgggcctgctggaccccccccagaggaagctgtacagggaggtgatgctggagaacttcaggaacctggtgagcgtgggccacagcagcagcaagcccgacgtgatcagccagctggagagggaggagaagctgtgcgtgaaggagatccacacccagaggggcaggcacagcggcggcaggaaccagggcggcccaagcagcggcgcccctcctcccagcggcggcagcccagccggctccccaacctctaccgaggagggcacctctgagtccgccacccccgagagcggccctggcacctccaccgagcccagcgagggcagcgcacccggcagccctgccggcagccccacctccacagaggagggaaccagcaccgagcccagcgaaggcagcgccccaggcaccagcaccgagcctagtgagcaggagattaaacggatcaacaagatcagaagaagacttgtgaaagacagcaacaccaagaaggccggcaagacaggccccatgaaaaccctgctggttagagtgatgacacccgatctgagagagcggctggaaaacctgagaaagaagcctgaaaatatcccccagcccatcagcaatacatctagagccaacctgaataagctgctgaccgattacaccgaaatgaagaaggcgatcctgcatgtgtactgggaagagttccagaaggaccctgtgggcctgatgagccgggtggcccagcctgccagcaagaagatcgatcagaacaagctgaaacctgagatggacgagaagggcaacctgaccaccgccggctttgcctgctctcagtgtggccagcccctgttcgtgtacaagctggagcaggtgtctgagaagggcaaggcttacaccaactacttcggacggtgcaatgtggccgagcacgaaaagctgatcctgctggcccagctgaagcccgagaaggatagcgacgaagccgtgacatatagcctgggaaagtttgggcagagggccctggatttctacagcattcatgtgaccaaggagtccacccaccccgtgaagcccctggcccagatcgccggaaacagatacgcctccggacctgtgggaaaggccctgagcgacgcatgtatgggcacaatcgcctccttcctgtctaagtaccaggacatcatcatcgaacaccagaaggtggtgaagggcaaccagaagagactggagagcctgcgggagctggccggcaaggaaaacctggaataccctagcgtgaccctgccacctcagcctcacaccaaggagggcgttgatgcctacaacgaagtgatcgcccgggtgcgaatgtgggtgaacctgaacctgtggcagaagctgaagctaagcagagatgatgccaagcctctgctgagactgaagggattcccttcctttcctctggtcgagagacaggccaacgaagtggactggtgggacatggtgtgtaacgtgaagaagctgatcaacgagaaaaaggaggatggcaaggtgttttggcagaatctggctggctacaagagacaggaagccctgagaccatacctgagcagcgaggaagatcggaagaagggaaagaaattcgctcggtaccagctgggcgacctgctgctgcacctggaaaagaagcacggcgaggactggggaaaggtgtacgacgaggcctgggagcggattgacaagaaagtggaaggcctgagcaagcacatcaagctggaagaggaacggagaagcgaggacgcccagagcaaggccgccctgaccgactggctgcgggctaaggccagcttcgtgatcgagggcctgaaggaggccgacaaggacgagttctgcagatgcgagctgaagctgcagaagtggtacggggacctgcggggaaagcccttcgccatcgaagccgagaacagcatcctggacatcagcggcttcagcaagcagtacaactgtgccttcatctggcagaaggacggcgtgaagaagctgaacctgtacctgatcatcaactacttcaagggcggcaagctgcggttcaagaagatcaaacctgaagccttcgaagccaacagattctacaccgtgatcaacaaaaagagcggcgagatcgtgcccatggaggtgaacttcaacttcgacgaccccaacctgatcatcctgcctctggcctttggcaagagacagggcagagaattcatctggaacgacctgctgtccctggaaaccggcagcctgaagctggccaacggaagagtgatcgagaagacactgtacaacagaagaacccggcaggatgagcctgccctgttcgtggccctgaccttcgagcggcgggaggtcctggactcctccaatatcaaaccaatgaacctgatcggcgtggcaagaggcgaaaacatccccgccgtgatcgccctgaccgaccccgagggctgcccactgagccggtttaaggatagcctgggaaacccaacccacatcctgagaatcggcgagagctataaggagaagcagcggaccatccaggccaagaaggaggtggagcagcggagagccggcggctacagccggaagtacgccagcaaagccaagaatctggcagacgatatggtgagaaacaccgctagagatctgctgtactacgccgtgacccaggatgccatgctgatcttcgccaacctgagccggggcttcggccggcagggcaagcggaccttcatggccgagagacagtacacacggatggaggactggctgaccgccaagctggcctacgagggcctgagcaagacctacctgtccaagacactggcccagtacacctccaagacatgcagcaactgtgggtttaccatcaccagcgccgactacgacagggtgctggagaagctgaagaagacagcaacaggctggatgaccacaattaacggcaaggagctgaaggtggagggccagattacctactacaacagatacaagagacagaacgtagtcaaggacctgtccgtcgagctggatagactgagcgaagaatctgtgaacaacgacatctcctcctggacaaagggcagaagcggagaagctctgagcctcctgaagaaaagattctcccatagacccgtgcaggagaagttcgtgtgcctgaactgcggcttcgagacacacgcagccgagcaagccgccctgaacatcgccagatcctggctgttcctgcggagccaggagtacaagaaataccagacaaacaagacaaccggcaacaccgataagagagccttcgtcgagacctggcagtccttttaccggaagaagcttaaggaggtgtggaaacctgccgtgcggtctggcggatctggcggaggctccaccagccccaagaaaaagagaaaagtctaagctgccttctgcggggcttgccttctggccatgcccttcttctctcccttgcacctgtacctcttggtctttgaataaagcctgagtaggaaggctagcaaaaaaaaaaaaaaaaaaaaaaaaaaaaaaaaaaaaaaaaaaaaaaaaaaaaaaaaaaaaaaaaaaaaaaaaaaaaaaaa

SEQ ID NO: 12182 - RNA, 5785 nt, synthetic construct
  source 1..5785: mol_type = other RNA
aggaaataagagagaaaagaagagtaagaagaaatataagagccaccatggcccctaagaagaagcgtaaagtgagccggatggaacgcctcgtctacgaggtgcggcagaagtgcagaaacatcgaggacatctgcatctcctgcggatctctgaacgtgaccctggagcacccactgttcatcggcggcatgtgccagaactgtaaaaactgttttctggagtgtgcctatcaatacgacgatgacggctaccagagctactgcaccatctgttgcggcggaagagaggtgctgatgtgtggaaataacaactgctgccggtgcttctgcgtggaatgcgtggacctgctggtgggccccggcgccgcccaggccgctattaaggaagatccttggaactgctacatgtgcggccacaagggcacatacggcctgctgagacggagagaggactggcctagcagactgcagatgttcttcgccaataaccacgaccaggagttcgacccccctaaggtgtaccctcccgtccccgccgagaagagaaagcccatccgggtcctgagcctgttcgatggcatcgccaccggtctgctggtgctgaaggacctgggcatccaggtggataggtacattgcctccgaggtgtgcgaggactccatcaccgtgggaatggtgcgtcatcagggcaagatcatgtacgtgggcgacgtgcggagcgtgacacagaagcatatccaggagtggggccctttcgacctggtgatcggcggcagcccttgcaatgacctgagcatcgtgaacccagcccggaagggcctgtacgagggaaccggcagactgttcttcgagttttacagactgctgcacgacgcccggcctaaggaaggcgacgaccggcccttcttttggctgttcgagaatgtggtggccatgggagtcagcgacaagcgggatattagccggttcctggagagcaaccccgtgatgatcgatgccaaggaagtgagcgccgcccaccgggccagatacttctggggcaatctgcctggcatgaacagacccctggccagcaccgtgaacgacaagctggagctgcaggagtgcctggagcacggccggatcgccaagttcagcaaggtgagaaccatcaccacccgaagcaacagcatcaaacaaggcaaggaccagcactttcctgtgttcatgaacgagaaggaggacatcctgtggtgtaccgagatggagagagtgttcgggttcccagtccactacacagatgtcagcaacatgtctagactggccagacagagactgctgggaagaagctggtccgtccctgtgatcagacacctgttcgcccctctgaaggagtacttcgcctgcgtgagcagcggcaacagcaacgccaacagccggggccccagcttctctagcggcctggtgccactgtccctgagagggagccacatgggccccatggagatctacaaaaccgtgagcgcctggaagcggcagcctgtgcgcgtgctgagcctgtttcggaatatcgataaagtcctgaaaagcctgggattcctggagagcggctctggctccggcggtggcaccctgaagtacgtggaggatgtgacaaacgtggtcagacgggatgtggagaagtggggccccttcgatctggtgtacggcagcacccaacccctgggcagctcttgtgaccggtgccctggctggtacatgtttcagttccaccggatcctgcagtacgccctgccgagacaggagtcccagcggccattcttttggattttcatggacaacttgctgctgaccgaggatgaccaggaaactaccactcggttcctgcagaccgaagccgtgaccctgcaggacgtgagaggccgggactaccagaacgccatgcgggtgtggtccaacatccctggactgaaaagcaagcacgcacctctgacccctaaagaagaggagtacctgcaggcccaggtgcggagcagaagcaagctggacgcccctaaggtggatctgctggtgaagaattgcctcctgcccctgagagagtacttcaagtatttcagccagaatagtctgcccctgggaggcagcggcggcggcaggcaggccttcctggccttcggcgacgtgaccgtggacttcacccagaaggagtggaggctgctgagccccgcccagagggccctgtacagggaggtgaccctggagaactacagccacctggtgagcctgggcatcctgcacagcaagcccgagctgatcaggaggctggagcagggcgaggtgccctggggcgaggagaggaggaggaggcccggcccctgcgccggcatctacgccgagggcggcccaagcagcggcgcccctcctcccagcggcggcagcccagccggctccccaacctctaccgaggagggcacctctgagtccgccacccccgagagcggccctggcacctccaccgagcccagcgagggcagcgcacccggcagccctgccggcagccccacctccacagaggagggaaccagcaccgagcccagcgaaggcagcgccccaggcaccagcaccgagcctagtgagcaggagattaaacggatcaacaagatcagaagaagacttgtgaaagacagcaacaccaagaaggccggcaagacaggccccatgaaaaccctgctggttagagtgatgacacccgatctgagagagcggctggaaaacctgagaaagaagcctgaaaatatcccccagcccatcagcaatacatctagagccaacctgaataagctgctgaccgattacaccgaaatgaagaaggcgatcctgcatgtgtactgggaagagttccagaaggaccctgtgggcctgatgagccgggtggcccagcctgccagcaagaagatcgatcagaacaagctgaaacctgagatggacgagaagggcaacctgaccaccgccggctttgcctgctctcagtgtggccagcccctgttcgtgtacaagctggagcaggtgtctgagaagggcaaggcttacaccaactacttcggacggtgcaatgtggccgagcacgaaaagctgatcctgctggcccagctgaagcccgagaaggatagcgacgaagccgtgacatatagcctgggaaagtttgggcagagggccctggatttctacagcattcatgtgaccaaggagtccacccaccccgtgaagcccctggcccagatcgccggaaacagatacgcctccggacctgtgggaaaggccctgagcgacgcatgtatgggcacaatcgcctccttcctgtctaagtaccaggacatcatcatcgaacaccagaaggtggtgaagggcaaccagaagagactggagagcctgcgggagctggccggcaaggaaaacctggaataccctagcgtgaccctgccacctcagcctcacaccaaggagggcgttgatgcctacaacgaagtgatcgcccgggtgcgaatgtgggtgaacctgaacctgtggcagaagctgaagctaagcagagatgatgccaagcctctgctgagactgaagggattcccttcctttcctctggtcgagagacaggccaacgaagtggactggtgggacatggtgtgtaacgtgaagaagctgatcaacgagaaaaaggaggatggcaaggtgttttggcagaatctggctggctacaagagacaggaagccctgagaccatacctgagcagcgaggaagatcggaagaagggaaagaaattcgctcggtaccagctgggcgacctgctgctgcacctggaaaagaagcacggcgaggactggggaaaggtgtacgacgaggcctgggagcggattgacaagaaagtggaaggcctgagcaagcacatcaagctggaagaggaacggagaagcgaggacgcccagagcaaggccgccctgaccgactggctgcgggctaaggccagcttcgtgatcgagggcctgaaggaggccgacaaggacgagttctgcagatgcgagctgaagctgcagaagtggtacggggacctgcggggaaagcccttcgccatcgaagccgagaacagcatcctggacatcagcggcttcagcaagcagtacaactgtgccttcatctggcagaaggacggcgtgaagaagctgaacctgtacctgatcatcaactacttcaagggcggcaagctgcggttcaagaagatcaaacctgaagccttcgaagccaacagattctacaccgtgatcaacaaaaagagcggcgagatcgtgcccatggaggtgaacttcaacttcgacgaccccaacctgatcatcctgcctctggcctttggcaagagacagggcagagaattcatctggaacgacctgctgtccctggaaaccggcagcctgaagctggccaacggaagagtgatcgagaagacactgtacaacagaagaacccggcaggatgagcctgccctgttcgtggccctgaccttcgagcggcgggaggtcctggactcctccaatatcaaaccaatgaacctgatcggcgtggcaagaggcgaaaacatccccgccgtgatcgccctgaccgaccccgagggctgcccactgagccggtttaaggatagcctgggaaacccaacccacatcctgagaatcggcgagagctataaggagaagcagcggaccatccaggccaagaaggaggtggagcagcggagagccggcggctacagccggaagtacgccagcaaagccaagaatctggcagacgatatggtgagaaacaccgctagagatctgctgtactacgccgtgacccaggatgccatgctgatcttcgccaacctgagccggggcttcggccggcagggcaagcggaccttcatggccgagagacagtacacacggatggaggactggctgaccgccaagctggcctacgagggcctgagcaagacctacctgtccaagacactggcccagtacacctccaagacatgcagcaactgtgggtttaccatcaccagcgccgactacgacagggtgctggagaagctgaagaagacagcaacaggctggatgaccacaattaacggcaaggagctgaaggtggagggccagattacctactacaacagatacaagagacagaacgtagtcaaggacctgtccgtcgagctggatagactgagcgaagaatctgtgaacaacgacatctcctcctggacaaagggcagaagcggagaagctctgagcctcctgaagaaaagattctcccatagacccgtgcaggagaagttcgtgtgcctgaactgcggcttcgagacacacgcagccgagcaagccgccctgaacatcgccagatcctggctgttcctgcggagccaggagtacaagaaataccagacaaacaagacaaccggcaacaccgataagagagccttcgtcgagacctggcagtccttttaccggaagaagcttaaggaggtgtggaaacctgccgtgcggtctggcggatctggcggaggctccaccagccccaagaaaaagagaaaagtctaagctgccttctgcggggcttgccttctggccatgcccttcttctctcccttgcacctgtacctcttggtctttgaataaagcctgagtaggaaggctagcaaaaaaaaaaaaaaaaaaaaaaaaaaaaaaaaaaaaaaaaaaaaaaaaaaaaaaaaaaaaaaaaaaaaaaaaaaaaaaaa

SEQ ID NO: 12183 - RNA, 5785 nt, synthetic construct
  source 1..5785: mol_type = other RNA
aggaaataagagagaaaagaagagtaagaagaaatataagagccaccatggcccctaagaagaagcgtaaagtgagccggatggaacgcctcgtctacgaggtgcggcagaagtgcagaaacatcgaggacatctgcatctcctgcggatctctgaacgtgaccctggagcacccactgttcatcggcggcatgtgccagaactgtaaaaactgttttctggagtgtgcctatcaatacgacgatgacggctaccagagctactgcaccatctgttgcggcggaagagaggtgctgatgtgtggaaataacaactgctgccggtgcttctgcgtggaatgcgtggacctgctggtgggccccggcgccgcccaggccgctattaaggaagatccttggaactgctacatgtgcggccacaagggcacatacggcctgctgagacggagagaggactggcctagcagactgcagatgttcttcgccaataaccacgaccaggagttcgacccccctaaggtgtaccctcccgtccccgccgagaagagaaagcccatccgggtcctgagcctgttcgatggcatcgccaccggtctgctggtgctgaaggacctgggcatccaggtggataggtacattgcctccgaggtgtgcgaggactccatcaccgtgggaatggtgcgtcatcagggcaagatcatgtacgtgggcgacgtgcggagcgtgacacagaagcatatccaggagtggggccctttcgacctggtgatcggcggcagcccttgcaatgacctgagcatcgtgaacccagcccggaagggcctgtacgagggaaccggcagactgttcttcgagttttacagactgctgcacgacgcccggcctaaggaaggcgacgaccggcccttcttttggctgttcgagaatgtggtggccatgggagtcagcgacaagcgggatattagccggttcctggagagcaaccccgtgatgatcgatgccaaggaagtgagcgccgcccaccgggccagatacttctggggcaatctgcctggcatgaacagacccctggccagcaccgtgaacgacaagctggagctgcaggagtgcctggagcacggccggatcgccaagttcagcaaggtgagaaccatcaccacccgaagcaacagcatcaaacaaggcaaggaccagcactttcctgtgttcatgaacgagaaggaggacatcctgtggtgtaccgagatggagagagtgttcgggttcccagtccactacacagatgtcagcaacatgtctagactggccagacagagactgctgggaagaagctggtccgtccctgtgatcagacacctgttcgcccctctgaaggagtacttcgcctgcgtgagcagcggcaacagcaacgccaacagccggggccccagcttctctagcggcctggtgccactgtccctgagagggagccacatgggccccatggagatctacaaaaccgtgagcgcctggaagcggcagcctgtgcgcgtgctgagcctgtttcggaatatcgataaagtcctgaaaagcctgggattcctggagagcggctctggctccggcggtggcaccctgaagtacgtggaggatgtgacaaacgtggtcagacgggatgtggagaagtggggccccttcgatctggtgtacggcagcacccaacccctgggcagctcttgtgaccggtgccctggctggtacatgtttcagttccaccggatcctgcagtacgccctgccgagacaggagtcccagcggccattcttttggattttcatggacaacttgctgctgaccgaggatgaccaggaaactaccactcggttcctgcagaccgaagccgtgaccctgcaggacgtgagaggccgggactaccagaacgccatgcgggtgtggtccaacatccctggactgaaaagcaagcacgcacctctgacccctaaagaagaggagtacctgcaggcccaggtgcggagcagaagcaagctggacgcccctaaggtggatctgctggtgaagaattgcctcctgcccctgagagagtacttcaagtatttcagccagaatagtctgcccctgggaggcagcggcggcggcccccaggagagcgtgaccttcaaggacgtggccgtggacttcacctgggaggagtggggctacctggacaccagccagaaggagctgtaccaggaggtgatgctggagaactacaggaacctggtgagcctgggcttcgtggtggccaagcccgacgtgatcagccagctggagcagggcgaggccccctggaggcccgagggcaggttccccaggagcaggcaccccgacagcgacaccaggggcggcccaagcagcggcgcccctcctcccagcggcggcagcccagccggctccccaacctctaccgaggagggcacctctgagtccgccacccccgagagcggccctggcacctccaccgagcccagcgagggcagcgcacccggcagccctgccggcagccccacctccacagaggagggaaccagcaccgagcccagcgaaggcagcgccccaggcaccagcaccgagcctagtgagcaggagattaaacggatcaacaagatcagaagaagacttgtgaaagacagcaacaccaagaaggccggcaagacaggccccatgaaaaccctgctggttagagtgatgacacccgatctgagagagcggctggaaaacctgagaaagaagcctgaaaatatcccccagcccatcagcaatacatctagagccaacctgaataagctgctgaccgattacaccgaaatgaagaaggcgatcctgcatgtgtactgggaagagttccagaaggaccctgtgggcctgatgagccgggtggcccagcctgccagcaagaagatcgatcagaacaagctgaaacctgagatggacgagaagggcaacctgaccaccgccggctttgcctgctctcagtgtggccagcccctgttcgtgtacaagctggagcaggtgtctgagaagggcaaggcttacaccaactacttcggacggtgcaatgtggccgagcacgaaaagctgatcctgctggcccagctgaagcccgagaaggatagcgacgaagccgtgacatatagcctgggaaagtttgggcagagggccctggatttctacagcattcatgtgaccaaggagtccacccaccccgtgaagcccctggcccagatcgccggaaacagatacgcctccggacctgtgggaaaggccctgagcgacgcatgtatgggcacaatcgcctccttcctgtctaagtaccaggacatcatcatcgaacaccagaaggtggtgaagggcaaccagaagagactggagagcctgcgggagctggccggcaaggaaaacctggaataccctagcgtgaccctgccacctcagcctcacaccaaggagggcgttgatgcctacaacgaagtgatcgcccgggtgcgaatgtgggtgaacctgaacctgtggcagaagctgaagctaagcagagatgatgccaagcctctgctgagactgaagggattcccttcctttcctctggtcgagagacaggccaacgaagtggactggtgggacatggtgtgtaacgtgaagaagctgatcaacgagaaaaaggaggatggcaaggtgttttggcagaatctggctggctacaagagacaggaagccctgagaccatacctgagcagcgaggaagatcggaagaagggaaagaaattcgctcggtaccagctgggcgacctgctgctgcacctggaaaagaagcacggcgaggactggggaaaggtgtacgacgaggcctgggagcggattgacaagaaagtggaaggcctgagcaagcacatcaagctggaagaggaacggagaagcgaggacgcccagagcaaggccgccctgaccgactggctgcgggctaaggccagcttcgtgatcgagggcctgaaggaggccgacaaggacgagttctgcagatgcgagctgaagctgcagaagtggtacggggacctgcggggaaagcccttcgccatcgaagccgagaacagcatcctggacatcagcggcttcagcaagcagtacaactgtgccttcatctggcagaaggacggcgtgaagaagctgaacctgtacctgatcatcaactacttcaagggcggcaagctgcggttcaagaagatcaaacctgaagccttcgaagccaacagattctacaccgtgatcaacaaaaagagcggcgagatcgtgcccatggaggtgaacttcaacttcgacgaccccaacctgatcatcctgcctctggcctttggcaagagacagggcagagaattcatctggaacgacctgctgtccctggaaaccggcagcctgaagctggccaacggaagagtgatcgagaagacactgtacaacagaagaacccggcaggatgagcctgccctgttcgtggccctgaccttcgagcggcgggaggtcctggactcctccaatatcaaaccaatgaacctgatcggcgtggcaagaggcgaaaacatccccgccgtgatcgccctgaccgaccccgagggctgcccactgagccggtttaaggatagcctgggaaacccaacccacatcctgagaatcggcgagagctataaggagaagcagcggaccatccaggccaagaaggaggtggagcagcggagagccggcggctacagccggaagtacgccagcaaagccaagaatctggcagacgatatggtgagaaacaccgctagagatctgctgtactacgccgtgacccaggatgccatgctgatcttcgccaacctgagccggggcttcggccggcagggcaagcggaccttcatggccgagagacagtacacacggatggaggactggctgaccgccaagctggcctacgagggcctgagcaagacctacctgtccaagacactggcccagtacacctccaagacatgcagcaactgtgggtttaccatcaccagcgccgactacgacagggtgctggagaagctgaagaagacagcaacaggctggatgaccacaattaacggcaaggagctgaaggtggagggccagattacctactacaacagatacaagagacagaacgtagtcaaggacctgtccgtcgagctggatagactgagcgaagaatctgtgaacaacgacatctcctcctggacaaagggcagaagcggagaagctctgagcctcctgaagaaaagattctcccatagacccgtgcaggagaagttcgtgtgcctgaactgcggcttcgagacacacgcagccgagcaagccgccctgaacatcgccagatcctggctgttcctgcggagccaggagtacaagaaataccagacaaacaagacaaccggcaacaccgataagagagccttcgtcgagacctggcagtccttttaccggaagaagcttaaggaggtgtggaaacctgccgtgcggtctggcggatctggcggaggctccaccagccccaagaaaaagagaaaagtctaagctgccttctgcggggcttgccttctggccatgcccttcttctctcccttgcacctgtacctcttggtctttgaataaagcctgagtaggaaggctagcaaaaaaaaaaaaaaaaaaaaaaaaaaaaaaaaaaaaaaaaaaaaaaaaaaaaaaaaaaaaaaaaaaaaaaaaaaaaaaaa

SEQ ID NO: 12184 - RNA, 5785 nt, synthetic construct
  source 1..5785: mol_type = other RNA
aggaaataagagagaaaagaagagtaagaagaaatataagagccaccatggcccctaagaagaagcgtaaagtgagccggatggaacgcctcgtctacgaggtgcggcagaagtgcagaaacatcgaggacatctgcatctcctgcggatctctgaacgtgaccctggagcacccactgttcatcggcggcatgtgccagaactgtaaaaactgttttctggagtgtgcctatcaatacgacgatgacggctaccagagctactgcaccatctgttgcggcggaagagaggtgctgatgtgtggaaataacaactgctgccggtgcttctgcgtggaatgcgtggacctgctggtgggccccggcgccgcccaggccgctattaaggaagatccttggaactgctacatgtgcggccacaagggcacatacggcctgctgagacggagagaggactggcctagcagactgcagatgttcttcgccaataaccacgaccaggagttcgacccccctaaggtgtaccctcccgtccccgccgagaagagaaagcccatccgggtcctgagcctgttcgatggcatcgccaccggtctgctggtgctgaaggacctgggcatccaggtggataggtacattgcctccgaggtgtgcgaggactccatcaccgtgggaatggtgcgtcatcagggcaagatcatgtacgtgggcgacgtgcggagcgtgacacagaagcatatccaggagtggggccctttcgacctggtgatcggcggcagcccttgcaatgacctgagcatcgtgaacccagcccggaagggcctgtacgagggaaccggcagactgttcttcgagttttacagactgctgcacgacgcccggcctaaggaaggcgacgaccggcccttcttttggctgttcgagaatgtggtggccatgggagtcagcgacaagcgggatattagccggttcctggagagcaaccccgtgatgatcgatgccaaggaagtgagcgccgcccaccgggccagatacttctggggcaatctgcctggcatgaacagacccctggccagcaccgtgaacgacaagctggagctgcaggagtgcctggagcacggccggatcgccaagttcagcaaggtgagaaccatcaccacccgaagcaacagcatcaaacaaggcaaggaccagcactttcctgtgttcatgaacgagaaggaggacatcctgtggtgtaccgagatggagagagtgttcgggttcccagtccactacacagatgtcagcaacatgtctagactggccagacagagactgctgggaagaagctggtccgtccctgtgatcagacacctgttcgcccctctgaaggagtacttcgcctgcgtgagcagcggcaacagcaacgccaacagccggggccccagcttctctagcggcctggtgccactgtccctgagagggagccacatgggccccatggagatctacaaaaccgtgagcgcctggaagcggcagcctgtgcgcgtgctgagcctgtttcggaatatcgataaagtcctgaaaagcctgggattcctggagagcggctctggctccggcggtggcaccctgaagtacgtggaggatgtgacaaacgtggtcagacgggatgtggagaagtggggccccttcgatctggtgtacggcagcacccaacccctgggcagctcttgtgaccggtgccctggctggtacatgtttcagttccaccggatcctgcagtacgccctgccgagacaggagtcccagcggccattcttttggattttcatggacaacttgctgctgaccgaggatgaccaggaaactaccactcggttcctgcagaccgaagccgtgaccctgcaggacgtgagaggccgggactaccagaacgccatgcgggtgtggtccaacatccctggactgaaaagcaagcacgcacctctgacccctaaagaagaggagtacctgcaggcccaggtgcggagcagaagcaagctggacgcccctaaggtggatctgctggtgaagaattgcctcctgcccctgagagagtacttcaagtatttcagccagaatagtctgcccctgggaggcagcggcggcggcccccagaagctggtgaccttcgaggacgtggccgtgtacttcacccccaccgagtgggacggcctgagccccgcccagagggccctgtacagggacgtgatgctggagaactacggcaacgtggccagcctgggcttccccatcctgaagcccgccgtgatcagccagctggagggcggcggcgagctgggcatccccagcctgctggccgccggcgtgggcagcgacccccccggcctgtggggcggcccaagcagcggcgcccctcctcccagcggcggcagcccagccggctccccaacctctaccgaggagggcacctctgagtccgccacccccgagagcggccctggcacctccaccgagcccagcgagggcagcgcacccggcagccctgccggcagccccacctccacagaggagggaaccagcaccgagcccagcgaaggcagcgccccaggcaccagcaccgagcctagtgagcaggagattaaacggatcaacaagatcagaagaagacttgtgaaagacagcaacaccaagaaggccggcaagacaggccccatgaaaaccctgctggttagagtgatgacacccgatctgagagagcggctggaaaacctgagaaagaagcctgaaaatatcccccagcccatcagcaatacatctagagccaacctgaataagctgctgaccgattacaccgaaatgaagaaggcgatcctgcatgtgtactgggaagagttccagaaggaccctgtgggcctgatgagccgggtggcccagcctgccagcaagaagatcgatcagaacaagctgaaacctgagatggacgagaagggcaacctgaccaccgccggctttgcctgctctcagtgtggccagcccctgttcgtgtacaagctggagcaggtgtctgagaagggcaaggcttacaccaactacttcggacggtgcaatgtggccgagcacgaaaagctgatcctgctggcccagctgaagcccgagaaggatagcgacgaagccgtgacatatagcctgggaaagtttgggcagagggccctggatttctacagcattcatgtgaccaaggagtccacccaccccgtgaagcccctggcccagatcgccggaaacagatacgcctccggacctgtgggaaaggccctgagcgacgcatgtatgggcacaatcgcctccttcctgtctaagtaccaggacatcatcatcgaacaccagaaggtggtgaagggcaaccagaagagactggagagcctgcgggagctggccggcaaggaaaacctggaataccctagcgtgaccctgccacctcagcctcacaccaaggagggcgttgatgcctacaacgaagtgatcgcccgggtgcgaatgtgggtgaacctgaacctgtggcagaagctgaagctaagcagagatgatgccaagcctctgctgagactgaagggattcccttcctttcctctggtcgagagacaggccaacgaagtggactggtgggacatggtgtgtaacgtgaagaagctgatcaacgagaaaaaggaggatggcaaggtgttttggcagaatctggctggctacaagagacaggaagccctgagaccatacctgagcagcgaggaagatcggaagaagggaaagaaattcgctcggtaccagctgggcgacctgctgctgcacctggaaaagaagcacggcgaggactggggaaaggtgtacgacgaggcctgggagcggattgacaagaaagtggaaggcctgagcaagcacatcaagctggaagaggaacggagaagcgaggacgcccagagcaaggccgccctgaccgactggctgcgggctaaggccagcttcgtgatcgagggcctgaaggaggccgacaaggacgagttctgcagatgcgagctgaagctgcagaagtggtacggggacctgcggggaaagcccttcgccatcgaagccgagaacagcatcctggacatcagcggcttcagcaagcagtacaactgtgccttcatctggcagaaggacggcgtgaagaagctgaacctgtacctgatcatcaactacttcaagggcggcaagctgcggttcaagaagatcaaacctgaagccttcgaagccaacagattctacaccgtgatcaacaaaaagagcggcgagatcgtgcccatggaggtgaacttcaacttcgacgaccccaacctgatcatcctgcctctggcctttggcaagagacagggcagagaattcatctggaacgacctgctgtccctggaaaccggcagcctgaagctggccaacggaagagtgatcgagaagacactgtacaacagaagaacccggcaggatgagcctgccctgttcgtggccctgaccttcgagcggcgggaggtcctggactcctccaatatcaaaccaatgaacctgatcggcgtggcaagaggcgaaaacatccccgccgtgatcgccctgaccgaccccgagggctgcccactgagccggtttaaggatagcctgggaaacccaacccacatcctgagaatcggcgagagctataaggagaagcagcggaccatccaggccaagaaggaggtggagcagcggagagccggcggctacagccggaagtacgccagcaaagccaagaatctggcagacgatatggtgagaaacaccgctagagatctgctgtactacgccgtgacccaggatgccatgctgatcttcgccaacctgagccggggcttcggccggcagggcaagcggaccttcatggccgagagacagtacacacggatggaggactggctgaccgccaagctggcctacgagggcctgagcaagacctacctgtccaagacactggcccagtacacctccaagacatgcagcaactgtgggtttaccatcaccagcgccgactacgacagggtgctggagaagctgaagaagacagcaacaggctggatgaccacaattaacggcaaggagctgaaggtggagggccagattacctactacaacagatacaagagacagaacgtagtcaaggacctgtccgtcgagctggatagactgagcgaagaatctgtgaacaacgacatctcctcctggacaaagggcagaagcggagaagctctgagcctcctgaagaaaagattctcccatagacccgtgcaggagaagttcgtgtgcctgaactgcggcttcgagacacacgcagccgagcaagccgccctgaacatcgccagatcctggctgttcctgcggagccaggagtacaagaaataccagacaaacaagacaaccggcaacaccgataagagagccttcgtcgagacctggcagtccttttaccggaagaagcttaaggaggtgtggaaacctgccgtgcggtctggcggatctggcggaggctccaccagccccaagaaaaagagaaaagtctaagctgccttctgcggggcttgccttctggccatgcccttcttctctcccttgcacctgtacctcttggtctttgaataaagcctgagtaggaaggctagcaaaaaaaaaaaaaaaaaaaaaaaaaaaaaaaaaaaaaaaaaaaaaaaaaaaaaaaaaaaaaaaaaaaaaaaaaaaaaaaa

SEQ ID NO: 12185 - RNA, 5785 nt, synthetic construct
  source 1..5785: mol_type = other RNA
aggaaataagagagaaaagaagagtaagaagaaatataagagccaccatggcccctaagaagaagcgtaaagtgagccggatggaacgcctcgtctacgaggtgcggcagaagtgcagaaacatcgaggacatctgcatctcctgcggatctctgaacgtgaccctggagcacccactgttcatcggcggcatgtgccagaactgtaaaaactgttttctggagtgtgcctatcaatacgacgatgacggctaccagagctactgcaccatctgttgcggcggaagagaggtgctgatgtgtggaaataacaactgctgccggtgcttctgcgtggaatgcgtggacctgctggtgggccccggcgccgcccaggccgctattaaggaagatccttggaactgctacatgtgcggccacaagggcacatacggcctgctgagacggagagaggactggcctagcagactgcagatgttcttcgccaataaccacgaccaggagttcgacccccctaaggtgtaccctcccgtccccgccgagaagagaaagcccatccgggtcctgagcctgttcgatggcatcgccaccggtctgctggtgctgaaggacctgggcatccaggtggataggtacattgcctccgaggtgtgcgaggactccatcaccgtgggaatggtgcgtcatcagggcaagatcatgtacgtgggcgacgtgcggagcgtgacacagaagcatatccaggagtggggccctttcgacctggtgatcggcggcagcccttgcaatgacctgagcatcgtgaacccagcccggaagggcctgtacgagggaaccggcagactgttcttcgagttttacagactgctgcacgacgcccggcctaaggaaggcgacgaccggcccttcttttggctgttcgagaatgtggtggccatgggagtcagcgacaagcgggatattagccggttcctggagagcaaccccgtgatgatcgatgccaaggaagtgagcgccgcccaccgggccagatacttctggggcaatctgcctggcatgaacagacccctggccagcaccgtgaacgacaagctggagctgcaggagtgcctggagcacggccggatcgccaagttcagcaaggtgagaaccatcaccacccgaagcaacagcatcaaacaaggcaaggaccagcactttcctgtgttcatgaacgagaaggaggacatcctgtggtgtaccgagatggagagagtgttcgggttcccagtccactacacagatgtcagcaacatgtctagactggccagacagagactgctgggaagaagctggtccgtccctgtgatcagacacctgttcgcccctctgaaggagtacttcgcctgcgtgagcagcggcaacagcaacgccaacagccggggccccagcttctctagcggcctggtgccactgtccctgagagggagccacatgggccccatggagatctacaaaaccgtgagcgcctggaagcggcagcctgtgcgcgtgctgagcctgtttcggaatatcgataaagtcctgaaaagcctgggattcctggagagcggctctggctccggcggtggcaccctgaagtacgtggaggatgtgacaaacgtggtcagacgggatgtggagaagtggggccccttcgatctggtgtacggcagcacccaacccctgggcagctcttgtgaccggtgccctggctggtacatgtttcagttccaccggatcctgcagtacgccctgccgagacaggagtcccagcggccattcttttggattttcatggacaacttgctgctgaccgaggatgaccaggaaactaccactcggttcctgcagaccgaagccgtgaccctgcaggacgtgagaggccgggactaccagaacgccatgcgggtgtggtccaacatccctggactgaaaagcaagcacgcacctctgacccctaaagaagaggagtacctgcaggcccaggtgcggagcagaagcaagctggacgcccctaaggtggatctgctggtgaagaattgcctcctgcccctgagagagtacttcaagtatttcagccagaatagtctgcccctgggaggcagcggcggcggcatggacagcgtggccttcgaggacgtggccgtgaacttcacccaggaggagtgggccctgctggaccccagccagaagaacctgtacagggaggtgatgcaggagaccgtgaggaacctggccagcatcggcaagaagtggaacaaccagtacatcgaggacgagcaccagaaccccaggaagaacctgaggaggctgatcggcgagaggctgagcgagagcaaggagagccaccagcacggcggcggcccaagcagcggcgcccctcctcccagcggcggcagcccagccggctccccaacctctaccgaggagggcacctctgagtccgccacccccgagagcggccctggcacctccaccgagcccagcgagggcagcgcacccggcagccctgccggcagccccacctccacagaggagggaaccagcaccgagcccagcgaaggcagcgccccaggcaccagcaccgagcctagtgagcaggagattaaacggatcaacaagatcagaagaagacttgtgaaagacagcaacaccaagaaggccggcaagacaggccccatgaaaaccctgctggttagagtgatgacacccgatctgagagagcggctggaaaacctgagaaagaagcctgaaaatatcccccagcccatcagcaatacatctagagccaacctgaataagctgctgaccgattacaccgaaatgaagaaggcgatcctgcatgtgtactgggaagagttccagaaggaccctgtgggcctgatgagccgggtggcccagcctgccagcaagaagatcgatcagaacaagctgaaacctgagatggacgagaagggcaacctgaccaccgccggctttgcctgctctcagtgtggccagcccctgttcgtgtacaagctggagcaggtgtctgagaagggcaaggcttacaccaactacttcggacggtgcaatgtggccgagcacgaaaagctgatcctgctggcccagctgaagcccgagaaggatagcgacgaagccgtgacatatagcctgggaaagtttgggcagagggccctggatttctacagcattcatgtgaccaaggagtccacccaccccgtgaagcccctggcccagatcgccggaaacagatacgcctccggacctgtgggaaaggccctgagcgacgcatgtatgggcacaatcgcctccttcctgtctaagtaccaggacatcatcatcgaacaccagaaggtggtgaagggcaaccagaagagactggagagcctgcgggagctggccggcaaggaaaacctggaataccctagcgtgaccctgccacctcagcctcacaccaaggagggcgttgatgcctacaacgaagtgatcgcccgggtgcgaatgtgggtgaacctgaacctgtggcagaagctgaagctaagcagagatgatgccaagcctctgctgagactgaagggattcccttcctttcctctggtcgagagacaggccaacgaagtggactggtgggacatggtgtgtaacgtgaagaagctgatcaacgagaaaaaggaggatggcaaggtgttttggcagaatctggctggctacaagagacaggaagccctgagaccatacctgagcagcgaggaagatcggaagaagggaaagaaattcgctcggtaccagctgggcgacctgctgctgcacctggaaaagaagcacggcgaggactggggaaaggtgtacgacgaggcctgggagcggattgacaagaaagtggaaggcctgagcaagcacatcaagctggaagaggaacggagaagcgaggacgcccagagcaaggccgccctgaccgactggctgcgggctaaggccagcttcgtgatcgagggcctgaaggaggccgacaaggacgagttctgcagatgcgagctgaagctgcagaagtggtacggggacctgcggggaaagcccttcgccatcgaagccgagaacagcatcctggacatcagcggcttcagcaagcagtacaactgtgccttcatctggcagaaggacggcgtgaagaagctgaacctgtacctgatcatcaactacttcaagggcggcaagctgcggttcaagaagatcaaacctgaagccttcgaagccaacagattctacaccgtgatcaacaaaaagagcggcgagatcgtgcccatggaggtgaacttcaacttcgacgaccccaacctgatcatcctgcctctggcctttggcaagagacagggcagagaattcatctggaacgacctgctgtccctggaaaccggcagcctgaagctggccaacggaagagtgatcgagaagacactgtacaacagaagaacccggcaggatgagcctgccctgttcgtggccctgaccttcgagcggcgggaggtcctggactcctccaatatcaaaccaatgaacctgatcggcgtggcaagaggcgaaaacatccccgccgtgatcgccctgaccgaccccgagggctgcccactgagccggtttaaggatagcctgggaaacccaacccacatcctgagaatcggcgagagctataaggagaagcagcggaccatccaggccaagaaggaggtggagcagcggagagccggcggctacagccggaagtacgccagcaaagccaagaatctggcagacgatatggtgagaaacaccgctagagatctgctgtactacgccgtgacccaggatgccatgctgatcttcgccaacctgagccggggcttcggccggcagggcaagcggaccttcatggccgagagacagtacacacggatggaggactggctgaccgccaagctggcctacgagggcctgagcaagacctacctgtccaagacactggcccagtacacctccaagacatgcagcaactgtgggtttaccatcaccagcgccgactacgacagggtgctggagaagctgaagaagacagcaacaggctggatgaccacaattaacggcaaggagctgaaggtggagggccagattacctactacaacagatacaagagacagaacgtagtcaaggacctgtccgtcgagctggatagactgagcgaagaatctgtgaacaacgacatctcctcctggacaaagggcagaagcggagaagctctgagcctcctgaagaaaagattctcccatagacccgtgcaggagaagttcgtgtgcctgaactgcggcttcgagacacacgcagccgagcaagccgccctgaacatcgccagatcctggctgttcctgcggagccaggagtacaagaaataccagacaaacaagacaaccggcaacaccgataagagagccttcgtcgagacctggcagtccttttaccggaagaagcttaaggaggtgtggaaacctgccgtgcggtctggcggatctggcggaggctccaccagccccaagaaaaagagaaaagtctaagctgccttctgcggggcttgccttctggccatgcccttcttctctcccttgcacctgtacctcttggtctttgaataaagcctgagtaggaaggctagcaaaaaaaaaaaaaaaaaaaaaaaaaaaaaaaaaaaaaaaaaaaaaaaaaaaaaaaaaaaaaaaaaaaaaaaaaaaaaaaa

SEQ ID NO: 12186 - RNA, 5785 nt, synthetic construct
  source 1..5785: mol_type = other RNA
aggaaataagagagaaaagaagagtaagaagaaatataagagccaccatggcccctaagaagaagcgtaaagtgagccggatggaacgcctcgtctacgaggtgcggcagaagtgcagaaacatcgaggacatctgcatctcctgcggatctctgaacgtgaccctggagcacccactgttcatcggcggcatgtgccagaactgtaaaaactgttttctggagtgtgcctatcaatacgacgatgacggctaccagagctactgcaccatctgttgcggcggaagagaggtgctgatgtgtggaaataacaactgctgccggtgcttctgcgtggaatgcgtggacctgctggtgggccccggcgccgcccaggccgctattaaggaagatccttggaactgctacatgtgcggccacaagggcacatacggcctgctgagacggagagaggactggcctagcagactgcagatgttcttcgccaataaccacgaccaggagttcgacccccctaaggtgtaccctcccgtccccgccgagaagagaaagcccatccgggtcctgagcctgttcgatggcatcgccaccggtctgctggtgctgaaggacctgggcatccaggtggataggtacattgcctccgaggtgtgcgaggactccatcaccgtgggaatggtgcgtcatcagggcaagatcatgtacgtgggcgacgtgcggagcgtgacacagaagcatatccaggagtggggccctttcgacctggtgatcggcggcagcccttgcaatgacctgagcatcgtgaacccagcccggaagggcctgtacgagggaaccggcagactgttcttcgagttttacagactgctgcacgacgcccggcctaaggaaggcgacgaccggcccttcttttggctgttcgagaatgtggtggccatgggagtcagcgacaagcgggatattagccggttcctggagagcaaccccgtgatgatcgatgccaaggaagtgagcgccgcccaccgggccagatacttctggggcaatctgcctggcatgaacagacccctggccagcaccgtgaacgacaagctggagctgcaggagtgcctggagcacggccggatcgccaagttcagcaaggtgagaaccatcaccacccgaagcaacagcatcaaacaaggcaaggaccagcactttcctgtgttcatgaacgagaaggaggacatcctgtggtgtaccgagatggagagagtgttcgggttcccagtccactacacagatgtcagcaacatgtctagactggccagacagagactgctgggaagaagctggtccgtccctgtgatcagacacctgttcgcccctctgaaggagtacttcgcctgcgtgagcagcggcaacagcaacgccaacagccggggccccagcttctctagcggcctggtgccactgtccctgagagggagccacatgggccccatggagatctacaaaaccgtgagcgcctggaagcggcagcctgtgcgcgtgctgagcctgtttcggaatatcgataaagtcctgaaaagcctgggattcctggagagcggctctggctccggcggtggcaccctgaagtacgtggaggatgtgacaaacgtggtcagacgggatgtggagaagtggggccccttcgatctggtgtacggcagcacccaacccctgggcagctcttgtgaccggtgccctggctggtacatgtttcagttccaccggatcctgcagtacgccctgccgagacaggagtcccagcggccattcttttggattttcatggacaacttgctgctgaccgaggatgaccaggaaactaccactcggttcctgcagaccgaagccgtgaccctgcaggacgtgagaggccgggactaccagaacgccatgcgggtgtggtccaacatccctggactgaaaagcaagcacgcacctctgacccctaaagaagaggagtacctgcaggcccaggtgcggagcagaagcaagctggacgcccctaaggtggatctgctggtgaagaattgcctcctgcccctgagagagtacttcaagtatttcagccagaatagtctgcccctgggaggcagcggcggcggcatgcacctgaccgcctggccccagaagagcgtgaccttcgaggacgtggccgtgtacttcacccaggccgagtgggacggcctgagccccgcccagaggaccctgtacagggacgtgatgctggagaactacggcaacgtggccagcctgggcttccccctgctgaagcccgccgtgatcagccagctggagggcggcggcgagctgggcggccccagccccctggccgccggcaggggcctgggcggcccaagcagcggcgcccctcctcccagcggcggcagcccagccggctccccaacctctaccgaggagggcacctctgagtccgccacccccgagagcggccctggcacctccaccgagcccagcgagggcagcgcacccggcagccctgccggcagccccacctccacagaggagggaaccagcaccgagcccagcgaaggcagcgccccaggcaccagcaccgagcctagtgagcaggagattaaacggatcaacaagatcagaagaagacttgtgaaagacagcaacaccaagaaggccggcaagacaggccccatgaaaaccctgctggttagagtgatgacacccgatctgagagagcggctggaaaacctgagaaagaagcctgaaaatatcccccagcccatcagcaatacatctagagccaacctgaataagctgctgaccgattacaccgaaatgaagaaggcgatcctgcatgtgtactgggaagagttccagaaggaccctgtgggcctgatgagccgggtggcccagcctgccagcaagaagatcgatcagaacaagctgaaacctgagatggacgagaagggcaacctgaccaccgccggctttgcctgctctcagtgtggccagcccctgttcgtgtacaagctggagcaggtgtctgagaagggcaaggcttacaccaactacttcggacggtgcaatgtggccgagcacgaaaagctgatcctgctggcccagctgaagcccgagaaggatagcgacgaagccgtgacatatagcctgggaaagtttgggcagagggccctggatttctacagcattcatgtgaccaaggagtccacccaccccgtgaagcccctggcccagatcgccggaaacagatacgcctccggacctgtgggaaaggccctgagcgacgcatgtatgggcacaatcgcctccttcctgtctaagtaccaggacatcatcatcgaacaccagaaggtggtgaagggcaaccagaagagactggagagcctgcgggagctggccggcaaggaaaacctggaataccctagcgtgaccctgccacctcagcctcacaccaaggagggcgttgatgcctacaacgaagtgatcgcccgggtgcgaatgtgggtgaacctgaacctgtggcagaagctgaagctaagcagagatgatgccaagcctctgctgagactgaagggattcccttcctttcctctggtcgagagacaggccaacgaagtggactggtgggacatggtgtgtaacgtgaagaagctgatcaacgagaaaaaggaggatggcaaggtgttttggcagaatctggctggctacaagagacaggaagccctgagaccatacctgagcagcgaggaagatcggaagaagggaaagaaattcgctcggtaccagctgggcgacctgctgctgcacctggaaaagaagcacggcgaggactggggaaaggtgtacgacgaggcctgggagcggattgacaagaaagtggaaggcctgagcaagcacatcaagctggaagaggaacggagaagcgaggacgcccagagcaaggccgccctgaccgactggctgcgggctaaggccagcttcgtgatcgagggcctgaaggaggccgacaaggacgagttctgcagatgcgagctgaagctgcagaagtggtacggggacctgcggggaaagcccttcgccatcgaagccgagaacagcatcctggacatcagcggcttcagcaagcagtacaactgtgccttcatctggcagaaggacggcgtgaagaagctgaacctgtacctgatcatcaactacttcaagggcggcaagctgcggttcaagaagatcaaacctgaagccttcgaagccaacagattctacaccgtgatcaacaaaaagagcggcgagatcgtgcccatggaggtgaacttcaacttcgacgaccccaacctgatcatcctgcctctggcctttggcaagagacagggcagagaattcatctggaacgacctgctgtccctggaaaccggcagcctgaagctggccaacggaagagtgatcgagaagacactgtacaacagaagaacccggcaggatgagcctgccctgttcgtggccctgaccttcgagcggcgggaggtcctggactcctccaatatcaaaccaatgaacctgatcggcgtggcaagaggcgaaaacatccccgccgtgatcgccctgaccgaccccgagggctgcccactgagccggtttaaggatagcctgggaaacccaacccacatcctgagaatcggcgagagctataaggagaagcagcggaccatccaggccaagaaggaggtggagcagcggagagccggcggctacagccggaagtacgccagcaaagccaagaatctggcagacgatatggtgagaaacaccgctagagatctgctgtactacgccgtgacccaggatgccatgctgatcttcgccaacctgagccggggcttcggccggcagggcaagcggaccttcatggccgagagacagtacacacggatggaggactggctgaccgccaagctggcctacgagggcctgagcaagacctacctgtccaagacactggcccagtacacctccaagacatgcagcaactgtgggtttaccatcaccagcgccgactacgacagggtgctggagaagctgaagaagacagcaacaggctggatgaccacaattaacggcaaggagctgaaggtggagggccagattacctactacaacagatacaagagacagaacgtagtcaaggacctgtccgtcgagctggatagactgagcgaagaatctgtgaacaacgacatctcctcctggacaaagggcagaagcggagaagctctgagcctcctgaagaaaagattctcccatagacccgtgcaggagaagttcgtgtgcctgaactgcggcttcgagacacacgcagccgagcaagccgccctgaacatcgccagatcctggctgttcctgcggagccaggagtacaagaaataccagacaaacaagacaaccggcaacaccgataagagagccttcgtcgagacctggcagtccttttaccggaagaagcttaaggaggtgtggaaacctgccgtgcggtctggcggatctggcggaggctccaccagccccaagaaaaagagaaaagtctaagctgccttctgcggggcttgccttctggccatgcccttcttctctcccttgcacctgtacctcttggtctttgaataaagcctgagtaggaaggctagcaaaaaaaaaaaaaaaaaaaaaaaaaaaaaaaaaaaaaaaaaaaaaaaaaaaaaaaaaaaaaaaaaaaaaaaaaaaaaaaa

SEQ ID NO: 12187 - RNA, 5785 nt, synthetic construct
  source 1..5785: mol_type = other RNA
aggaaataagagagaaaagaagagtaagaagaaatataagagccaccatggcccctaagaagaagcgtaaagtgagccggatggaacgcctcgtctacgaggtgcggcagaagtgcagaaacatcgaggacatctgcatctcctgcggatctctgaacgtgaccctggagcacccactgttcatcggcggcatgtgccagaactgtaaaaactgttttctggagtgtgcctatcaatacgacgatgacggctaccagagctactgcaccatctgttgcggcggaagagaggtgctgatgtgtggaaataacaactgctgccggtgcttctgcgtggaatgcgtggacctgctggtgggccccggcgccgcccaggccgctattaaggaagatccttggaactgctacatgtgcggccacaagggcacatacggcctgctgagacggagagaggactggcctagcagactgcagatgttcttcgccaataaccacgaccaggagttcgacccccctaaggtgtaccctcccgtccccgccgagaagagaaagcccatccgggtcctgagcctgttcgatggcatcgccaccggtctgctggtgctgaaggacctgggcatccaggtggataggtacattgcctccgaggtgtgcgaggactccatcaccgtgggaatggtgcgtcatcagggcaagatcatgtacgtgggcgacgtgcggagcgtgacacagaagcatatccaggagtggggccctttcgacctggtgatcggcggcagcccttgcaatgacctgagcatcgtgaacccagcccggaagggcctgtacgagggaaccggcagactgttcttcgagttttacagactgctgcacgacgcccggcctaaggaaggcgacgaccggcccttcttttggctgttcgagaatgtggtggccatgggagtcagcgacaagcgggatattagccggttcctggagagcaaccccgtgatgatcgatgccaaggaagtgagcgccgcccaccgggccagatacttctggggcaatctgcctggcatgaacagacccctggccagcaccgtgaacgacaagctggagctgcaggagtgcctggagcacggccggatcgccaagttcagcaaggtgagaaccatcaccacccgaagcaacagcatcaaacaaggcaaggaccagcactttcctgtgttcatgaacgagaaggaggacatcctgtggtgtaccgagatggagagagtgttcgggttcccagtccactacacagatgtcagcaacatgtctagactggccagacagagactgctgggaagaagctggtccgtccctgtgatcagacacctgttcgcccctctgaaggagtacttcgcctgcgtgagcagcggcaacagcaacgccaacagccggggccccagcttctctagcggcctggtgccactgtccctgagagggagccacatgggccccatggagatctacaaaaccgtgagcgcctggaagcggcagcctgtgcgcgtgctgagcctgtttcggaatatcgataaagtcctgaaaagcctgggattcctggagagcggctctggctccggcggtggcaccctgaagtacgtggaggatgtgacaaacgtggtcagacgggatgtggagaagtggggccccttcgatctggtgtacggcagcacccaacccctgggcagctcttgtgaccggtgccctggctggtacatgtttcagttccaccggatcctgcagtacgccctgccgagacaggagtcccagcggccattcttttggattttcatggacaacttgctgctgaccgaggatgaccaggaaactaccactcggttcctgcagaccgaagccgtgaccctgcaggacgtgagaggccgggactaccagaacgccatgcgggtgtggtccaacatccctggactgaaaagcaagcacgcacctctgacccctaaagaagaggagtacctgcaggcccaggtgcggagcagaagcaagctggacgcccctaaggtggatctgctggtgaagaattgcctcctgcccctgagagagtacttcaagtatttcagccagaatagtctgcccctgggaggcagcggcggcggcaccgagaacgccgtgacctacgacgacgtgcacgtgggcttcacctgggaggagtgggccctgctggaccccagccagaagaacctgtacaaggacgtgatgctggacacctacaggaacctgaccaccatcggctacagctgggagggccacaacatcgaggagcacttccagagcagcaggaggcacgagaggcacaagaggagcgacaccggcgagaacagcagcgtgtacacccagtgcggcggcccaagcagcggcgcccctcctcccagcggcggcagcccagccggctccccaacctctaccgaggagggcacctctgagtccgccacccccgagagcggccctggcacctccaccgagcccagcgagggcagcgcacccggcagccctgccggcagccccacctccacagaggagggaaccagcaccgagcccagcgaaggcagcgccccaggcaccagcaccgagcctagtgagcaggagattaaacggatcaacaagatcagaagaagacttgtgaaagacagcaacaccaagaaggccggcaagacaggccccatgaaaaccctgctggttagagtgatgacacccgatctgagagagcggctggaaaacctgagaaagaagcctgaaaatatcccccagcccatcagcaatacatctagagccaacctgaataagctgctgaccgattacaccgaaatgaagaaggcgatcctgcatgtgtactgggaagagttccagaaggaccctgtgggcctgatgagccgggtggcccagcctgccagcaagaagatcgatcagaacaagctgaaacctgagatggacgagaagggcaacctgaccaccgccggctttgcctgctctcagtgtggccagcccctgttcgtgtacaagctggagcaggtgtctgagaagggcaaggcttacaccaactacttcggacggtgcaatgtggccgagcacgaaaagctgatcctgctggcccagctgaagcccgagaaggatagcgacgaagccgtgacatatagcctgggaaagtttgggcagagggccctggatttctacagcattcatgtgaccaaggagtccacccaccccgtgaagcccctggcccagatcgccggaaacagatacgcctccggacctgtgggaaaggccctgagcgacgcatgtatgggcacaatcgcctccttcctgtctaagtaccaggacatcatcatcgaacaccagaaggtggtgaagggcaaccagaagagactggagagcctgcgggagctggccggcaaggaaaacctggaataccctagcgtgaccctgccacctcagcctcacaccaaggagggcgttgatgcctacaacgaagtgatcgcccgggtgcgaatgtgggtgaacctgaacctgtggcagaagctgaagctaagcagagatgatgccaagcctctgctgagactgaagggattcccttcctttcctctggtcgagagacaggccaacgaagtggactggtgggacatggtgtgtaacgtgaagaagctgatcaacgagaaaaaggaggatggcaaggtgttttggcagaatctggctggctacaagagacaggaagccctgagaccatacctgagcagcgaggaagatcggaagaagggaaagaaattcgctcggtaccagctgggcgacctgctgctgcacctggaaaagaagcacggcgaggactggggaaaggtgtacgacgaggcctgggagcggattgacaagaaagtggaaggcctgagcaagcacatcaagctggaagaggaacggagaagcgaggacgcccagagcaaggccgccctgaccgactggctgcgggctaaggccagcttcgtgatcgagggcctgaaggaggccgacaaggacgagttctgcagatgcgagctgaagctgcagaagtggtacggggacctgcggggaaagcccttcgccatcgaagccgagaacagcatcctggacatcagcggcttcagcaagcagtacaactgtgccttcatctggcagaaggacggcgtgaagaagctgaacctgtacctgatcatcaactacttcaagggcggcaagctgcggttcaagaagatcaaacctgaagccttcgaagccaacagattctacaccgtgatcaacaaaaagagcggcgagatcgtgcccatggaggtgaacttcaacttcgacgaccccaacctgatcatcctgcctctggcctttggcaagagacagggcagagaattcatctggaacgacctgctgtccctggaaaccggcagcctgaagctggccaacggaagagtgatcgagaagacactgtacaacagaagaacccggcaggatgagcctgccctgttcgtggccctgaccttcgagcggcgggaggtcctggactcctccaatatcaaaccaatgaacctgatcggcgtggcaagaggcgaaaacatccccgccgtgatcgccctgaccgaccccgagggctgcccactgagccggtttaaggatagcctgggaaacccaacccacatcctgagaatcggcgagagctataaggagaagcagcggaccatccaggccaagaaggaggtggagcagcggagagccggcggctacagccggaagtacgccagcaaagccaagaatctggcagacgatatggtgagaaacaccgctagagatctgctgtactacgccgtgacccaggatgccatgctgatcttcgccaacctgagccggggcttcggccggcagggcaagcggaccttcatggccgagagacagtacacacggatggaggactggctgaccgccaagctggcctacgagggcctgagcaagacctacctgtccaagacactggcccagtacacctccaagacatgcagcaactgtgggtttaccatcaccagcgccgactacgacagggtgctggagaagctgaagaagacagcaacaggctggatgaccacaattaacggcaaggagctgaaggtggagggccagattacctactacaacagatacaagagacagaacgtagtcaaggacctgtccgtcgagctggatagactgagcgaagaatctgtgaacaacgacatctcctcctggacaaagggcagaagcggagaagctctgagcctcctgaagaaaagattctcccatagacccgtgcaggagaagttcgtgtgcctgaactgcggcttcgagacacacgcagccgagcaagccgccctgaacatcgccagatcctggctgttcctgcggagccaggagtacaagaaataccagacaaacaagacaaccggcaacaccgataagagagccttcgtcgagacctggcagtccttttaccggaagaagcttaaggaggtgtggaaacctgccgtgcggtctggcggatctggcggaggctccaccagccccaagaaaaagagaaaagtctaagctgccttctgcggggcttgccttctggccatgcccttcttctctcccttgcacctgtacctcttggtctttgaataaagcctgagtaggaaggctagcaaaaaaaaaaaaaaaaaaaaaaaaaaaaaaaaaaaaaaaaaaaaaaaaaaaaaaaaaaaaaaaaaaaaaaaaaaaaaaaa

SEQ ID NO: 12188 - RNA, 5785 nt, synthetic construct
  source 1..5785: mol_type = other RNA
aggaaataagagagaaaagaagagtaagaagaaatataagagccaccatggcccctaagaagaagcgtaaagtgagccggatggaacgcctcgtctacgaggtgcggcagaagtgcagaaacatcgaggacatctgcatctcctgcggatctctgaacgtgaccctggagcacccactgttcatcggcggcatgtgccagaactgtaaaaactgttttctggagtgtgcctatcaatacgacgatgacggctaccagagctactgcaccatctgttgcggcggaagagaggtgctgatgtgtggaaataacaactgctgccggtgcttctgcgtggaatgcgtggacctgctggtgggccccggcgccgcccaggccgctattaaggaagatccttggaactgctacatgtgcggccacaagggcacatacggcctgctgagacggagagaggactggcctagcagactgcagatgttcttcgccaataaccacgaccaggagttcgacccccctaaggtgtaccctcccgtccccgccgagaagagaaagcccatccgggtcctgagcctgttcgatggcatcgccaccggtctgctggtgctgaaggacctgggcatccaggtggataggtacattgcctccgaggtgtgcgaggactccatcaccgtgggaatggtgcgtcatcagggcaagatcatgtacgtgggcgacgtgcggagcgtgacacagaagcatatccaggagtggggccctttcgacctggtgatcggcggcagcccttgcaatgacctgagcatcgtgaacccagcccggaagggcctgtacgagggaaccggcagactgttcttcgagttttacagactgctgcacgacgcccggcctaaggaaggcgacgaccggcccttcttttggctgttcgagaatgtggtggccatgggagtcagcgacaagcgggatattagccggttcctggagagcaaccccgtgatgatcgatgccaaggaagtgagcgccgcccaccgggccagatacttctggggcaatctgcctggcatgaacagacccctggccagcaccgtgaacgacaagctggagctgcaggagtgcctggagcacggccggatcgccaagttcagcaaggtgagaaccatcaccacccgaagcaacagcatcaaacaaggcaaggaccagcactttcctgtgttcatgaacgagaaggaggacatcctgtggtgtaccgagatggagagagtgttcgggttcccagtccactacacagatgtcagcaacatgtctagactggccagacagagactgctgggaagaagctggtccgtccctgtgatcagacacctgttcgcccctctgaaggagtacttcgcctgcgtgagcagcggcaacagcaacgccaacagccggggccccagcttctctagcggcctggtgccactgtccctgagagggagccacatgggccccatggagatctacaaaaccgtgagcgcctggaagcggcagcctgtgcgcgtgctgagcctgtttcggaatatcgataaagtcctgaaaagcctgggattcctggagagcggctctggctccggcggtggcaccctgaagtacgtggaggatgtgacaaacgtggtcagacgggatgtggagaagtggggccccttcgatctggtgtacggcagcacccaacccctgggcagctcttgtgaccggtgccctggctggtacatgtttcagttccaccggatcctgcagtacgccctgccgagacaggagtcccagcggccattcttttggattttcatggacaacttgctgctgaccgaggatgaccaggaaactaccactcggttcctgcagaccgaagccgtgaccctgcaggacgtgagaggccgggactaccagaacgccatgcgggtgtggtccaacatccctggactgaaaagcaagcacgcacctctgacccctaaagaagaggagtacctgcaggcccaggtgcggagcagaagcaagctggacgcccctaaggtggatctgctggtgaagaattgcctcctgcccctgagagagtacttcaagtatttcagccagaatagtctgcccctgggaggcagcggcggcggcagccagggcctggtgaccttcggcgacgtggccgtggacttcagccaggaggagtgggagtggctgaaccccatccagaggaacctgtacaggaaggtgatgctggagaactacaggaacctggcctggctgggcctgtgcgtgagcaagcccgacgtgatcagcagcctggagcagggcaaggagccctggaccgtgaagaggaagatgaccagggcctggtgccccgacctgaaggccgtgggcggcccaagcagcggcgcccctcctcccagcggcggcagcccagccggctccccaacctctaccgaggagggcacctctgagtccgccacccccgagagcggccctggcacctccaccgagcccagcgagggcagcgcacccggcagccctgccggcagccccacctccacagaggagggaaccagcaccgagcccagcgaaggcagcgccccaggcaccagcaccgagcctagtgagcaggagattaaacggatcaacaagatcagaagaagacttgtgaaagacagcaacaccaagaaggccggcaagacaggccccatgaaaaccctgctggttagagtgatgacacccgatctgagagagcggctggaaaacctgagaaagaagcctgaaaatatcccccagcccatcagcaatacatctagagccaacctgaataagctgctgaccgattacaccgaaatgaagaaggcgatcctgcatgtgtactgggaagagttccagaaggaccctgtgggcctgatgagccgggtggcccagcctgccagcaagaagatcgatcagaacaagctgaaacctgagatggacgagaagggcaacctgaccaccgccggctttgcctgctctcagtgtggccagcccctgttcgtgtacaagctggagcaggtgtctgagaagggcaaggcttacaccaactacttcggacggtgcaatgtggccgagcacgaaaagctgatcctgctggcccagctgaagcccgagaaggatagcgacgaagccgtgacatatagcctgggaaagtttgggcagagggccctggatttctacagcattcatgtgaccaaggagtccacccaccccgtgaagcccctggcccagatcgccggaaacagatacgcctccggacctgtgggaaaggccctgagcgacgcatgtatgggcacaatcgcctccttcctgtctaagtaccaggacatcatcatcgaacaccagaaggtggtgaagggcaaccagaagagactggagagcctgcgggagctggccggcaaggaaaacctggaataccctagcgtgaccctgccacctcagcctcacaccaaggagggcgttgatgcctacaacgaagtgatcgcccgggtgcgaatgtgggtgaacctgaacctgtggcagaagctgaagctaagcagagatgatgccaagcctctgctgagactgaagggattcccttcctttcctctggtcgagagacaggccaacgaagtggactggtgggacatggtgtgtaacgtgaagaagctgatcaacgagaaaaaggaggatggcaaggtgttttggcagaatctggctggctacaagagacaggaagccctgagaccatacctgagcagcgaggaagatcggaagaagggaaagaaattcgctcggtaccagctgggcgacctgctgctgcacctggaaaagaagcacggcgaggactggggaaaggtgtacgacgaggcctgggagcggattgacaagaaagtggaaggcctgagcaagcacatcaagctggaagaggaacggagaagcgaggacgcccagagcaaggccgccctgaccgactggctgcgggctaaggccagcttcgtgatcgagggcctgaaggaggccgacaaggacgagttctgcagatgcgagctgaagctgcagaagtggtacggggacctgcggggaaagcccttcgccatcgaagccgagaacagcatcctggacatcagcggcttcagcaagcagtacaactgtgccttcatctggcagaaggacggcgtgaagaagctgaacctgtacctgatcatcaactacttcaagggcggcaagctgcggttcaagaagatcaaacctgaagccttcgaagccaacagattctacaccgtgatcaacaaaaagagcggcgagatcgtgcccatggaggtgaacttcaacttcgacgaccccaacctgatcatcctgcctctggcctttggcaagagacagggcagagaattcatctggaacgacctgctgtccctggaaaccggcagcctgaagctggccaacggaagagtgatcgagaagacactgtacaacagaagaacccggcaggatgagcctgccctgttcgtggccctgaccttcgagcggcgggaggtcctggactcctccaatatcaaaccaatgaacctgatcggcgtggcaagaggcgaaaacatccccgccgtgatcgccctgaccgaccccgagggctgcccactgagccggtttaaggatagcctgggaaacccaacccacatcctgagaatcggcgagagctataaggagaagcagcggaccatccaggccaagaaggaggtggagcagcggagagccggcggctacagccggaagtacgccagcaaagccaagaatctggcagacgatatggtgagaaacaccgctagagatctgctgtactacgccgtgacccaggatgccatgctgatcttcgccaacctgagccggggcttcggccggcagggcaagcggaccttcatggccgagagacagtacacacggatggaggactggctgaccgccaagctggcctacgagggcctgagcaagacctacctgtccaagacactggcccagtacacctccaagacatgcagcaactgtgggtttaccatcaccagcgccgactacgacagggtgctggagaagctgaagaagacagcaacaggctggatgaccacaattaacggcaaggagctgaaggtggagggccagattacctactacaacagatacaagagacagaacgtagtcaaggacctgtccgtcgagctggatagactgagcgaagaatctgtgaacaacgacatctcctcctggacaaagggcagaagcggagaagctctgagcctcctgaagaaaagattctcccatagacccgtgcaggagaagttcgtgtgcctgaactgcggcttcgagacacacgcagccgagcaagccgccctgaacatcgccagatcctggctgttcctgcggagccaggagtacaagaaataccagacaaacaagacaaccggcaacaccgataagagagccttcgtcgagacctggcagtccttttaccggaagaagcttaaggaggtgtggaaacctgccgtgcggtctggcggatctggcggaggctccaccagccccaagaaaaagagaaaagtctaagctgccttctgcggggcttgccttctggccatgcccttcttctctcccttgcacctgtacctcttggtctttgaataaagcctgagtaggaaggctagcaaaaaaaaaaaaaaaaaaaaaaaaaaaaaaaaaaaaaaaaaaaaaaaaaaaaaaaaaaaaaaaaaaaaaaaaaaaaaaaa

SEQ ID NO: 12189 - RNA, 5785 nt, synthetic construct
  source 1..5785: mol_type = other RNA
aggaaataagagagaaaagaagagtaagaagaaatataagagccaccatggcccctaagaagaagcgtaaagtgagccggatggaacgcctcgtctacgaggtgcggcagaagtgcagaaacatcgaggacatctgcatctcctgcggatctctgaacgtgaccctggagcacccactgttcatcggcggcatgtgccagaactgtaaaaactgttttctggagtgtgcctatcaatacgacgatgacggctaccagagctactgcaccatctgttgcggcggaagagaggtgctgatgtgtggaaataacaactgctgccggtgcttctgcgtggaatgcgtggacctgctggtgggccccggcgccgcccaggccgctattaaggaagatccttggaactgctacatgtgcggccacaagggcacatacggcctgctgagacggagagaggactggcctagcagactgcagatgttcttcgccaataaccacgaccaggagttcgacccccctaaggtgtaccctcccgtccccgccgagaagagaaagcccatccgggtcctgagcctgttcgatggcatcgccaccggtctgctggtgctgaaggacctgggcatccaggtggataggtacattgcctccgaggtgtgcgaggactccatcaccgtgggaatggtgcgtcatcagggcaagatcatgtacgtgggcgacgtgcggagcgtgacacagaagcatatccaggagtggggccctttcgacctggtgatcggcggcagcccttgcaatgacctgagcatcgtgaacccagcccggaagggcctgtacgagggaaccggcagactgttcttcgagttttacagactgctgcacgacgcccggcctaaggaaggcgacgaccggcccttcttttggctgttcgagaatgtggtggccatgggagtcagcgacaagcgggatattagccggttcctggagagcaaccccgtgatgatcgatgccaaggaagtgagcgccgcccaccgggccagatacttctggggcaatctgcctggcatgaacagacccctggccagcaccgtgaacgacaagctggagctgcaggagtgcctggagcacggccggatcgccaagttcagcaaggtgagaaccatcaccacccgaagcaacagcatcaaacaaggcaaggaccagcactttcctgtgttcatgaacgagaaggaggacatcctgtggtgtaccgagatggagagagtgttcgggttcccagtccactacacagatgtcagcaacatgtctagactggccagacagagactgctgggaagaagctggtccgtccctgtgatcagacacctgttcgcccctctgaaggagtacttcgcctgcgtgagcagcggcaacagcaacgccaacagccggggccccagcttctctagcggcctggtgccactgtccctgagagggagccacatgggccccatggagatctacaaaaccgtgagcgcctggaagcggcagcctgtgcgcgtgctgagcctgtttcggaatatcgataaagtcctgaaaagcctgggattcctggagagcggctctggctccggcggtggcaccctgaagtacgtggaggatgtgacaaacgtggtcagacgggatgtggagaagtggggccccttcgatctggtgtacggcagcacccaacccctgggcagctcttgtgaccggtgccctggctggtacatgtttcagttccaccggatcctgcagtacgccctgccgagacaggagtcccagcggccattcttttggattttcatggacaacttgctgctgaccgaggatgaccaggaaactaccactcggttcctgcagaccgaagccgtgaccctgcaggacgtgagaggccgggactaccagaacgccatgcgggtgtggtccaacatccctggactgaaaagcaagcacgcacctctgacccctaaagaagaggagtacctgcaggcccaggtgcggagcagaagcaagctggacgcccctaaggtggatctgctggtgaagaattgcctcctgcccctgagagagtacttcaagtatttcagccagaatagtctgcccctgggaggcagcggcggcggcagccaggagagcgtggccttcgaggacgtggccgtgtacttcaccaccaaggagtgggccatcatggtgcccgccgagagggccctgtacagggacgtgatgctggagaactacgaggccgtggccttcgtggtgccccccaccagcaagcccgccctggtgagccacctggagcagggcaaggagagctgcttcatcaggccccaggtggtgctgagcaggagcgactggagggccggcctgggcggcccaagcagcggcgcccctcctcccagcggcggcagcccagccggctccccaacctctaccgaggagggcacctctgagtccgccacccccgagagcggccctggcacctccaccgagcccagcgagggcagcgcacccggcagccctgccggcagccccacctccacagaggagggaaccagcaccgagcccagcgaaggcagcgccccaggcaccagcaccgagcctagtgagcaggagattaaacggatcaacaagatcagaagaagacttgtgaaagacagcaacaccaagaaggccggcaagacaggccccatgaaaaccctgctggttagagtgatgacacccgatctgagagagcggctggaaaacctgagaaagaagcctgaaaatatcccccagcccatcagcaatacatctagagccaacctgaataagctgctgaccgattacaccgaaatgaagaaggcgatcctgcatgtgtactgggaagagttccagaaggaccctgtgggcctgatgagccgggtggcccagcctgccagcaagaagatcgatcagaacaagctgaaacctgagatggacgagaagggcaacctgaccaccgccggctttgcctgctctcagtgtggccagcccctgttcgtgtacaagctggagcaggtgtctgagaagggcaaggcttacaccaactacttcggacggtgcaatgtggccgagcacgaaaagctgatcctgctggcccagctgaagcccgagaaggatagcgacgaagccgtgacatatagcctgggaaagtttgggcagagggccctggatttctacagcattcatgtgaccaaggagtccacccaccccgtgaagcccctggcccagatcgccggaaacagatacgcctccggacctgtgggaaaggccctgagcgacgcatgtatgggcacaatcgcctccttcctgtctaagtaccaggacatcatcatcgaacaccagaaggtggtgaagggcaaccagaagagactggagagcctgcgggagctggccggcaaggaaaacctggaataccctagcgtgaccctgccacctcagcctcacaccaaggagggcgttgatgcctacaacgaagtgatcgcccgggtgcgaatgtgggtgaacctgaacctgtggcagaagctgaagctaagcagagatgatgccaagcctctgctgagactgaagggattcccttcctttcctctggtcgagagacaggccaacgaagtggactggtgggacatggtgtgtaacgtgaagaagctgatcaacgagaaaaaggaggatggcaaggtgttttggcagaatctggctggctacaagagacaggaagccctgagaccatacctgagcagcgaggaagatcggaagaagggaaagaaattcgctcggtaccagctgggcgacctgctgctgcacctggaaaagaagcacggcgaggactggggaaaggtgtacgacgaggcctgggagcggattgacaagaaagtggaaggcctgagcaagcacatcaagctggaagaggaacggagaagcgaggacgcccagagcaaggccgccctgaccgactggctgcgggctaaggccagcttcgtgatcgagggcctgaaggaggccgacaaggacgagttctgcagatgcgagctgaagctgcagaagtggtacggggacctgcggggaaagcccttcgccatcgaagccgagaacagcatcctggacatcagcggcttcagcaagcagtacaactgtgccttcatctggcagaaggacggcgtgaagaagctgaacctgtacctgatcatcaactacttcaagggcggcaagctgcggttcaagaagatcaaacctgaagccttcgaagccaacagattctacaccgtgatcaacaaaaagagcggcgagatcgtgcccatggaggtgaacttcaacttcgacgaccccaacctgatcatcctgcctctggcctttggcaagagacagggcagagaattcatctggaacgacctgctgtccctggaaaccggcagcctgaagctggccaacggaagagtgatcgagaagacactgtacaacagaagaacccggcaggatgagcctgccctgttcgtggccctgaccttcgagcggcgggaggtcctggactcctccaatatcaaaccaatgaacctgatcggcgtggcaagaggcgaaaacatccccgccgtgatcgccctgaccgaccccgagggctgcccactgagccggtttaaggatagcctgggaaacccaacccacatcctgagaatcggcgagagctataaggagaagcagcggaccatccaggccaagaaggaggtggagcagcggagagccggcggctacagccggaagtacgccagcaaagccaagaatctggcagacgatatggtgagaaacaccgctagagatctgctgtactacgccgtgacccaggatgccatgctgatcttcgccaacctgagccggggcttcggccggcagggcaagcggaccttcatggccgagagacagtacacacggatggaggactggctgaccgccaagctggcctacgagggcctgagcaagacctacctgtccaagacactggcccagtacacctccaagacatgcagcaactgtgggtttaccatcaccagcgccgactacgacagggtgctggagaagctgaagaagacagcaacaggctggatgaccacaattaacggcaaggagctgaaggtggagggccagattacctactacaacagatacaagagacagaacgtagtcaaggacctgtccgtcgagctggatagactgagcgaagaatctgtgaacaacgacatctcctcctggacaaagggcagaagcggagaagctctgagcctcctgaagaaaagattctcccatagacccgtgcaggagaagttcgtgtgcctgaactgcggcttcgagacacacgcagccgagcaagccgccctgaacatcgccagatcctggctgttcctgcggagccaggagtacaagaaataccagacaaacaagacaaccggcaacaccgataagagagccttcgtcgagacctggcagtccttttaccggaagaagcttaaggaggtgtggaaacctgccgtgcggtctggcggatctggcggaggctccaccagccccaagaaaaagagaaaagtctaagctgccttctgcggggcttgccttctggccatgcccttcttctctcccttgcacctgtacctcttggtctttgaataaagcctgagtaggaaggctagcaaaaaaaaaaaaaaaaaaaaaaaaaaaaaaaaaaaaaaaaaaaaaaaaaaaaaaaaaaaaaaaaaaaaaaaaaaaaaaaa

SEQ ID NO: 12190 - RNA, 5785 nt, synthetic construct
  source 1..5785: mol_type = other RNA
aggaaataagagagaaaagaagagtaagaagaaatataagagccaccatggcccctaagaagaagcgtaaagtgagccggatggaacgcctcgtctacgaggtgcggcagaagtgcagaaacatcgaggacatctgcatctcctgcggatctctgaacgtgaccctggagcacccactgttcatcggcggcatgtgccagaactgtaaaaactgttttctggagtgtgcctatcaatacgacgatgacggctaccagagctactgcaccatctgttgcggcggaagagaggtgctgatgtgtggaaataacaactgctgccggtgcttctgcgtggaatgcgtggacctgctggtgggccccggcgccgcccaggccgctattaaggaagatccttggaactgctacatgtgcggccacaagggcacatacggcctgctgagacggagagaggactggcctagcagactgcagatgttcttcgccaataaccacgaccaggagttcgacccccctaaggtgtaccctcccgtccccgccgagaagagaaagcccatccgggtcctgagcctgttcgatggcatcgccaccggtctgctggtgctgaaggacctgggcatccaggtggataggtacattgcctccgaggtgtgcgaggactccatcaccgtgggaatggtgcgtcatcagggcaagatcatgtacgtgggcgacgtgcggagcgtgacacagaagcatatccaggagtggggccctttcgacctggtgatcggcggcagcccttgcaatgacctgagcatcgtgaacccagcccggaagggcctgtacgagggaaccggcagactgttcttcgagttttacagactgctgcacgacgcccggcctaaggaaggcgacgaccggcccttcttttggctgttcgagaatgtggtggccatgggagtcagcgacaagcgggatattagccggttcctggagagcaaccccgtgatgatcgatgccaaggaagtgagcgccgcccaccgggccagatacttctggggcaatctgcctggcatgaacagacccctggccagcaccgtgaacgacaagctggagctgcaggagtgcctggagcacggccggatcgccaagttcagcaaggtgagaaccatcaccacccgaagcaacagcatcaaacaaggcaaggaccagcactttcctgtgttcatgaacgagaaggaggacatcctgtggtgtaccgagatggagagagtgttcgggttcccagtccactacacagatgtcagcaacatgtctagactggccagacagagactgctgggaagaagctggtccgtccctgtgatcagacacctgttcgcccctctgaaggagtacttcgcctgcgtgagcagcggcaacagcaacgccaacagccggggccccagcttctctagcggcctggtgccactgtccctgagagggagccacatgggccccatggagatctacaaaaccgtgagcgcctggaagcggcagcctgtgcgcgtgctgagcctgtttcggaatatcgataaagtcctgaaaagcctgggattcctggagagcggctctggctccggcggtggcaccctgaagtacgtggaggatgtgacaaacgtggtcagacgggatgtggagaagtggggccccttcgatctggtgtacggcagcacccaacccctgggcagctcttgtgaccggtgccctggctggtacatgtttcagttccaccggatcctgcagtacgccctgccgagacaggagtcccagcggccattcttttggattttcatggacaacttgctgctgaccgaggatgaccaggaaactaccactcggttcctgcagaccgaagccgtgaccctgcaggacgtgagaggccgggactaccagaacgccatgcgggtgtggtccaacatccctggactgaaaagcaagcacgcacctctgacccctaaagaagaggagtacctgcaggcccaggtgcggagcagaagcaagctggacgcccctaaggtggatctgctggtgaagaattgcctcctgcccctgagagagtacttcaagtatttcagccagaatagtctgcccctgggaggcagcggcggcggcatggtgagcttcgaggacgtggccgtgctgctgagccaggaggagtgggactgcctgatccccgcccagaggggcctgtacagggacgtgatgctggagacctacggcaacctggtgagcctgggcctgcaggccagcaagcccgacgtgatcagcaggctggagcagggcgacaagccctggaccccccacatcctgaggacccagaggagctggagctggaggcacaagagggagtgctacggcggcccaagcagcggcgcccctcctcccagcggcggcagcccagccggctccccaacctctaccgaggagggcacctctgagtccgccacccccgagagcggccctggcacctccaccgagcccagcgagggcagcgcacccggcagccctgccggcagccccacctccacagaggagggaaccagcaccgagcccagcgaaggcagcgccccaggcaccagcaccgagcctagtgagcaggagattaaacggatcaacaagatcagaagaagacttgtgaaagacagcaacaccaagaaggccggcaagacaggccccatgaaaaccctgctggttagagtgatgacacccgatctgagagagcggctggaaaacctgagaaagaagcctgaaaatatcccccagcccatcagcaatacatctagagccaacctgaataagctgctgaccgattacaccgaaatgaagaaggcgatcctgcatgtgtactgggaagagttccagaaggaccctgtgggcctgatgagccgggtggcccagcctgccagcaagaagatcgatcagaacaagctgaaacctgagatggacgagaagggcaacctgaccaccgccggctttgcctgctctcagtgtggccagcccctgttcgtgtacaagctggagcaggtgtctgagaagggcaaggcttacaccaactacttcggacggtgcaatgtggccgagcacgaaaagctgatcctgctggcccagctgaagcccgagaaggatagcgacgaagccgtgacatatagcctgggaaagtttgggcagagggccctggatttctacagcattcatgtgaccaaggagtccacccaccccgtgaagcccctggcccagatcgccggaaacagatacgcctccggacctgtgggaaaggccctgagcgacgcatgtatgggcacaatcgcctccttcctgtctaagtaccaggacatcatcatcgaacaccagaaggtggtgaagggcaaccagaagagactggagagcctgcgggagctggccggcaaggaaaacctggaataccctagcgtgaccctgccacctcagcctcacaccaaggagggcgttgatgcctacaacgaagtgatcgcccgggtgcgaatgtgggtgaacctgaacctgtggcagaagctgaagctaagcagagatgatgccaagcctctgctgagactgaagggattcccttcctttcctctggtcgagagacaggccaacgaagtggactggtgggacatggtgtgtaacgtgaagaagctgatcaacgagaaaaaggaggatggcaaggtgttttggcagaatctggctggctacaagagacaggaagccctgagaccatacctgagcagcgaggaagatcggaagaagggaaagaaattcgctcggtaccagctgggcgacctgctgctgcacctggaaaagaagcacggcgaggactggggaaaggtgtacgacgaggcctgggagcggattgacaagaaagtggaaggcctgagcaagcacatcaagctggaagaggaacggagaagcgaggacgcccagagcaaggccgccctgaccgactggctgcgggctaaggccagcttcgtgatcgagggcctgaaggaggccgacaaggacgagttctgcagatgcgagctgaagctgcagaagtggtacggggacctgcggggaaagcccttcgccatcgaagccgagaacagcatcctggacatcagcggcttcagcaagcagtacaactgtgccttcatctggcagaaggacggcgtgaagaagctgaacctgtacctgatcatcaactacttcaagggcggcaagctgcggttcaagaagatcaaacctgaagccttcgaagccaacagattctacaccgtgatcaacaaaaagagcggcgagatcgtgcccatggaggtgaacttcaacttcgacgaccccaacctgatcatcctgcctctggcctttggcaagagacagggcagagaattcatctggaacgacctgctgtccctggaaaccggcagcctgaagctggccaacggaagagtgatcgagaagacactgtacaacagaagaacccggcaggatgagcctgccctgttcgtggccctgaccttcgagcggcgggaggtcctggactcctccaatatcaaaccaatgaacctgatcggcgtggcaagaggcgaaaacatccccgccgtgatcgccctgaccgaccccgagggctgcccactgagccggtttaaggatagcctgggaaacccaacccacatcctgagaatcggcgagagctataaggagaagcagcggaccatccaggccaagaaggaggtggagcagcggagagccggcggctacagccggaagtacgccagcaaagccaagaatctggcagacgatatggtgagaaacaccgctagagatctgctgtactacgccgtgacccaggatgccatgctgatcttcgccaacctgagccggggcttcggccggcagggcaagcggaccttcatggccgagagacagtacacacggatggaggactggctgaccgccaagctggcctacgagggcctgagcaagacctacctgtccaagacactggcccagtacacctccaagacatgcagcaactgtgggtttaccatcaccagcgccgactacgacagggtgctggagaagctgaagaagacagcaacaggctggatgaccacaattaacggcaaggagctgaaggtggagggccagattacctactacaacagatacaagagacagaacgtagtcaaggacctgtccgtcgagctggatagactgagcgaagaatctgtgaacaacgacatctcctcctggacaaagggcagaagcggagaagctctgagcctcctgaagaaaagattctcccatagacccgtgcaggagaagttcgtgtgcctgaactgcggcttcgagacacacgcagccgagcaagccgccctgaacatcgccagatcctggctgttcctgcggagccaggagtacaagaaataccagacaaacaagacaaccggcaacaccgataagagagccttcgtcgagacctggcagtccttttaccggaagaagcttaaggaggtgtggaaacctgccgtgcggtctggcggatctggcggaggctccaccagccccaagaaaaagagaaaagtctaagctgccttctgcggggcttgccttctggccatgcccttcttctctcccttgcacctgtacctcttggtctttgaataaagcctgagtaggaaggctagcaaaaaaaaaaaaaaaaaaaaaaaaaaaaaaaaaaaaaaaaaaaaaaaaaaaaaaaaaaaaaaaaaaaaaaaaaaaaaaaa

SEQ ID NO: 12191 - RNA, 5785 nt, synthetic construct
  source 1..5785: mol_type = other RNA
aggaaataagagagaaaagaagagtaagaagaaatataagagccaccatggcccctaagaagaagcgtaaagtgagccggatggaacgcctcgtctacgaggtgcggcagaagtgcagaaacatcgaggacatctgcatctcctgcggatctctgaacgtgaccctggagcacccactgttcatcggcggcatgtgccagaactgtaaaaactgttttctggagtgtgcctatcaatacgacgatgacggctaccagagctactgcaccatctgttgcggcggaagagaggtgctgatgtgtggaaataacaactgctgccggtgcttctgcgtggaatgcgtggacctgctggtgggccccggcgccgcccaggccgctattaaggaagatccttggaactgctacatgtgcggccacaagggcacatacggcctgctgagacggagagaggactggcctagcagactgcagatgttcttcgccaataaccacgaccaggagttcgacccccctaaggtgtaccctcccgtccccgccgagaagagaaagcccatccgggtcctgagcctgttcgatggcatcgccaccggtctgctggtgctgaaggacctgggcatccaggtggataggtacattgcctccgaggtgtgcgaggactccatcaccgtgggaatggtgcgtcatcagggcaagatcatgtacgtgggcgacgtgcggagcgtgacacagaagcatatccaggagtggggccctttcgacctggtgatcggcggcagcccttgcaatgacctgagcatcgtgaacccagcccggaagggcctgtacgagggaaccggcagactgttcttcgagttttacagactgctgcacgacgcccggcctaaggaaggcgacgaccggcccttcttttggctgttcgagaatgtggtggccatgggagtcagcgacaagcgggatattagccggttcctggagagcaaccccgtgatgatcgatgccaaggaagtgagcgccgcccaccgggccagatacttctggggcaatctgcctggcatgaacagacccctggccagcaccgtgaacgacaagctggagctgcaggagtgcctggagcacggccggatcgccaagttcagcaaggtgagaaccatcaccacccgaagcaacagcatcaaacaaggcaaggaccagcactttcctgtgttcatgaacgagaaggaggacatcctgtggtgtaccgagatggagagagtgttcgggttcccagtccactacacagatgtcagcaacatgtctagactggccagacagagactgctgggaagaagctggtccgtccctgtgatcagacacctgttcgcccctctgaaggagtacttcgcctgcgtgagcagcggcaacagcaacgccaacagccggggccccagcttctctagcggcctggtgccactgtccctgagagggagccacatgggccccatggagatctacaaaaccgtgagcgcctggaagcggcagcctgtgcgcgtgctgagcctgtttcggaatatcgataaagtcctgaaaagcctgggattcctggagagcggctctggctccggcggtggcaccctgaagtacgtggaggatgtgacaaacgtggtcagacgggatgtggagaagtggggccccttcgatctggtgtacggcagcacccaacccctgggcagctcttgtgaccggtgccctggctggtacatgtttcagttccaccggatcctgcagtacgccctgccgagacaggagtcccagcggccattcttttggattttcatggacaacttgctgctgaccgaggatgaccaggaaactaccactcggttcctgcagaccgaagccgtgaccctgcaggacgtgagaggccgggactaccagaacgccatgcgggtgtggtccaacatccctggactgaaaagcaagcacgcacctctgacccctaaagaagaggagtacctgcaggcccaggtgcggagcagaagcaagctggacgcccctaaggtggatctgctggtgaagaattgcctcctgcccctgagagagtacttcaagtatttcagccagaatagtctgcccctgggaggcagcggcggcggccaggccgaggtgaccttcgaggacgtggccgtgctgttcagcagggaggagtggggcaggctgggccccgcccagaggggcctgtacagggacgtgatgctggagacctacaggaacctggtgagcctgggcgccggccccgccgcccccaagcccggcgtgatcacccagctggagaggggcgacgagccctgggtgctggacgcccagggcgccaagggcaaggagaggctgagggtgagcggcggcccaagcagcggcgcccctcctcccagcggcggcagcccagccggctccccaacctctaccgaggagggcacctctgagtccgccacccccgagagcggccctggcacctccaccgagcccagcgagggcagcgcacccggcagccctgccggcagccccacctccacagaggagggaaccagcaccgagcccagcgaaggcagcgccccaggcaccagcaccgagcctagtgagcaggagattaaacggatcaacaagatcagaagaagacttgtgaaagacagcaacaccaagaaggccggcaagacaggccccatgaaaaccctgctggttagagtgatgacacccgatctgagagagcggctggaaaacctgagaaagaagcctgaaaatatcccccagcccatcagcaatacatctagagccaacctgaataagctgctgaccgattacaccgaaatgaagaaggcgatcctgcatgtgtactgggaagagttccagaaggaccctgtgggcctgatgagccgggtggcccagcctgccagcaagaagatcgatcagaacaagctgaaacctgagatggacgagaagggcaacctgaccaccgccggctttgcctgctctcagtgtggccagcccctgttcgtgtacaagctggagcaggtgtctgagaagggcaaggcttacaccaactacttcggacggtgcaatgtggccgagcacgaaaagctgatcctgctggcccagctgaagcccgagaaggatagcgacgaagccgtgacatatagcctgggaaagtttgggcagagggccctggatttctacagcattcatgtgaccaaggagtccacccaccccgtgaagcccctggcccagatcgccggaaacagatacgcctccggacctgtgggaaaggccctgagcgacgcatgtatgggcacaatcgcctccttcctgtctaagtaccaggacatcatcatcgaacaccagaaggtggtgaagggcaaccagaagagactggagagcctgcgggagctggccggcaaggaaaacctggaataccctagcgtgaccctgccacctcagcctcacaccaaggagggcgttgatgcctacaacgaagtgatcgcccgggtgcgaatgtgggtgaacctgaacctgtggcagaagctgaagctaagcagagatgatgccaagcctctgctgagactgaagggattcccttcctttcctctggtcgagagacaggccaacgaagtggactggtgggacatggtgtgtaacgtgaagaagctgatcaacgagaaaaaggaggatggcaaggtgttttggcagaatctggctggctacaagagacaggaagccctgagaccatacctgagcagcgaggaagatcggaagaagggaaagaaattcgctcggtaccagctgggcgacctgctgctgcacctggaaaagaagcacggcgaggactggggaaaggtgtacgacgaggcctgggagcggattgacaagaaagtggaaggcctgagcaagcacatcaagctggaagaggaacggagaagcgaggacgcccagagcaaggccgccctgaccgactggctgcgggctaaggccagcttcgtgatcgagggcctgaaggaggccgacaaggacgagttctgcagatgcgagctgaagctgcagaagtggtacggggacctgcggggaaagcccttcgccatcgaagccgagaacagcatcctggacatcagcggcttcagcaagcagtacaactgtgccttcatctggcagaaggacggcgtgaagaagctgaacctgtacctgatcatcaactacttcaagggcggcaagctgcggttcaagaagatcaaacctgaagccttcgaagccaacagattctacaccgtgatcaacaaaaagagcggcgagatcgtgcccatggaggtgaacttcaacttcgacgaccccaacctgatcatcctgcctctggcctttggcaagagacagggcagagaattcatctggaacgacctgctgtccctggaaaccggcagcctgaagctggccaacggaagagtgatcgagaagacactgtacaacagaagaacccggcaggatgagcctgccctgttcgtggccctgaccttcgagcggcgggaggtcctggactcctccaatatcaaaccaatgaacctgatcggcgtggcaagaggcgaaaacatccccgccgtgatcgccctgaccgaccccgagggctgcccactgagccggtttaaggatagcctgggaaacccaacccacatcctgagaatcggcgagagctataaggagaagcagcggaccatccaggccaagaaggaggtggagcagcggagagccggcggctacagccggaagtacgccagcaaagccaagaatctggcagacgatatggtgagaaacaccgctagagatctgctgtactacgccgtgacccaggatgccatgctgatcttcgccaacctgagccggggcttcggccggcagggcaagcggaccttcatggccgagagacagtacacacggatggaggactggctgaccgccaagctggcctacgagggcctgagcaagacctacctgtccaagacactggcccagtacacctccaagacatgcagcaactgtgggtttaccatcaccagcgccgactacgacagggtgctggagaagctgaagaagacagcaacaggctggatgaccacaattaacggcaaggagctgaaggtggagggccagattacctactacaacagatacaagagacagaacgtagtcaaggacctgtccgtcgagctggatagactgagcgaagaatctgtgaacaacgacatctcctcctggacaaagggcagaagcggagaagctctgagcctcctgaagaaaagattctcccatagacccgtgcaggagaagttcgtgtgcctgaactgcggcttcgagacacacgcagccgagcaagccgccctgaacatcgccagatcctggctgttcctgcggagccaggagtacaagaaataccagacaaacaagacaaccggcaacaccgataagagagccttcgtcgagacctggcagtccttttaccggaagaagcttaaggaggtgtggaaacctgccgtgcggtctggcggatctggcggaggctccaccagccccaagaaaaagagaaaagtctaagctgccttctgcggggcttgccttctggccatgcccttcttctctcccttgcacctgtacctcttggtctttgaataaagcctgagtaggaaggctagcaaaaaaaaaaaaaaaaaaaaaaaaaaaaaaaaaaaaaaaaaaaaaaaaaaaaaaaaaaaaaaaaaaaaaaaaaaaaaaaa

SEQ ID NO: 12192 - RNA, 5785 nt, synthetic construct
  source 1..5785: mol_type = other RNA
aggaaataagagagaaaagaagagtaagaagaaatataagagccaccatggcccctaagaagaagcgtaaagtgagccggatggaacgcctcgtctacgaggtgcggcagaagtgcagaaacatcgaggacatctgcatctcctgcggatctctgaacgtgaccctggagcacccactgttcatcggcggcatgtgccagaactgtaaaaactgttttctggagtgtgcctatcaatacgacgatgacggctaccagagctactgcaccatctgttgcggcggaagagaggtgctgatgtgtggaaataacaactgctgccggtgcttctgcgtggaatgcgtggacctgctggtgggccccggcgccgcccaggccgctattaaggaagatccttggaactgctacatgtgcggccacaagggcacatacggcctgctgagacggagagaggactggcctagcagactgcagatgttcttcgccaataaccacgaccaggagttcgacccccctaaggtgtaccctcccgtccccgccgagaagagaaagcccatccgggtcctgagcctgttcgatggcatcgccaccggtctgctggtgctgaaggacctgggcatccaggtggataggtacattgcctccgaggtgtgcgaggactccatcaccgtgggaatggtgcgtcatcagggcaagatcatgtacgtgggcgacgtgcggagcgtgacacagaagcatatccaggagtggggccctttcgacctggtgatcggcggcagcccttgcaatgacctgagcatcgtgaacccagcccggaagggcctgtacgagggaaccggcagactgttcttcgagttttacagactgctgcacgacgcccggcctaaggaaggcgacgaccggcccttcttttggctgttcgagaatgtggtggccatgggagtcagcgacaagcgggatattagccggttcctggagagcaaccccgtgatgatcgatgccaaggaagtgagcgccgcccaccgggccagatacttctggggcaatctgcctggcatgaacagacccctggccagcaccgtgaacgacaagctggagctgcaggagtgcctggagcacggccggatcgccaagttcagcaaggtgagaaccatcaccacccgaagcaacagcatcaaacaaggcaaggaccagcactttcctgtgttcatgaacgagaaggaggacatcctgtggtgtaccgagatggagagagtgttcgggttcccagtccactacacagatgtcagcaacatgtctagactggccagacagagactgctgggaagaagctggtccgtccctgtgatcagacacctgttcgcccctctgaaggagtacttcgcctgcgtgagcagcggcaacagcaacgccaacagccggggccccagcttctctagcggcctggtgccactgtccctgagagggagccacatgggccccatggagatctacaaaaccgtgagcgcctggaagcggcagcctgtgcgcgtgctgagcctgtttcggaatatcgataaagtcctgaaaagcctgggattcctggagagcggctctggctccggcggtggcaccctgaagtacgtggaggatgtgacaaacgtggtcagacgggatgtggagaagtggggccccttcgatctggtgtacggcagcacccaacccctgggcagctcttgtgaccggtgccctggctggtacatgtttcagttccaccggatcctgcagtacgccctgccgagacaggagtcccagcggccattcttttggattttcatggacaacttgctgctgaccgaggatgaccaggaaactaccactcggttcctgcagaccgaagccgtgaccctgcaggacgtgagaggccgggactaccagaacgccatgcgggtgtggtccaacatccctggactgaaaagcaagcacgcacctctgacccctaaagaagaggagtacctgcaggcccaggtgcggagcagaagcaagctggacgcccctaaggtggatctgctggtgaagaattgcctcctgcccctgagagagtacttcaagtatttcagccagaatagtctgcccctgggaggcagcggcggcggcccccagaagagcgtgaccttcgaggacgtggccgtgtacttcacccagaccgagtgggacggcctgagccccgcccagagggccctgtacagggacgtgatgctggagaactacggcaacgtggccagcctgggcttcagcctgctgaagcccgccgtgatcctgcagctggagggcgccggcgagctgggcgaccccagcctgctggtggccggcaccgaggtgggcagccagggcgtgtggggcggcccaagcagcggcgcccctcctcccagcggcggcagcccagccggctccccaacctctaccgaggagggcacctctgagtccgccacccccgagagcggccctggcacctccaccgagcccagcgagggcagcgcacccggcagccctgccggcagccccacctccacagaggagggaaccagcaccgagcccagcgaaggcagcgccccaggcaccagcaccgagcctagtgagcaggagattaaacggatcaacaagatcagaagaagacttgtgaaagacagcaacaccaagaaggccggcaagacaggccccatgaaaaccctgctggttagagtgatgacacccgatctgagagagcggctggaaaacctgagaaagaagcctgaaaatatcccccagcccatcagcaatacatctagagccaacctgaataagctgctgaccgattacaccgaaatgaagaaggcgatcctgcatgtgtactgggaagagttccagaaggaccctgtgggcctgatgagccgggtggcccagcctgccagcaagaagatcgatcagaacaagctgaaacctgagatggacgagaagggcaacctgaccaccgccggctttgcctgctctcagtgtggccagcccctgttcgtgtacaagctggagcaggtgtctgagaagggcaaggcttacaccaactacttcggacggtgcaatgtggccgagcacgaaaagctgatcctgctggcccagctgaagcccgagaaggatagcgacgaagccgtgacatatagcctgggaaagtttgggcagagggccctggatttctacagcattcatgtgaccaaggagtccacccaccccgtgaagcccctggcccagatcgccggaaacagatacgcctccggacctgtgggaaaggccctgagcgacgcatgtatgggcacaatcgcctccttcctgtctaagtaccaggacatcatcatcgaacaccagaaggtggtgaagggcaaccagaagagactggagagcctgcgggagctggccggcaaggaaaacctggaataccctagcgtgaccctgccacctcagcctcacaccaaggagggcgttgatgcctacaacgaagtgatcgcccgggtgcgaatgtgggtgaacctgaacctgtggcagaagctgaagctaagcagagatgatgccaagcctctgctgagactgaagggattcccttcctttcctctggtcgagagacaggccaacgaagtggactggtgggacatggtgtgtaacgtgaagaagctgatcaacgagaaaaaggaggatggcaaggtgttttggcagaatctggctggctacaagagacaggaagccctgagaccatacctgagcagcgaggaagatcggaagaagggaaagaaattcgctcggtaccagctgggcgacctgctgctgcacctggaaaagaagcacggcgaggactggggaaaggtgtacgacgaggcctgggagcggattgacaagaaagtggaaggcctgagcaagcacatcaagctggaagaggaacggagaagcgaggacgcccagagcaaggccgccctgaccgactggctgcgggctaaggccagcttcgtgatcgagggcctgaaggaggccgacaaggacgagttctgcagatgcgagctgaagctgcagaagtggtacggggacctgcggggaaagcccttcgccatcgaagccgagaacagcatcctggacatcagcggcttcagcaagcagtacaactgtgccttcatctggcagaaggacggcgtgaagaagctgaacctgtacctgatcatcaactacttcaagggcggcaagctgcggttcaagaagatcaaacctgaagccttcgaagccaacagattctacaccgtgatcaacaaaaagagcggcgagatcgtgcccatggaggtgaacttcaacttcgacgaccccaacctgatcatcctgcctctggcctttggcaagagacagggcagagaattcatctggaacgacctgctgtccctggaaaccggcagcctgaagctggccaacggaagagtgatcgagaagacactgtacaacagaagaacccggcaggatgagcctgccctgttcgtggccctgaccttcgagcggcgggaggtcctggactcctccaatatcaaaccaatgaacctgatcggcgtggcaagaggcgaaaacatccccgccgtgatcgccctgaccgaccccgagggctgcccactgagccggtttaaggatagcctgggaaacccaacccacatcctgagaatcggcgagagctataaggagaagcagcggaccatccaggccaagaaggaggtggagcagcggagagccggcggctacagccggaagtacgccagcaaagccaagaatctggcagacgatatggtgagaaacaccgctagagatctgctgtactacgccgtgacccaggatgccatgctgatcttcgccaacctgagccggggcttcggccggcagggcaagcggaccttcatggccgagagacagtacacacggatggaggactggctgaccgccaagctggcctacgagggcctgagcaagacctacctgtccaagacactggcccagtacacctccaagacatgcagcaactgtgggtttaccatcaccagcgccgactacgacagggtgctggagaagctgaagaagacagcaacaggctggatgaccacaattaacggcaaggagctgaaggtggagggccagattacctactacaacagatacaagagacagaacgtagtcaaggacctgtccgtcgagctggatagactgagcgaagaatctgtgaacaacgacatctcctcctggacaaagggcagaagcggagaagctctgagcctcctgaagaaaagattctcccatagacccgtgcaggagaagttcgtgtgcctgaactgcggcttcgagacacacgcagccgagcaagccgccctgaacatcgccagatcctggctgttcctgcggagccaggagtacaagaaataccagacaaacaagacaaccggcaacaccgataagagagccttcgtcgagacctggcagtccttttaccggaagaagcttaaggaggtgtggaaacctgccgtgcggtctggcggatctggcggaggctccaccagccccaagaaaaagagaaaagtctaagctgccttctgcggggcttgccttctggccatgcccttcttctctcccttgcacctgtacctcttggtctttgaataaagcctgagtaggaaggctagcaaaaaaaaaaaaaaaaaaaaaaaaaaaaaaaaaaaaaaaaaaaaaaaaaaaaaaaaaaaaaaaaaaaaaaaaaaaaaaaa

SEQ ID NO: 12193 - RNA, 5785 nt, synthetic construct
  source 1..5785: mol_type = other RNA
aggaaataagagagaaaagaagagtaagaagaaatataagagccaccatggcccctaagaagaagcgtaaagtgagccggatggaacgcctcgtctacgaggtgcggcagaagtgcagaaacatcgaggacatctgcatctcctgcggatctctgaacgtgaccctggagcacccactgttcatcggcggcatgtgccagaactgtaaaaactgttttctggagtgtgcctatcaatacgacgatgacggctaccagagctactgcaccatctgttgcggcggaagagaggtgctgatgtgtggaaataacaactgctgccggtgcttctgcgtggaatgcgtggacctgctggtgggccccggcgccgcccaggccgctattaaggaagatccttggaactgctacatgtgcggccacaagggcacatacggcctgctgagacggagagaggactggcctagcagactgcagatgttcttcgccaataaccacgaccaggagttcgacccccctaaggtgtaccctcccgtccccgccgagaagagaaagcccatccgggtcctgagcctgttcgatggcatcgccaccggtctgctggtgctgaaggacctgggcatccaggtggataggtacattgcctccgaggtgtgcgaggactccatcaccgtgggaatggtgcgtcatcagggcaagatcatgtacgtgggcgacgtgcggagcgtgacacagaagcatatccaggagtggggccctttcgacctggtgatcggcggcagcccttgcaatgacctgagcatcgtgaacccagcccggaagggcctgtacgagggaaccggcagactgttcttcgagttttacagactgctgcacgacgcccggcctaaggaaggcgacgaccggcccttcttttggctgttcgagaatgtggtggccatgggagtcagcgacaagcgggatattagccggttcctggagagcaaccccgtgatgatcgatgccaaggaagtgagcgccgcccaccgggccagatacttctggggcaatctgcctggcatgaacagacccctggccagcaccgtgaacgacaagctggagctgcaggagtgcctggagcacggccggatcgccaagttcagcaaggtgagaaccatcaccacccgaagcaacagcatcaaacaaggcaaggaccagcactttcctgtgttcatgaacgagaaggaggacatcctgtggtgtaccgagatggagagagtgttcgggttcccagtccactacacagatgtcagcaacatgtctagactggccagacagagactgctgggaagaagctggtccgtccctgtgatcagacacctgttcgcccctctgaaggagtacttcgcctgcgtgagcagcggcaacagcaacgccaacagccggggccccagcttctctagcggcctggtgccactgtccctgagagggagccacatgggccccatggagatctacaaaaccgtgagcgcctggaagcggcagcctgtgcgcgtgctgagcctgtttcggaatatcgataaagtcctgaaaagcctgggattcctggagagcggctctggctccggcggtggcaccctgaagtacgtggaggatgtgacaaacgtggtcagacgggatgtggagaagtggggccccttcgatctggtgtacggcagcacccaacccctgggcagctcttgtgaccggtgccctggctggtacatgtttcagttccaccggatcctgcagtacgccctgccgagacaggagtcccagcggccattcttttggattttcatggacaacttgctgctgaccgaggatgaccaggaaactaccactcggttcctgcagaccgaagccgtgaccctgcaggacgtgagaggccgggactaccagaacgccatgcgggtgtggtccaacatccctggactgaaaagcaagcacgcacctctgacccctaaagaagaggagtacctgcaggcccaggtgcggagcagaagcaagctggacgcccctaaggtggatctgctggtgaagaattgcctcctgcccctgagagagtacttcaagtatttcagccagaatagtctgcccctgggaggcagcggcggcggcccccaggagctggtgaccttccaggacgtggccgtgtacttcacccccgaggaggtgaggtacctggacagctaccagaaggccctgtacaaggacgtgatgctggagaactacggcaacatggccagcctgggcttccccctgagcaagcccgtgctgatcagccagctggagaggggcgaggagccctgggccatggaccccctggtggccaaggagaggaagaccaggaggggcaccagcggcggcccaagcagcggcgcccctcctcccagcggcggcagcccagccggctccccaacctctaccgaggagggcacctctgagtccgccacccccgagagcggccctggcacctccaccgagcccagcgagggcagcgcacccggcagccctgccggcagccccacctccacagaggagggaaccagcaccgagcccagcgaaggcagcgccccaggcaccagcaccgagcctagtgagcaggagattaaacggatcaacaagatcagaagaagacttgtgaaagacagcaacaccaagaaggccggcaagacaggccccatgaaaaccctgctggttagagtgatgacacccgatctgagagagcggctggaaaacctgagaaagaagcctgaaaatatcccccagcccatcagcaatacatctagagccaacctgaataagctgctgaccgattacaccgaaatgaagaaggcgatcctgcatgtgtactgggaagagttccagaaggaccctgtgggcctgatgagccgggtggcccagcctgccagcaagaagatcgatcagaacaagctgaaacctgagatggacgagaagggcaacctgaccaccgccggctttgcctgctctcagtgtggccagcccctgttcgtgtacaagctggagcaggtgtctgagaagggcaaggcttacaccaactacttcggacggtgcaatgtggccgagcacgaaaagctgatcctgctggcccagctgaagcccgagaaggatagcgacgaagccgtgacatatagcctgggaaagtttgggcagagggccctggatttctacagcattcatgtgaccaaggagtccacccaccccgtgaagcccctggcccagatcgccggaaacagatacgcctccggacctgtgggaaaggccctgagcgacgcatgtatgggcacaatcgcctccttcctgtctaagtaccaggacatcatcatcgaacaccagaaggtggtgaagggcaaccagaagagactggagagcctgcgggagctggccggcaaggaaaacctggaataccctagcgtgaccctgccacctcagcctcacaccaaggagggcgttgatgcctacaacgaagtgatcgcccgggtgcgaatgtgggtgaacctgaacctgtggcagaagctgaagctaagcagagatgatgccaagcctctgctgagactgaagggattcccttcctttcctctggtcgagagacaggccaacgaagtggactggtgggacatggtgtgtaacgtgaagaagctgatcaacgagaaaaaggaggatggcaaggtgttttggcagaatctggctggctacaagagacaggaagccctgagaccatacctgagcagcgaggaagatcggaagaagggaaagaaattcgctcggtaccagctgggcgacctgctgctgcacctggaaaagaagcacggcgaggactggggaaaggtgtacgacgaggcctgggagcggattgacaagaaagtggaaggcctgagcaagcacatcaagctggaagaggaacggagaagcgaggacgcccagagcaaggccgccctgaccgactggctgcgggctaaggccagcttcgtgatcgagggcctgaaggaggccgacaaggacgagttctgcagatgcgagctgaagctgcagaagtggtacggggacctgcggggaaagcccttcgccatcgaagccgagaacagcatcctggacatcagcggcttcagcaagcagtacaactgtgccttcatctggcagaaggacggcgtgaagaagctgaacctgtacctgatcatcaactacttcaagggcggcaagctgcggttcaagaagatcaaacctgaagccttcgaagccaacagattctacaccgtgatcaacaaaaagagcggcgagatcgtgcccatggaggtgaacttcaacttcgacgaccccaacctgatcatcctgcctctggcctttggcaagagacagggcagagaattcatctggaacgacctgctgtccctggaaaccggcagcctgaagctggccaacggaagagtgatcgagaagacactgtacaacagaagaacccggcaggatgagcctgccctgttcgtggccctgaccttcgagcggcgggaggtcctggactcctccaatatcaaaccaatgaacctgatcggcgtggcaagaggcgaaaacatccccgccgtgatcgccctgaccgaccccgagggctgcccactgagccggtttaaggatagcctgggaaacccaacccacatcctgagaatcggcgagagctataaggagaagcagcggaccatccaggccaagaaggaggtggagcagcggagagccggcggctacagccggaagtacgccagcaaagccaagaatctggcagacgatatggtgagaaacaccgctagagatctgctgtactacgccgtgacccaggatgccatgctgatcttcgccaacctgagccggggcttcggccggcagggcaagcggaccttcatggccgagagacagtacacacggatggaggactggctgaccgccaagctggcctacgagggcctgagcaagacctacctgtccaagacactggcccagtacacctccaagacatgcagcaactgtgggtttaccatcaccagcgccgactacgacagggtgctggagaagctgaagaagacagcaacaggctggatgaccacaattaacggcaaggagctgaaggtggagggccagattacctactacaacagatacaagagacagaacgtagtcaaggacctgtccgtcgagctggatagactgagcgaagaatctgtgaacaacgacatctcctcctggacaaagggcagaagcggagaagctctgagcctcctgaagaaaagattctcccatagacccgtgcaggagaagttcgtgtgcctgaactgcggcttcgagacacacgcagccgagcaagccgccctgaacatcgccagatcctggctgttcctgcggagccaggagtacaagaaataccagacaaacaagacaaccggcaacaccgataagagagccttcgtcgagacctggcagtccttttaccggaagaagcttaaggaggtgtggaaacctgccgtgcggtctggcggatctggcggaggctccaccagccccaagaaaaagagaaaagtctaagctgccttctgcggggcttgccttctggccatgcccttcttctctcccttgcacctgtacctcttggtctttgaataaagcctgagtaggaaggctagcaaaaaaaaaaaaaaaaaaaaaaaaaaaaaaaaaaaaaaaaaaaaaaaaaaaaaaaaaaaaaaaaaaaaaaaaaaaaaaaa

SEQ ID NO: 12194 - RNA, 5785 nt, synthetic construct
  source 1..5785: mol_type = other RNA
aggaaataagagagaaaagaagagtaagaagaaatataagagccaccatggcccctaagaagaagcgtaaagtgagccggatggaacgcctcgtctacgaggtgcggcagaagtgcagaaacatcgaggacatctgcatctcctgcggatctctgaacgtgaccctggagcacccactgttcatcggcggcatgtgccagaactgtaaaaactgttttctggagtgtgcctatcaatacgacgatgacggctaccagagctactgcaccatctgttgcggcggaagagaggtgctgatgtgtggaaataacaactgctgccggtgcttctgcgtggaatgcgtggacctgctggtgggccccggcgccgcccaggccgctattaaggaagatccttggaactgctacatgtgcggccacaagggcacatacggcctgctgagacggagagaggactggcctagcagactgcagatgttcttcgccaataaccacgaccaggagttcgacccccctaaggtgtaccctcccgtccccgccgagaagagaaagcccatccgggtcctgagcctgttcgatggcatcgccaccggtctgctggtgctgaaggacctgggcatccaggtggataggtacattgcctccgaggtgtgcgaggactccatcaccgtgggaatggtgcgtcatcagggcaagatcatgtacgtgggcgacgtgcggagcgtgacacagaagcatatccaggagtggggccctttcgacctggtgatcggcggcagcccttgcaatgacctgagcatcgtgaacccagcccggaagggcctgtacgagggaaccggcagactgttcttcgagttttacagactgctgcacgacgcccggcctaaggaaggcgacgaccggcccttcttttggctgttcgagaatgtggtggccatgggagtcagcgacaagcgggatattagccggttcctggagagcaaccccgtgatgatcgatgccaaggaagtgagcgccgcccaccgggccagatacttctggggcaatctgcctggcatgaacagacccctggccagcaccgtgaacgacaagctggagctgcaggagtgcctggagcacggccggatcgccaagttcagcaaggtgagaaccatcaccacccgaagcaacagcatcaaacaaggcaaggaccagcactttcctgtgttcatgaacgagaaggaggacatcctgtggtgtaccgagatggagagagtgttcgggttcccagtccactacacagatgtcagcaacatgtctagactggccagacagagactgctgggaagaagctggtccgtccctgtgatcagacacctgttcgcccctctgaaggagtacttcgcctgcgtgagcagcggcaacagcaacgccaacagccggggccccagcttctctagcggcctggtgccactgtccctgagagggagccacatgggccccatggagatctacaaaaccgtgagcgcctggaagcggcagcctgtgcgcgtgctgagcctgtttcggaatatcgataaagtcctgaaaagcctgggattcctggagagcggctctggctccggcggtggcaccctgaagtacgtggaggatgtgacaaacgtggtcagacgggatgtggagaagtggggccccttcgatctggtgtacggcagcacccaacccctgggcagctcttgtgaccggtgccctggctggtacatgtttcagttccaccggatcctgcagtacgccctgccgagacaggagtcccagcggccattcttttggattttcatggacaacttgctgctgaccgaggatgaccaggaaactaccactcggttcctgcagaccgaagccgtgaccctgcaggacgtgagaggccgggactaccagaacgccatgcgggtgtggtccaacatccctggactgaaaagcaagcacgcacctctgacccctaaagaagaggagtacctgcaggcccaggtgcggagcagaagcaagctggacgcccctaaggtggatctgctggtgaagaattgcctcctgcccctgagagagtacttcaagtatttcagccagaatagtctgcccctgggaggcagcggcggcggcaccgtgggcagcgtgatgttcagcgacgtgagcgtggacttcagccaggaggagtgggagtgcctggaccccggccagagggacctgtacagggacgtgatgctggagaactacagcaacctgctgagcatgggcctgtacatccccaagccccaggtgatcagcctgctggagcagggcaaggagccctggatggtgggcagggagctgaccaggggcctgtgcagcgacctggagagcatgggcggcccaagcagcggcgcccctcctcccagcggcggcagcccagccggctccccaacctctaccgaggagggcacctctgagtccgccacccccgagagcggccctggcacctccaccgagcccagcgagggcagcgcacccggcagccctgccggcagccccacctccacagaggagggaaccagcaccgagcccagcgaaggcagcgccccaggcaccagcaccgagcctagtgagcaggagattaaacggatcaacaagatcagaagaagacttgtgaaagacagcaacaccaagaaggccggcaagacaggccccatgaaaaccctgctggttagagtgatgacacccgatctgagagagcggctggaaaacctgagaaagaagcctgaaaatatcccccagcccatcagcaatacatctagagccaacctgaataagctgctgaccgattacaccgaaatgaagaaggcgatcctgcatgtgtactgggaagagttccagaaggaccctgtgggcctgatgagccgggtggcccagcctgccagcaagaagatcgatcagaacaagctgaaacctgagatggacgagaagggcaacctgaccaccgccggctttgcctgctctcagtgtggccagcccctgttcgtgtacaagctggagcaggtgtctgagaagggcaaggcttacaccaactacttcggacggtgcaatgtggccgagcacgaaaagctgatcctgctggcccagctgaagcccgagaaggatagcgacgaagccgtgacatatagcctgggaaagtttgggcagagggccctggatttctacagcattcatgtgaccaaggagtccacccaccccgtgaagcccctggcccagatcgccggaaacagatacgcctccggacctgtgggaaaggccctgagcgacgcatgtatgggcacaatcgcctccttcctgtctaagtaccaggacatcatcatcgaacaccagaaggtggtgaagggcaaccagaagagactggagagcctgcgggagctggccggcaaggaaaacctggaataccctagcgtgaccctgccacctcagcctcacaccaaggagggcgttgatgcctacaacgaagtgatcgcccgggtgcgaatgtgggtgaacctgaacctgtggcagaagctgaagctaagcagagatgatgccaagcctctgctgagactgaagggattcccttcctttcctctggtcgagagacaggccaacgaagtggactggtgggacatggtgtgtaacgtgaagaagctgatcaacgagaaaaaggaggatggcaaggtgttttggcagaatctggctggctacaagagacaggaagccctgagaccatacctgagcagcgaggaagatcggaagaagggaaagaaattcgctcggtaccagctgggcgacctgctgctgcacctggaaaagaagcacggcgaggactggggaaaggtgtacgacgaggcctgggagcggattgacaagaaagtggaaggcctgagcaagcacatcaagctggaagaggaacggagaagcgaggacgcccagagcaaggccgccctgaccgactggctgcgggctaaggccagcttcgtgatcgagggcctgaaggaggccgacaaggacgagttctgcagatgcgagctgaagctgcagaagtggtacggggacctgcggggaaagcccttcgccatcgaagccgagaacagcatcctggacatcagcggcttcagcaagcagtacaactgtgccttcatctggcagaaggacggcgtgaagaagctgaacctgtacctgatcatcaactacttcaagggcggcaagctgcggttcaagaagatcaaacctgaagccttcgaagccaacagattctacaccgtgatcaacaaaaagagcggcgagatcgtgcccatggaggtgaacttcaacttcgacgaccccaacctgatcatcctgcctctggcctttggcaagagacagggcagagaattcatctggaacgacctgctgtccctggaaaccggcagcctgaagctggccaacggaagagtgatcgagaagacactgtacaacagaagaacccggcaggatgagcctgccctgttcgtggccctgaccttcgagcggcgggaggtcctggactcctccaatatcaaaccaatgaacctgatcggcgtggcaagaggcgaaaacatccccgccgtgatcgccctgaccgaccccgagggctgcccactgagccggtttaaggatagcctgggaaacccaacccacatcctgagaatcggcgagagctataaggagaagcagcggaccatccaggccaagaaggaggtggagcagcggagagccggcggctacagccggaagtacgccagcaaagccaagaatctggcagacgatatggtgagaaacaccgctagagatctgctgtactacgccgtgacccaggatgccatgctgatcttcgccaacctgagccggggcttcggccggcagggcaagcggaccttcatggccgagagacagtacacacggatggaggactggctgaccgccaagctggcctacgagggcctgagcaagacctacctgtccaagacactggcccagtacacctccaagacatgcagcaactgtgggtttaccatcaccagcgccgactacgacagggtgctggagaagctgaagaagacagcaacaggctggatgaccacaattaacggcaaggagctgaaggtggagggccagattacctactacaacagatacaagagacagaacgtagtcaaggacctgtccgtcgagctggatagactgagcgaagaatctgtgaacaacgacatctcctcctggacaaagggcagaagcggagaagctctgagcctcctgaagaaaagattctcccatagacccgtgcaggagaagttcgtgtgcctgaactgcggcttcgagacacacgcagccgagcaagccgccctgaacatcgccagatcctggctgttcctgcggagccaggagtacaagaaataccagacaaacaagacaaccggcaacaccgataagagagccttcgtcgagacctggcagtccttttaccggaagaagcttaaggaggtgtggaaacctgccgtgcggtctggcggatctggcggaggctccaccagccccaagaaaaagagaaaagtctaagctgccttctgcggggcttgccttctggccatgcccttcttctctcccttgcacctgtacctcttggtctttgaataaagcctgagtaggaaggctagcaaaaaaaaaaaaaaaaaaaaaaaaaaaaaaaaaaaaaaaaaaaaaaaaaaaaaaaaaaaaaaaaaaaaaaaaaaaaaaaa

SEQ ID NO: 12195 - RNA, 5785 nt, synthetic construct
  source 1..5785: mol_type = other RNA
aggaaataagagagaaaagaagagtaagaagaaatataagagccaccatggcccctaagaagaagcgtaaagtgagccggatggaacgcctcgtctacgaggtgcggcagaagtgcagaaacatcgaggacatctgcatctcctgcggatctctgaacgtgaccctggagcacccactgttcatcggcggcatgtgccagaactgtaaaaactgttttctggagtgtgcctatcaatacgacgatgacggctaccagagctactgcaccatctgttgcggcggaagagaggtgctgatgtgtggaaataacaactgctgccggtgcttctgcgtggaatgcgtggacctgctggtgggccccggcgccgcccaggccgctattaaggaagatccttggaactgctacatgtgcggccacaagggcacatacggcctgctgagacggagagaggactggcctagcagactgcagatgttcttcgccaataaccacgaccaggagttcgacccccctaaggtgtaccctcccgtccccgccgagaagagaaagcccatccgggtcctgagcctgttcgatggcatcgccaccggtctgctggtgctgaaggacctgggcatccaggtggataggtacattgcctccgaggtgtgcgaggactccatcaccgtgggaatggtgcgtcatcagggcaagatcatgtacgtgggcgacgtgcggagcgtgacacagaagcatatccaggagtggggccctttcgacctggtgatcggcggcagcccttgcaatgacctgagcatcgtgaacccagcccggaagggcctgtacgagggaaccggcagactgttcttcgagttttacagactgctgcacgacgcccggcctaaggaaggcgacgaccggcccttcttttggctgttcgagaatgtggtggccatgggagtcagcgacaagcgggatattagccggttcctggagagcaaccccgtgatgatcgatgccaaggaagtgagcgccgcccaccgggccagatacttctggggcaatctgcctggcatgaacagacccctggccagcaccgtgaacgacaagctggagctgcaggagtgcctggagcacggccggatcgccaagttcagcaaggtgagaaccatcaccacccgaagcaacagcatcaaacaaggcaaggaccagcactttcctgtgttcatgaacgagaaggaggacatcctgtggtgtaccgagatggagagagtgttcgggttcccagtccactacacagatgtcagcaacatgtctagactggccagacagagactgctgggaagaagctggtccgtccctgtgatcagacacctgttcgcccctctgaaggagtacttcgcctgcgtgagcagcggcaacagcaacgccaacagccggggccccagcttctctagcggcctggtgccactgtccctgagagggagccacatgggccccatggagatctacaaaaccgtgagcgcctggaagcggcagcctgtgcgcgtgctgagcctgtttcggaatatcgataaagtcctgaaaagcctgggattcctggagagcggctctggctccggcggtggcaccctgaagtacgtggaggatgtgacaaacgtggtcagacgggatgtggagaagtggggccccttcgatctggtgtacggcagcacccaacccctgggcagctcttgtgaccggtgccctggctggtacatgtttcagttccaccggatcctgcagtacgccctgccgagacaggagtcccagcggccattcttttggattttcatggacaacttgctgctgaccgaggatgaccaggaaactaccactcggttcctgcagaccgaagccgtgaccctgcaggacgtgagaggccgggactaccagaacgccatgcgggtgtggtccaacatccctggactgaaaagcaagcacgcacctctgacccctaaagaagaggagtacctgcaggcccaggtgcggagcagaagcaagctggacgcccctaaggtggatctgctggtgaagaattgcctcctgcccctgagagagtacttcaagtatttcagccagaatagtctgcccctgggaggcagcggcggcggcgtgcaggagcccgtgaccttcaaggacgtggccgtggacttcacccaggaggagtggggccagctggacctggtgcagaggaccctgtacagggacgtgatgctggagacctacggccacctgctgagcgtgggcaaccagatcgccaagcccgaggtgatcagcctgctggagcagggcgaggagccctggagcgtggagcaggcctgcccccagcacacctgccccgagtggatgaggaacggcggcccaagcagcggcgcccctcctcccagcggcggcagcccagccggctccccaacctctaccgaggagggcacctctgagtccgccacccccgagagcggccctggcacctccaccgagcccagcgagggcagcgcacccggcagccctgccggcagccccacctccacagaggagggaaccagcaccgagcccagcgaaggcagcgccccaggcaccagcaccgagcctagtgagcaggagattaaacggatcaacaagatcagaagaagacttgtgaaagacagcaacaccaagaaggccggcaagacaggccccatgaaaaccctgctggttagagtgatgacacccgatctgagagagcggctggaaaacctgagaaagaagcctgaaaatatcccccagcccatcagcaatacatctagagccaacctgaataagctgctgaccgattacaccgaaatgaagaaggcgatcctgcatgtgtactgggaagagttccagaaggaccctgtgggcctgatgagccgggtggcccagcctgccagcaagaagatcgatcagaacaagctgaaacctgagatggacgagaagggcaacctgaccaccgccggctttgcctgctctcagtgtggccagcccctgttcgtgtacaagctggagcaggtgtctgagaagggcaaggcttacaccaactacttcggacggtgcaatgtggccgagcacgaaaagctgatcctgctggcccagctgaagcccgagaaggatagcgacgaagccgtgacatatagcctgggaaagtttgggcagagggccctggatttctacagcattcatgtgaccaaggagtccacccaccccgtgaagcccctggcccagatcgccggaaacagatacgcctccggacctgtgggaaaggccctgagcgacgcatgtatgggcacaatcgcctccttcctgtctaagtaccaggacatcatcatcgaacaccagaaggtggtgaagggcaaccagaagagactggagagcctgcgggagctggccggcaaggaaaacctggaataccctagcgtgaccctgccacctcagcctcacaccaaggagggcgttgatgcctacaacgaagtgatcgcccgggtgcgaatgtgggtgaacctgaacctgtggcagaagctgaagctaagcagagatgatgccaagcctctgctgagactgaagggattcccttcctttcctctggtcgagagacaggccaacgaagtggactggtgggacatggtgtgtaacgtgaagaagctgatcaacgagaaaaaggaggatggcaaggtgttttggcagaatctggctggctacaagagacaggaagccctgagaccatacctgagcagcgaggaagatcggaagaagggaaagaaattcgctcggtaccagctgggcgacctgctgctgcacctggaaaagaagcacggcgaggactggggaaaggtgtacgacgaggcctgggagcggattgacaagaaagtggaaggcctgagcaagcacatcaagctggaagaggaacggagaagcgaggacgcccagagcaaggccgccctgaccgactggctgcgggctaaggccagcttcgtgatcgagggcctgaaggaggccgacaaggacgagttctgcagatgcgagctgaagctgcagaagtggtacggggacctgcggggaaagcccttcgccatcgaagccgagaacagcatcctggacatcagcggcttcagcaagcagtacaactgtgccttcatctggcagaaggacggcgtgaagaagctgaacctgtacctgatcatcaactacttcaagggcggcaagctgcggttcaagaagatcaaacctgaagccttcgaagccaacagattctacaccgtgatcaacaaaaagagcggcgagatcgtgcccatggaggtgaacttcaacttcgacgaccccaacctgatcatcctgcctctggcctttggcaagagacagggcagagaattcatctggaacgacctgctgtccctggaaaccggcagcctgaagctggccaacggaagagtgatcgagaagacactgtacaacagaagaacccggcaggatgagcctgccctgttcgtggccctgaccttcgagcggcgggaggtcctggactcctccaatatcaaaccaatgaacctgatcggcgtggcaagaggcgaaaacatccccgccgtgatcgccctgaccgaccccgagggctgcccactgagccggtttaaggatagcctgggaaacccaacccacatcctgagaatcggcgagagctataaggagaagcagcggaccatccaggccaagaaggaggtggagcagcggagagccggcggctacagccggaagtacgccagcaaagccaagaatctggcagacgatatggtgagaaacaccgctagagatctgctgtactacgccgtgacccaggatgccatgctgatcttcgccaacctgagccggggcttcggccggcagggcaagcggaccttcatggccgagagacagtacacacggatggaggactggctgaccgccaagctggcctacgagggcctgagcaagacctacctgtccaagacactggcccagtacacctccaagacatgcagcaactgtgggtttaccatcaccagcgccgactacgacagggtgctggagaagctgaagaagacagcaacaggctggatgaccacaattaacggcaaggagctgaaggtggagggccagattacctactacaacagatacaagagacagaacgtagtcaaggacctgtccgtcgagctggatagactgagcgaagaatctgtgaacaacgacatctcctcctggacaaagggcagaagcggagaagctctgagcctcctgaagaaaagattctcccatagacccgtgcaggagaagttcgtgtgcctgaactgcggcttcgagacacacgcagccgagcaagccgccctgaacatcgccagatcctggctgttcctgcggagccaggagtacaagaaataccagacaaacaagacaaccggcaacaccgataagagagccttcgtcgagacctggcagtccttttaccggaagaagcttaaggaggtgtggaaacctgccgtgcggtctggcggatctggcggaggctccaccagccccaagaaaaagagaaaagtctaagctgccttctgcggggcttgccttctggccatgcccttcttctctcccttgcacctgtacctcttggtctttgaataaagcctgagtaggaaggctagcaaaaaaaaaaaaaaaaaaaaaaaaaaaaaaaaaaaaaaaaaaaaaaaaaaaaaaaaaaaaaaaaaaaaaaaaaaaaaaaa

SEQ ID NO: 12196 - RNA, 5785 nt, synthetic construct
  source 1..5785: mol_type = other RNA
aggaaataagagagaaaagaagagtaagaagaaatataagagccaccatggcccctaagaagaagcgtaaagtgagccggatggaacgcctcgtctacgaggtgcggcagaagtgcagaaacatcgaggacatctgcatctcctgcggatctctgaacgtgaccctggagcacccactgttcatcggcggcatgtgccagaactgtaaaaactgttttctggagtgtgcctatcaatacgacgatgacggctaccagagctactgcaccatctgttgcggcggaagagaggtgctgatgtgtggaaataacaactgctgccggtgcttctgcgtggaatgcgtggacctgctggtgggccccggcgccgcccaggccgctattaaggaagatccttggaactgctacatgtgcggccacaagggcacatacggcctgctgagacggagagaggactggcctagcagactgcagatgttcttcgccaataaccacgaccaggagttcgacccccctaaggtgtaccctcccgtccccgccgagaagagaaagcccatccgggtcctgagcctgttcgatggcatcgccaccggtctgctggtgctgaaggacctgggcatccaggtggataggtacattgcctccgaggtgtgcgaggactccatcaccgtgggaatggtgcgtcatcagggcaagatcatgtacgtgggcgacgtgcggagcgtgacacagaagcatatccaggagtggggccctttcgacctggtgatcggcggcagcccttgcaatgacctgagcatcgtgaacccagcccggaagggcctgtacgagggaaccggcagactgttcttcgagttttacagactgctgcacgacgcccggcctaaggaaggcgacgaccggcccttcttttggctgttcgagaatgtggtggccatgggagtcagcgacaagcgggatattagccggttcctggagagcaaccccgtgatgatcgatgccaaggaagtgagcgccgcccaccgggccagatacttctggggcaatctgcctggcatgaacagacccctggccagcaccgtgaacgacaagctggagctgcaggagtgcctggagcacggccggatcgccaagttcagcaaggtgagaaccatcaccacccgaagcaacagcatcaaacaaggcaaggaccagcactttcctgtgttcatgaacgagaaggaggacatcctgtggtgtaccgagatggagagagtgttcgggttcccagtccactacacagatgtcagcaacatgtctagactggccagacagagactgctgggaagaagctggtccgtccctgtgatcagacacctgttcgcccctctgaaggagtacttcgcctgcgtgagcagcggcaacagcaacgccaacagccggggccccagcttctctagcggcctggtgccactgtccctgagagggagccacatgggccccatggagatctacaaaaccgtgagcgcctggaagcggcagcctgtgcgcgtgctgagcctgtttcggaatatcgataaagtcctgaaaagcctgggattcctggagagcggctctggctccggcggtggcaccctgaagtacgtggaggatgtgacaaacgtggtcagacgggatgtggagaagtggggccccttcgatctggtgtacggcagcacccaacccctgggcagctcttgtgaccggtgccctggctggtacatgtttcagttccaccggatcctgcagtacgccctgccgagacaggagtcccagcggccattcttttggattttcatggacaacttgctgctgaccgaggatgaccaggaaactaccactcggttcctgcagaccgaagccgtgaccctgcaggacgtgagaggccgggactaccagaacgccatgcgggtgtggtccaacatccctggactgaaaagcaagcacgcacctctgacccctaaagaagaggagtacctgcaggcccaggtgcggagcagaagcaagctggacgcccctaaggtggatctgctggtgaagaattgcctcctgcccctgagagagtacttcaagtatttcagccagaatagtctgcccctgggaggcagcggcggcggcttccaggccagcgtggtgttcgaggacgtggccgtgaacttcacccccgaggagtgggccctgctgaacaggggccagaggaagctgtacagggacgtgatgctggagacctgcaggaacctgagcgccgtgggcaaggacggcagcatccccagcctggtgttcagcgagaagcagaagttccacagcagcggcgacctgaccaggatgcaggagggcctgctgaggagccccctggtggagggcggcccaagcagcggcgcccctcctcccagcggcggcagcccagccggctccccaacctctaccgaggagggcacctctgagtccgccacccccgagagcggccctggcacctccaccgagcccagcgagggcagcgcacccggcagccctgccggcagccccacctccacagaggagggaaccagcaccgagcccagcgaaggcagcgccccaggcaccagcaccgagcctagtgagcaggagattaaacggatcaacaagatcagaagaagacttgtgaaagacagcaacaccaagaaggccggcaagacaggccccatgaaaaccctgctggttagagtgatgacacccgatctgagagagcggctggaaaacctgagaaagaagcctgaaaatatcccccagcccatcagcaatacatctagagccaacctgaataagctgctgaccgattacaccgaaatgaagaaggcgatcctgcatgtgtactgggaagagttccagaaggaccctgtgggcctgatgagccgggtggcccagcctgccagcaagaagatcgatcagaacaagctgaaacctgagatggacgagaagggcaacctgaccaccgccggctttgcctgctctcagtgtggccagcccctgttcgtgtacaagctggagcaggtgtctgagaagggcaaggcttacaccaactacttcggacggtgcaatgtggccgagcacgaaaagctgatcctgctggcccagctgaagcccgagaaggatagcgacgaagccgtgacatatagcctgggaaagtttgggcagagggccctggatttctacagcattcatgtgaccaaggagtccacccaccccgtgaagcccctggcccagatcgccggaaacagatacgcctccggacctgtgggaaaggccctgagcgacgcatgtatgggcacaatcgcctccttcctgtctaagtaccaggacatcatcatcgaacaccagaaggtggtgaagggcaaccagaagagactggagagcctgcgggagctggccggcaaggaaaacctggaataccctagcgtgaccctgccacctcagcctcacaccaaggagggcgttgatgcctacaacgaagtgatcgcccgggtgcgaatgtgggtgaacctgaacctgtggcagaagctgaagctaagcagagatgatgccaagcctctgctgagactgaagggattcccttcctttcctctggtcgagagacaggccaacgaagtggactggtgggacatggtgtgtaacgtgaagaagctgatcaacgagaaaaaggaggatggcaaggtgttttggcagaatctggctggctacaagagacaggaagccctgagaccatacctgagcagcgaggaagatcggaagaagggaaagaaattcgctcggtaccagctgggcgacctgctgctgcacctggaaaagaagcacggcgaggactggggaaaggtgtacgacgaggcctgggagcggattgacaagaaagtggaaggcctgagcaagcacatcaagctggaagaggaacggagaagcgaggacgcccagagcaaggccgccctgaccgactggctgcgggctaaggccagcttcgtgatcgagggcctgaaggaggccgacaaggacgagttctgcagatgcgagctgaagctgcagaagtggtacggggacctgcggggaaagcccttcgccatcgaagccgagaacagcatcctggacatcagcggcttcagcaagcagtacaactgtgccttcatctggcagaaggacggcgtgaagaagctgaacctgtacctgatcatcaactacttcaagggcggcaagctgcggttcaagaagatcaaacctgaagccttcgaagccaacagattctacaccgtgatcaacaaaaagagcggcgagatcgtgcccatggaggtgaacttcaacttcgacgaccccaacctgatcatcctgcctctggcctttggcaagagacagggcagagaattcatctggaacgacctgctgtccctggaaaccggcagcctgaagctggccaacggaagagtgatcgagaagacactgtacaacagaagaacccggcaggatgagcctgccctgttcgtggccctgaccttcgagcggcgggaggtcctggactcctccaatatcaaaccaatgaacctgatcggcgtggcaagaggcgaaaacatccccgccgtgatcgccctgaccgaccccgagggctgcccactgagccggtttaaggatagcctgggaaacccaacccacatcctgagaatcggcgagagctataaggagaagcagcggaccatccaggccaagaaggaggtggagcagcggagagccggcggctacagccggaagtacgccagcaaagccaagaatctggcagacgatatggtgagaaacaccgctagagatctgctgtactacgccgtgacccaggatgccatgctgatcttcgccaacctgagccggggcttcggccggcagggcaagcggaccttcatggccgagagacagtacacacggatggaggactggctgaccgccaagctggcctacgagggcctgagcaagacctacctgtccaagacactggcccagtacacctccaagacatgcagcaactgtgggtttaccatcaccagcgccgactacgacagggtgctggagaagctgaagaagacagcaacaggctggatgaccacaattaacggcaaggagctgaaggtggagggccagattacctactacaacagatacaagagacagaacgtagtcaaggacctgtccgtcgagctggatagactgagcgaagaatctgtgaacaacgacatctcctcctggacaaagggcagaagcggagaagctctgagcctcctgaagaaaagattctcccatagacccgtgcaggagaagttcgtgtgcctgaactgcggcttcgagacacacgcagccgagcaagccgccctgaacatcgccagatcctggctgttcctgcggagccaggagtacaagaaataccagacaaacaagacaaccggcaacaccgataagagagccttcgtcgagacctggcagtccttttaccggaagaagcttaaggaggtgtggaaacctgccgtgcggtctggcggatctggcggaggctccaccagccccaagaaaaagagaaaagtctaagctgccttctgcggggcttgccttctggccatgcccttcttctctcccttgcacctgtacctcttggtctttgaataaagcctgagtaggaaggctagcaaaaaaaaaaaaaaaaaaaaaaaaaaaaaaaaaaaaaaaaaaaaaaaaaaaaaaaaaaaaaaaaaaaaaaaaaaaaaaaa

SEQ ID NO: 12197 - RNA, 5785 nt, synthetic construct
  source 1..5785: mol_type = other RNA
aggaaataagagagaaaagaagagtaagaagaaatataagagccaccatggcccctaagaagaagcgtaaagtgagccggatggaacgcctcgtctacgaggtgcggcagaagtgcagaaacatcgaggacatctgcatctcctgcggatctctgaacgtgaccctggagcacccactgttcatcggcggcatgtgccagaactgtaaaaactgttttctggagtgtgcctatcaatacgacgatgacggctaccagagctactgcaccatctgttgcggcggaagagaggtgctgatgtgtggaaataacaactgctgccggtgcttctgcgtggaatgcgtggacctgctggtgggccccggcgccgcccaggccgctattaaggaagatccttggaactgctacatgtgcggccacaagggcacatacggcctgctgagacggagagaggactggcctagcagactgcagatgttcttcgccaataaccacgaccaggagttcgacccccctaaggtgtaccctcccgtccccgccgagaagagaaagcccatccgggtcctgagcctgttcgatggcatcgccaccggtctgctggtgctgaaggacctgggcatccaggtggataggtacattgcctccgaggtgtgcgaggactccatcaccgtgggaatggtgcgtcatcagggcaagatcatgtacgtgggcgacgtgcggagcgtgacacagaagcatatccaggagtggggccctttcgacctggtgatcggcggcagcccttgcaatgacctgagcatcgtgaacccagcccggaagggcctgtacgagggaaccggcagactgttcttcgagttttacagactgctgcacgacgcccggcctaaggaaggcgacgaccggcccttcttttggctgttcgagaatgtggtggccatgggagtcagcgacaagcgggatattagccggttcctggagagcaaccccgtgatgatcgatgccaaggaagtgagcgccgcccaccgggccagatacttctggggcaatctgcctggcatgaacagacccctggccagcaccgtgaacgacaagctggagctgcaggagtgcctggagcacggccggatcgccaagttcagcaaggtgagaaccatcaccacccgaagcaacagcatcaaacaaggcaaggaccagcactttcctgtgttcatgaacgagaaggaggacatcctgtggtgtaccgagatggagagagtgttcgggttcccagtccactacacagatgtcagcaacatgtctagactggccagacagagactgctgggaagaagctggtccgtccctgtgatcagacacctgttcgcccctctgaaggagtacttcgcctgcgtgagcagcggcaacagcaacgccaacagccggggccccagcttctctagcggcctggtgccactgtccctgagagggagccacatgggccccatggagatctacaaaaccgtgagcgcctggaagcggcagcctgtgcgcgtgctgagcctgtttcggaatatcgataaagtcctgaaaagcctgggattcctggagagcggctctggctccggcggtggcaccctgaagtacgtggaggatgtgacaaacgtggtcagacgggatgtggagaagtggggccccttcgatctggtgtacggcagcacccaacccctgggcagctcttgtgaccggtgccctggctggtacatgtttcagttccaccggatcctgcagtacgccctgccgagacaggagtcccagcggccattcttttggattttcatggacaacttgctgctgaccgaggatgaccaggaaactaccactcggttcctgcagaccgaagccgtgaccctgcaggacgtgagaggccgggactaccagaacgccatgcgggtgtggtccaacatccctggactgaaaagcaagcacgcacctctgacccctaaagaagaggagtacctgcaggcccaggtgcggagcagaagcaagctggacgcccctaaggtggatctgctggtgaagaattgcctcctgcccctgagagagtacttcaagtatttcagccagaatagtctgcccctgggaggcagcggcggcggcagcctgggcagcgagctgttcagggacgtggccatcgtgttcagccaggaggagtggcagtggctggcccccgcccagagggacctgtacagggacgtgatgctggagacctacagcaacctggtgagcctgggcctggccatcagcaagcccgacgtgatcagcttcctggagcagggcaaggagccctggatggtggagagggtggccaccggcgacctgtgccccgtgctggagagcggcggcggcccaagcagcggcgcccctcctcccagcggcggcagcccagccggctccccaacctctaccgaggagggcacctctgagtccgccacccccgagagcggccctggcacctccaccgagcccagcgagggcagcgcacccggcagccctgccggcagccccacctccacagaggagggaaccagcaccgagcccagcgaaggcagcgccccaggcaccagcaccgagcctagtgagcaggagattaaacggatcaacaagatcagaagaagacttgtgaaagacagcaacaccaagaaggccggcaagacaggccccatgaaaaccctgctggttagagtgatgacacccgatctgagagagcggctggaaaacctgagaaagaagcctgaaaatatcccccagcccatcagcaatacatctagagccaacctgaataagctgctgaccgattacaccgaaatgaagaaggcgatcctgcatgtgtactgggaagagttccagaaggaccctgtgggcctgatgagccgggtggcccagcctgccagcaagaagatcgatcagaacaagctgaaacctgagatggacgagaagggcaacctgaccaccgccggctttgcctgctctcagtgtggccagcccctgttcgtgtacaagctggagcaggtgtctgagaagggcaaggcttacaccaactacttcggacggtgcaatgtggccgagcacgaaaagctgatcctgctggcccagctgaagcccgagaaggatagcgacgaagccgtgacatatagcctgggaaagtttgggcagagggccctggatttctacagcattcatgtgaccaaggagtccacccaccccgtgaagcccctggcccagatcgccggaaacagatacgcctccggacctgtgggaaaggccctgagcgacgcatgtatgggcacaatcgcctccttcctgtctaagtaccaggacatcatcatcgaacaccagaaggtggtgaagggcaaccagaagagactggagagcctgcgggagctggccggcaaggaaaacctggaataccctagcgtgaccctgccacctcagcctcacaccaaggagggcgttgatgcctacaacgaagtgatcgcccgggtgcgaatgtgggtgaacctgaacctgtggcagaagctgaagctaagcagagatgatgccaagcctctgctgagactgaagggattcccttcctttcctctggtcgagagacaggccaacgaagtggactggtgggacatggtgtgtaacgtgaagaagctgatcaacgagaaaaaggaggatggcaaggtgttttggcagaatctggctggctacaagagacaggaagccctgagaccatacctgagcagcgaggaagatcggaagaagggaaagaaattcgctcggtaccagctgggcgacctgctgctgcacctggaaaagaagcacggcgaggactggggaaaggtgtacgacgaggcctgggagcggattgacaagaaagtggaaggcctgagcaagcacatcaagctggaagaggaacggagaagcgaggacgcccagagcaaggccgccctgaccgactggctgcgggctaaggccagcttcgtgatcgagggcctgaaggaggccgacaaggacgagttctgcagatgcgagctgaagctgcagaagtggtacggggacctgcggggaaagcccttcgccatcgaagccgagaacagcatcctggacatcagcggcttcagcaagcagtacaactgtgccttcatctggcagaaggacggcgtgaagaagctgaacctgtacctgatcatcaactacttcaagggcggcaagctgcggttcaagaagatcaaacctgaagccttcgaagccaacagattctacaccgtgatcaacaaaaagagcggcgagatcgtgcccatggaggtgaacttcaacttcgacgaccccaacctgatcatcctgcctctggcctttggcaagagacagggcagagaattcatctggaacgacctgctgtccctggaaaccggcagcctgaagctggccaacggaagagtgatcgagaagacactgtacaacagaagaacccggcaggatgagcctgccctgttcgtggccctgaccttcgagcggcgggaggtcctggactcctccaatatcaaaccaatgaacctgatcggcgtggcaagaggcgaaaacatccccgccgtgatcgccctgaccgaccccgagggctgcccactgagccggtttaaggatagcctgggaaacccaacccacatcctgagaatcggcgagagctataaggagaagcagcggaccatccaggccaagaaggaggtggagcagcggagagccggcggctacagccggaagtacgccagcaaagccaagaatctggcagacgatatggtgagaaacaccgctagagatctgctgtactacgccgtgacccaggatgccatgctgatcttcgccaacctgagccggggcttcggccggcagggcaagcggaccttcatggccgagagacagtacacacggatggaggactggctgaccgccaagctggcctacgagggcctgagcaagacctacctgtccaagacactggcccagtacacctccaagacatgcagcaactgtgggtttaccatcaccagcgccgactacgacagggtgctggagaagctgaagaagacagcaacaggctggatgaccacaattaacggcaaggagctgaaggtggagggccagattacctactacaacagatacaagagacagaacgtagtcaaggacctgtccgtcgagctggatagactgagcgaagaatctgtgaacaacgacatctcctcctggacaaagggcagaagcggagaagctctgagcctcctgaagaaaagattctcccatagacccgtgcaggagaagttcgtgtgcctgaactgcggcttcgagacacacgcagccgagcaagccgccctgaacatcgccagatcctggctgttcctgcggagccaggagtacaagaaataccagacaaacaagacaaccggcaacaccgataagagagccttcgtcgagacctggcagtccttttaccggaagaagcttaaggaggtgtggaaacctgccgtgcggtctggcggatctggcggaggctccaccagccccaagaaaaagagaaaagtctaagctgccttctgcggggcttgccttctggccatgcccttcttctctcccttgcacctgtacctcttggtctttgaataaagcctgagtaggaaggctagcaaaaaaaaaaaaaaaaaaaaaaaaaaaaaaaaaaaaaaaaaaaaaaaaaaaaaaaaaaaaaaaaaaaaaaaaaaaaaaaa

SEQ ID NO: 12198 - RNA, 5785 nt, synthetic construct
  source 1..5785: mol_type = other RNA
aggaaataagagagaaaagaagagtaagaagaaatataagagccaccatggcccctaagaagaagcgtaaagtgagccggatggaacgcctcgtctacgaggtgcggcagaagtgcagaaacatcgaggacatctgcatctcctgcggatctctgaacgtgaccctggagcacccactgttcatcggcggcatgtgccagaactgtaaaaactgttttctggagtgtgcctatcaatacgacgatgacggctaccagagctactgcaccatctgttgcggcggaagagaggtgctgatgtgtggaaataacaactgctgccggtgcttctgcgtggaatgcgtggacctgctggtgggccccggcgccgcccaggccgctattaaggaagatccttggaactgctacatgtgcggccacaagggcacatacggcctgctgagacggagagaggactggcctagcagactgcagatgttcttcgccaataaccacgaccaggagttcgacccccctaaggtgtaccctcccgtccccgccgagaagagaaagcccatccgggtcctgagcctgttcgatggcatcgccaccggtctgctggtgctgaaggacctgggcatccaggtggataggtacattgcctccgaggtgtgcgaggactccatcaccgtgggaatggtgcgtcatcagggcaagatcatgtacgtgggcgacgtgcggagcgtgacacagaagcatatccaggagtggggccctttcgacctggtgatcggcggcagcccttgcaatgacctgagcatcgtgaacccagcccggaagggcctgtacgagggaaccggcagactgttcttcgagttttacagactgctgcacgacgcccggcctaaggaaggcgacgaccggcccttcttttggctgttcgagaatgtggtggccatgggagtcagcgacaagcgggatattagccggttcctggagagcaaccccgtgatgatcgatgccaaggaagtgagcgccgcccaccgggccagatacttctggggcaatctgcctggcatgaacagacccctggccagcaccgtgaacgacaagctggagctgcaggagtgcctggagcacggccggatcgccaagttcagcaaggtgagaaccatcaccacccgaagcaacagcatcaaacaaggcaaggaccagcactttcctgtgttcatgaacgagaaggaggacatcctgtggtgtaccgagatggagagagtgttcgggttcccagtccactacacagatgtcagcaacatgtctagactggccagacagagactgctgggaagaagctggtccgtccctgtgatcagacacctgttcgcccctctgaaggagtacttcgcctgcgtgagcagcggcaacagcaacgccaacagccggggccccagcttctctagcggcctggtgccactgtccctgagagggagccacatgggccccatggagatctacaaaaccgtgagcgcctggaagcggcagcctgtgcgcgtgctgagcctgtttcggaatatcgataaagtcctgaaaagcctgggattcctggagagcggctctggctccggcggtggcaccctgaagtacgtggaggatgtgacaaacgtggtcagacgggatgtggagaagtggggccccttcgatctggtgtacggcagcacccaacccctgggcagctcttgtgaccggtgccctggctggtacatgtttcagttccaccggatcctgcagtacgccctgccgagacaggagtcccagcggccattcttttggattttcatggacaacttgctgctgaccgaggatgaccaggaaactaccactcggttcctgcagaccgaagccgtgaccctgcaggacgtgagaggccgggactaccagaacgccatgcgggtgtggtccaacatccctggactgaaaagcaagcacgcacctctgacccctaaagaagaggagtacctgcaggcccaggtgcggagcagaagcaagctggacgcccctaaggtggatctgctggtgaagaattgcctcctgcccctgagagagtacttcaagtatttcagccagaatagtctgcccctgggaggcagcggcggcggcccccaggagagcgtggccttcgacgacgtggccgtgtacttcaccaagaaggagtgggccatcatggtgcccgaccagagggccctgtacagggacgtgatgctggagaactacgaggccgtggccttcgtggccgtgccccccaccagcaagcccgccctgatcagccacctggagcagggcaaggagccctgcttcacccagccccagggcgtgctgagcaggagggactggagggccggcggcggcccaagcagcggcgcccctcctcccagcggcggcagcccagccggctccccaacctctaccgaggagggcacctctgagtccgccacccccgagagcggccctggcacctccaccgagcccagcgagggcagcgcacccggcagccctgccggcagccccacctccacagaggagggaaccagcaccgagcccagcgaaggcagcgccccaggcaccagcaccgagcctagtgagcaggagattaaacggatcaacaagatcagaagaagacttgtgaaagacagcaacaccaagaaggccggcaagacaggccccatgaaaaccctgctggttagagtgatgacacccgatctgagagagcggctggaaaacctgagaaagaagcctgaaaatatcccccagcccatcagcaatacatctagagccaacctgaataagctgctgaccgattacaccgaaatgaagaaggcgatcctgcatgtgtactgggaagagttccagaaggaccctgtgggcctgatgagccgggtggcccagcctgccagcaagaagatcgatcagaacaagctgaaacctgagatggacgagaagggcaacctgaccaccgccggctttgcctgctctcagtgtggccagcccctgttcgtgtacaagctggagcaggtgtctgagaagggcaaggcttacaccaactacttcggacggtgcaatgtggccgagcacgaaaagctgatcctgctggcccagctgaagcccgagaaggatagcgacgaagccgtgacatatagcctgggaaagtttgggcagagggccctggatttctacagcattcatgtgaccaaggagtccacccaccccgtgaagcccctggcccagatcgccggaaacagatacgcctccggacctgtgggaaaggccctgagcgacgcatgtatgggcacaatcgcctccttcctgtctaagtaccaggacatcatcatcgaacaccagaaggtggtgaagggcaaccagaagagactggagagcctgcgggagctggccggcaaggaaaacctggaataccctagcgtgaccctgccacctcagcctcacaccaaggagggcgttgatgcctacaacgaagtgatcgcccgggtgcgaatgtgggtgaacctgaacctgtggcagaagctgaagctaagcagagatgatgccaagcctctgctgagactgaagggattcccttcctttcctctggtcgagagacaggccaacgaagtggactggtgggacatggtgtgtaacgtgaagaagctgatcaacgagaaaaaggaggatggcaaggtgttttggcagaatctggctggctacaagagacaggaagccctgagaccatacctgagcagcgaggaagatcggaagaagggaaagaaattcgctcggtaccagctgggcgacctgctgctgcacctggaaaagaagcacggcgaggactggggaaaggtgtacgacgaggcctgggagcggattgacaagaaagtggaaggcctgagcaagcacatcaagctggaagaggaacggagaagcgaggacgcccagagcaaggccgccctgaccgactggctgcgggctaaggccagcttcgtgatcgagggcctgaaggaggccgacaaggacgagttctgcagatgcgagctgaagctgcagaagtggtacggggacctgcggggaaagcccttcgccatcgaagccgagaacagcatcctggacatcagcggcttcagcaagcagtacaactgtgccttcatctggcagaaggacggcgtgaagaagctgaacctgtacctgatcatcaactacttcaagggcggcaagctgcggttcaagaagatcaaacctgaagccttcgaagccaacagattctacaccgtgatcaacaaaaagagcggcgagatcgtgcccatggaggtgaacttcaacttcgacgaccccaacctgatcatcctgcctctggcctttggcaagagacagggcagagaattcatctggaacgacctgctgtccctggaaaccggcagcctgaagctggccaacggaagagtgatcgagaagacactgtacaacagaagaacccggcaggatgagcctgccctgttcgtggccctgaccttcgagcggcgggaggtcctggactcctccaatatcaaaccaatgaacctgatcggcgtggcaagaggcgaaaacatccccgccgtgatcgccctgaccgaccccgagggctgcccactgagccggtttaaggatagcctgggaaacccaacccacatcctgagaatcggcgagagctataaggagaagcagcggaccatccaggccaagaaggaggtggagcagcggagagccggcggctacagccggaagtacgccagcaaagccaagaatctggcagacgatatggtgagaaacaccgctagagatctgctgtactacgccgtgacccaggatgccatgctgatcttcgccaacctgagccggggcttcggccggcagggcaagcggaccttcatggccgagagacagtacacacggatggaggactggctgaccgccaagctggcctacgagggcctgagcaagacctacctgtccaagacactggcccagtacacctccaagacatgcagcaactgtgggtttaccatcaccagcgccgactacgacagggtgctggagaagctgaagaagacagcaacaggctggatgaccacaattaacggcaaggagctgaaggtggagggccagattacctactacaacagatacaagagacagaacgtagtcaaggacctgtccgtcgagctggatagactgagcgaagaatctgtgaacaacgacatctcctcctggacaaagggcagaagcggagaagctctgagcctcctgaagaaaagattctcccatagacccgtgcaggagaagttcgtgtgcctgaactgcggcttcgagacacacgcagccgagcaagccgccctgaacatcgccagatcctggctgttcctgcggagccaggagtacaagaaataccagacaaacaagacaaccggcaacaccgataagagagccttcgtcgagacctggcagtccttttaccggaagaagcttaaggaggtgtggaaacctgccgtgcggtctggcggatctggcggaggctccaccagccccaagaaaaagagaaaagtctaagctgccttctgcggggcttgccttctggccatgcccttcttctctcccttgcacctgtacctcttggtctttgaataaagcctgagtaggaaggctagcaaaaaaaaaaaaaaaaaaaaaaaaaaaaaaaaaaaaaaaaaaaaaaaaaaaaaaaaaaaaaaaaaaaaaaaaaaaaaaaa

SEQ ID NO: 12199 - RNA, 5785 nt, synthetic construct
  source 1..5785: mol_type = other RNA
aggaaataagagagaaaagaagagtaagaagaaatataagagccaccatggcccctaagaagaagcgtaaagtgagccggatggaacgcctcgtctacgaggtgcggcagaagtgcagaaacatcgaggacatctgcatctcctgcggatctctgaacgtgaccctggagcacccactgttcatcggcggcatgtgccagaactgtaaaaactgttttctggagtgtgcctatcaatacgacgatgacggctaccagagctactgcaccatctgttgcggcggaagagaggtgctgatgtgtggaaataacaactgctgccggtgcttctgcgtggaatgcgtggacctgctggtgggccccggcgccgcccaggccgctattaaggaagatccttggaactgctacatgtgcggccacaagggcacatacggcctgctgagacggagagaggactggcctagcagactgcagatgttcttcgccaataaccacgaccaggagttcgacccccctaaggtgtaccctcccgtccccgccgagaagagaaagcccatccgggtcctgagcctgttcgatggcatcgccaccggtctgctggtgctgaaggacctgggcatccaggtggataggtacattgcctccgaggtgtgcgaggactccatcaccgtgggaatggtgcgtcatcagggcaagatcatgtacgtgggcgacgtgcggagcgtgacacagaagcatatccaggagtggggccctttcgacctggtgatcggcggcagcccttgcaatgacctgagcatcgtgaacccagcccggaagggcctgtacgagggaaccggcagactgttcttcgagttttacagactgctgcacgacgcccggcctaaggaaggcgacgaccggcccttcttttggctgttcgagaatgtggtggccatgggagtcagcgacaagcgggatattagccggttcctggagagcaaccccgtgatgatcgatgccaaggaagtgagcgccgcccaccgggccagatacttctggggcaatctgcctggcatgaacagacccctggccagcaccgtgaacgacaagctggagctgcaggagtgcctggagcacggccggatcgccaagttcagcaaggtgagaaccatcaccacccgaagcaacagcatcaaacaaggcaaggaccagcactttcctgtgttcatgaacgagaaggaggacatcctgtggtgtaccgagatggagagagtgttcgggttcccagtccactacacagatgtcagcaacatgtctagactggccagacagagactgctgggaagaagctggtccgtccctgtgatcagacacctgttcgcccctctgaaggagtacttcgcctgcgtgagcagcggcaacagcaacgccaacagccggggccccagcttctctagcggcctggtgccactgtccctgagagggagccacatgggccccatggagatctacaaaaccgtgagcgcctggaagcggcagcctgtgcgcgtgctgagcctgtttcggaatatcgataaagtcctgaaaagcctgggattcctggagagcggctctggctccggcggtggcaccctgaagtacgtggaggatgtgacaaacgtggtcagacgggatgtggagaagtggggccccttcgatctggtgtacggcagcacccaacccctgggcagctcttgtgaccggtgccctggctggtacatgtttcagttccaccggatcctgcagtacgccctgccgagacaggagtcccagcggccattcttttggattttcatggacaacttgctgctgaccgaggatgaccaggaaactaccactcggttcctgcagaccgaagccgtgaccctgcaggacgtgagaggccgggactaccagaacgccatgcgggtgtggtccaacatccctggactgaaaagcaagcacgcacctctgacccctaaagaagaggagtacctgcaggcccaggtgcggagcagaagcaagctggacgcccctaaggtggatctgctggtgaagaattgcctcctgcccctgagagagtacttcaagtatttcagccagaatagtctgcccctgggaggcagcggcggcggcgagcccggccccgtgaccttcggcgacgtggccgtgtacttcagcagggaggagtggggctgcctgaggcccgcccagagggccctgtacagggacgtgatgagggagacctacagccacctgggcgccctgggcgtggagggcagcaagcccgccctgatcagctgggtggaggaggaggccgagctgtggggccccgccgcccaggaccccgaggtggccaagaggcccaccgaggccgacggcggcccaagcagcggcgcccctcctcccagcggcggcagcccagccggctccccaacctctaccgaggagggcacctctgagtccgccacccccgagagcggccctggcacctccaccgagcccagcgagggcagcgcacccggcagccctgccggcagccccacctccacagaggagggaaccagcaccgagcccagcgaaggcagcgccccaggcaccagcaccgagcctagtgagcaggagattaaacggatcaacaagatcagaagaagacttgtgaaagacagcaacaccaagaaggccggcaagacaggccccatgaaaaccctgctggttagagtgatgacacccgatctgagagagcggctggaaaacctgagaaagaagcctgaaaatatcccccagcccatcagcaatacatctagagccaacctgaataagctgctgaccgattacaccgaaatgaagaaggcgatcctgcatgtgtactgggaagagttccagaaggaccctgtgggcctgatgagccgggtggcccagcctgccagcaagaagatcgatcagaacaagctgaaacctgagatggacgagaagggcaacctgaccaccgccggctttgcctgctctcagtgtggccagcccctgttcgtgtacaagctggagcaggtgtctgagaagggcaaggcttacaccaactacttcggacggtgcaatgtggccgagcacgaaaagctgatcctgctggcccagctgaagcccgagaaggatagcgacgaagccgtgacatatagcctgggaaagtttgggcagagggccctggatttctacagcattcatgtgaccaaggagtccacccaccccgtgaagcccctggcccagatcgccggaaacagatacgcctccggacctgtgggaaaggccctgagcgacgcatgtatgggcacaatcgcctccttcctgtctaagtaccaggacatcatcatcgaacaccagaaggtggtgaagggcaaccagaagagactggagagcctgcgggagctggccggcaaggaaaacctggaataccctagcgtgaccctgccacctcagcctcacaccaaggagggcgttgatgcctacaacgaagtgatcgcccgggtgcgaatgtgggtgaacctgaacctgtggcagaagctgaagctaagcagagatgatgccaagcctctgctgagactgaagggattcccttcctttcctctggtcgagagacaggccaacgaagtggactggtgggacatggtgtgtaacgtgaagaagctgatcaacgagaaaaaggaggatggcaaggtgttttggcagaatctggctggctacaagagacaggaagccctgagaccatacctgagcagcgaggaagatcggaagaagggaaagaaattcgctcggtaccagctgggcgacctgctgctgcacctggaaaagaagcacggcgaggactggggaaaggtgtacgacgaggcctgggagcggattgacaagaaagtggaaggcctgagcaagcacatcaagctggaagaggaacggagaagcgaggacgcccagagcaaggccgccctgaccgactggctgcgggctaaggccagcttcgtgatcgagggcctgaaggaggccgacaaggacgagttctgcagatgcgagctgaagctgcagaagtggtacggggacctgcggggaaagcccttcgccatcgaagccgagaacagcatcctggacatcagcggcttcagcaagcagtacaactgtgccttcatctggcagaaggacggcgtgaagaagctgaacctgtacctgatcatcaactacttcaagggcggcaagctgcggttcaagaagatcaaacctgaagccttcgaagccaacagattctacaccgtgatcaacaaaaagagcggcgagatcgtgcccatggaggtgaacttcaacttcgacgaccccaacctgatcatcctgcctctggcctttggcaagagacagggcagagaattcatctggaacgacctgctgtccctggaaaccggcagcctgaagctggccaacggaagagtgatcgagaagacactgtacaacagaagaacccggcaggatgagcctgccctgttcgtggccctgaccttcgagcggcgggaggtcctggactcctccaatatcaaaccaatgaacctgatcggcgtggcaagaggcgaaaacatccccgccgtgatcgccctgaccgaccccgagggctgcccactgagccggtttaaggatagcctgggaaacccaacccacatcctgagaatcggcgagagctataaggagaagcagcggaccatccaggccaagaaggaggtggagcagcggagagccggcggctacagccggaagtacgccagcaaagccaagaatctggcagacgatatggtgagaaacaccgctagagatctgctgtactacgccgtgacccaggatgccatgctgatcttcgccaacctgagccggggcttcggccggcagggcaagcggaccttcatggccgagagacagtacacacggatggaggactggctgaccgccaagctggcctacgagggcctgagcaagacctacctgtccaagacactggcccagtacacctccaagacatgcagcaactgtgggtttaccatcaccagcgccgactacgacagggtgctggagaagctgaagaagacagcaacaggctggatgaccacaattaacggcaaggagctgaaggtggagggccagattacctactacaacagatacaagagacagaacgtagtcaaggacctgtccgtcgagctggatagactgagcgaagaatctgtgaacaacgacatctcctcctggacaaagggcagaagcggagaagctctgagcctcctgaagaaaagattctcccatagacccgtgcaggagaagttcgtgtgcctgaactgcggcttcgagacacacgcagccgagcaagccgccctgaacatcgccagatcctggctgttcctgcggagccaggagtacaagaaataccagacaaacaagacaaccggcaacaccgataagagagccttcgtcgagacctggcagtccttttaccggaagaagcttaaggaggtgtggaaacctgccgtgcggtctggcggatctggcggaggctccaccagccccaagaaaaagagaaaagtctaagctgccttctgcggggcttgccttctggccatgcccttcttctctcccttgcacctgtacctcttggtctttgaataaagcctgagtaggaaggctagcaaaaaaaaaaaaaaaaaaaaaaaaaaaaaaaaaaaaaaaaaaaaaaaaaaaaaaaaaaaaaaaaaaaaaaaaaaaaaaaa

SEQ ID NO: 12200 - RNA, 5785 nt, synthetic construct
  source 1..5785: mol_type = other RNA
aggaaataagagagaaaagaagagtaagaagaaatataagagccaccatggcccctaagaagaagcgtaaagtgagccggatggaacgcctcgtctacgaggtgcggcagaagtgcagaaacatcgaggacatctgcatctcctgcggatctctgaacgtgaccctggagcacccactgttcatcggcggcatgtgccagaactgtaaaaactgttttctggagtgtgcctatcaatacgacgatgacggctaccagagctactgcaccatctgttgcggcggaagagaggtgctgatgtgtggaaataacaactgctgccggtgcttctgcgtggaatgcgtggacctgctggtgggccccggcgccgcccaggccgctattaaggaagatccttggaactgctacatgtgcggccacaagggcacatacggcctgctgagacggagagaggactggcctagcagactgcagatgttcttcgccaataaccacgaccaggagttcgacccccctaaggtgtaccctcccgtccccgccgagaagagaaagcccatccgggtcctgagcctgttcgatggcatcgccaccggtctgctggtgctgaaggacctgggcatccaggtggataggtacattgcctccgaggtgtgcgaggactccatcaccgtgggaatggtgcgtcatcagggcaagatcatgtacgtgggcgacgtgcggagcgtgacacagaagcatatccaggagtggggccctttcgacctggtgatcggcggcagcccttgcaatgacctgagcatcgtgaacccagcccggaagggcctgtacgagggaaccggcagactgttcttcgagttttacagactgctgcacgacgcccggcctaaggaaggcgacgaccggcccttcttttggctgttcgagaatgtggtggccatgggagtcagcgacaagcgggatattagccggttcctggagagcaaccccgtgatgatcgatgccaaggaagtgagcgccgcccaccgggccagatacttctggggcaatctgcctggcatgaacagacccctggccagcaccgtgaacgacaagctggagctgcaggagtgcctggagcacggccggatcgccaagttcagcaaggtgagaaccatcaccacccgaagcaacagcatcaaacaaggcaaggaccagcactttcctgtgttcatgaacgagaaggaggacatcctgtggtgtaccgagatggagagagtgttcgggttcccagtccactacacagatgtcagcaacatgtctagactggccagacagagactgctgggaagaagctggtccgtccctgtgatcagacacctgttcgcccctctgaaggagtacttcgcctgcgtgagcagcggcaacagcaacgccaacagccggggccccagcttctctagcggcctggtgccactgtccctgagagggagccacatgggccccatggagatctacaaaaccgtgagcgcctggaagcggcagcctgtgcgcgtgctgagcctgtttcggaatatcgataaagtcctgaaaagcctgggattcctggagagcggctctggctccggcggtggcaccctgaagtacgtggaggatgtgacaaacgtggtcagacgggatgtggagaagtggggccccttcgatctggtgtacggcagcacccaacccctgggcagctcttgtgaccggtgccctggctggtacatgtttcagttccaccggatcctgcagtacgccctgccgagacaggagtcccagcggccattcttttggattttcatggacaacttgctgctgaccgaggatgaccaggaaactaccactcggttcctgcagaccgaagccgtgaccctgcaggacgtgagaggccgggactaccagaacgccatgcgggtgtggtccaacatccctggactgaaaagcaagcacgcacctctgacccctaaagaagaggagtacctgcaggcccaggtgcggagcagaagcaagctggacgcccctaaggtggatctgctggtgaagaattgcctcctgcccctgagagagtacttcaagtatttcagccagaatagtctgcccctgggaggcagcggcggcggcttccaggagagcgtgaccttccaggacgtggccgtggacttcacctgggaggagtggggccacctgggccccgcccagaaggagctgtacagggaggtgatgctggagaactacaggaacctggtgtgcctgggcctggaggtgagcaagcccgacgtggtgtgccagctggagaggggcgaggccccctggatgcccgagggcgccgtgcccaggagctgcagccagaactggggcgccaggggcggcccaagcagcggcgcccctcctcccagcggcggcagcccagccggctccccaacctctaccgaggagggcacctctgagtccgccacccccgagagcggccctggcacctccaccgagcccagcgagggcagcgcacccggcagccctgccggcagccccacctccacagaggagggaaccagcaccgagcccagcgaaggcagcgccccaggcaccagcaccgagcctagtgagcaggagattaaacggatcaacaagatcagaagaagacttgtgaaagacagcaacaccaagaaggccggcaagacaggccccatgaaaaccctgctggttagagtgatgacacccgatctgagagagcggctggaaaacctgagaaagaagcctgaaaatatcccccagcccatcagcaatacatctagagccaacctgaataagctgctgaccgattacaccgaaatgaagaaggcgatcctgcatgtgtactgggaagagttccagaaggaccctgtgggcctgatgagccgggtggcccagcctgccagcaagaagatcgatcagaacaagctgaaacctgagatggacgagaagggcaacctgaccaccgccggctttgcctgctctcagtgtggccagcccctgttcgtgtacaagctggagcaggtgtctgagaagggcaaggcttacaccaactacttcggacggtgcaatgtggccgagcacgaaaagctgatcctgctggcccagctgaagcccgagaaggatagcgacgaagccgtgacatatagcctgggaaagtttgggcagagggccctggatttctacagcattcatgtgaccaaggagtccacccaccccgtgaagcccctggcccagatcgccggaaacagatacgcctccggacctgtgggaaaggccctgagcgacgcatgtatgggcacaatcgcctccttcctgtctaagtaccaggacatcatcatcgaacaccagaaggtggtgaagggcaaccagaagagactggagagcctgcgggagctggccggcaaggaaaacctggaataccctagcgtgaccctgccacctcagcctcacaccaaggagggcgttgatgcctacaacgaagtgatcgcccgggtgcgaatgtgggtgaacctgaacctgtggcagaagctgaagctaagcagagatgatgccaagcctctgctgagactgaagggattcccttcctttcctctggtcgagagacaggccaacgaagtggactggtgggacatggtgtgtaacgtgaagaagctgatcaacgagaaaaaggaggatggcaaggtgttttggcagaatctggctggctacaagagacaggaagccctgagaccatacctgagcagcgaggaagatcggaagaagggaaagaaattcgctcggtaccagctgggcgacctgctgctgcacctggaaaagaagcacggcgaggactggggaaaggtgtacgacgaggcctgggagcggattgacaagaaagtggaaggcctgagcaagcacatcaagctggaagaggaacggagaagcgaggacgcccagagcaaggccgccctgaccgactggctgcgggctaaggccagcttcgtgatcgagggcctgaaggaggccgacaaggacgagttctgcagatgcgagctgaagctgcagaagtggtacggggacctgcggggaaagcccttcgccatcgaagccgagaacagcatcctggacatcagcggcttcagcaagcagtacaactgtgccttcatctggcagaaggacggcgtgaagaagctgaacctgtacctgatcatcaactacttcaagggcggcaagctgcggttcaagaagatcaaacctgaagccttcgaagccaacagattctacaccgtgatcaacaaaaagagcggcgagatcgtgcccatggaggtgaacttcaacttcgacgaccccaacctgatcatcctgcctctggcctttggcaagagacagggcagagaattcatctggaacgacctgctgtccctggaaaccggcagcctgaagctggccaacggaagagtgatcgagaagacactgtacaacagaagaacccggcaggatgagcctgccctgttcgtggccctgaccttcgagcggcgggaggtcctggactcctccaatatcaaaccaatgaacctgatcggcgtggcaagaggcgaaaacatccccgccgtgatcgccctgaccgaccccgagggctgcccactgagccggtttaaggatagcctgggaaacccaacccacatcctgagaatcggcgagagctataaggagaagcagcggaccatccaggccaagaaggaggtggagcagcggagagccggcggctacagccggaagtacgccagcaaagccaagaatctggcagacgatatggtgagaaacaccgctagagatctgctgtactacgccgtgacccaggatgccatgctgatcttcgccaacctgagccggggcttcggccggcagggcaagcggaccttcatggccgagagacagtacacacggatggaggactggctgaccgccaagctggcctacgagggcctgagcaagacctacctgtccaagacactggcccagtacacctccaagacatgcagcaactgtgggtttaccatcaccagcgccgactacgacagggtgctggagaagctgaagaagacagcaacaggctggatgaccacaattaacggcaaggagctgaaggtggagggccagattacctactacaacagatacaagagacagaacgtagtcaaggacctgtccgtcgagctggatagactgagcgaagaatctgtgaacaacgacatctcctcctggacaaagggcagaagcggagaagctctgagcctcctgaagaaaagattctcccatagacccgtgcaggagaagttcgtgtgcctgaactgcggcttcgagacacacgcagccgagcaagccgccctgaacatcgccagatcctggctgttcctgcggagccaggagtacaagaaataccagacaaacaagacaaccggcaacaccgataagagagccttcgtcgagacctggcagtccttttaccggaagaagcttaaggaggtgtggaaacctgccgtgcggtctggcggatctggcggaggctccaccagccccaagaaaaagagaaaagtctaagctgccttctgcggggcttgccttctggccatgcccttcttctctcccttgcacctgtacctcttggtctttgaataaagcctgagtaggaaggctagcaaaaaaaaaaaaaaaaaaaaaaaaaaaaaaaaaaaaaaaaaaaaaaaaaaaaaaaaaaaaaaaaaaaaaaaaaaaaaaaa

SEQ ID NO: 12201 - RNA, 5785 nt, synthetic construct
  source 1..5785: mol_type = other RNA
aggaaataagagagaaaagaagagtaagaagaaatataagagccaccatggcccctaagaagaagcgtaaagtgagccggatggaacgcctcgtctacgaggtgcggcagaagtgcagaaacatcgaggacatctgcatctcctgcggatctctgaacgtgaccctggagcacccactgttcatcggcggcatgtgccagaactgtaaaaactgttttctggagtgtgcctatcaatacgacgatgacggctaccagagctactgcaccatctgttgcggcggaagagaggtgctgatgtgtggaaataacaactgctgccggtgcttctgcgtggaatgcgtggacctgctggtgggccccggcgccgcccaggccgctattaaggaagatccttggaactgctacatgtgcggccacaagggcacatacggcctgctgagacggagagaggactggcctagcagactgcagatgttcttcgccaataaccacgaccaggagttcgacccccctaaggtgtaccctcccgtccccgccgagaagagaaagcccatccgggtcctgagcctgttcgatggcatcgccaccggtctgctggtgctgaaggacctgggcatccaggtggataggtacattgcctccgaggtgtgcgaggactccatcaccgtgggaatggtgcgtcatcagggcaagatcatgtacgtgggcgacgtgcggagcgtgacacagaagcatatccaggagtggggccctttcgacctggtgatcggcggcagcccttgcaatgacctgagcatcgtgaacccagcccggaagggcctgtacgagggaaccggcagactgttcttcgagttttacagactgctgcacgacgcccggcctaaggaaggcgacgaccggcccttcttttggctgttcgagaatgtggtggccatgggagtcagcgacaagcgggatattagccggttcctggagagcaaccccgtgatgatcgatgccaaggaagtgagcgccgcccaccgggccagatacttctggggcaatctgcctggcatgaacagacccctggccagcaccgtgaacgacaagctggagctgcaggagtgcctggagcacggccggatcgccaagttcagcaaggtgagaaccatcaccacccgaagcaacagcatcaaacaaggcaaggaccagcactttcctgtgttcatgaacgagaaggaggacatcctgtggtgtaccgagatggagagagtgttcgggttcccagtccactacacagatgtcagcaacatgtctagactggccagacagagactgctgggaagaagctggtccgtccctgtgatcagacacctgttcgcccctctgaaggagtacttcgcctgcgtgagcagcggcaacagcaacgccaacagccggggccccagcttctctagcggcctggtgccactgtccctgagagggagccacatgggccccatggagatctacaaaaccgtgagcgcctggaagcggcagcctgtgcgcgtgctgagcctgtttcggaatatcgataaagtcctgaaaagcctgggattcctggagagcggctctggctccggcggtggcaccctgaagtacgtggaggatgtgacaaacgtggtcagacgggatgtggagaagtggggccccttcgatctggtgtacggcagcacccaacccctgggcagctcttgtgaccggtgccctggctggtacatgtttcagttccaccggatcctgcagtacgccctgccgagacaggagtcccagcggccattcttttggattttcatggacaacttgctgctgaccgaggatgaccaggaaactaccactcggttcctgcagaccgaagccgtgaccctgcaggacgtgagaggccgggactaccagaacgccatgcgggtgtggtccaacatccctggactgaaaagcaagcacgcacctctgacccctaaagaagaggagtacctgcaggcccaggtgcggagcagaagcaagctggacgcccctaaggtggatctgctggtgaagaattgcctcctgcccctgagagagtacttcaagtatttcagccagaatagtctgcccctgggaggcagcggcggcggcagccaggagagcgtggccttcgaggacgtggccgtgtacttcaccaccaaggagtgggccatcatggtgcccgccgagagggccctgtacagggacgtgatgctggagaactacgaggccgtggccttcgtggccgtgccccccaccagcaagcccgccctggtgagccacctggagcagggcaaggagagctgcttcatcaggccccccggcgtgctgagcaggagcgactggagggccggcggcggcccaagcagcggcgcccctcctcccagcggcggcagcccagccggctccccaacctctaccgaggagggcacctctgagtccgccacccccgagagcggccctggcacctccaccgagcccagcgagggcagcgcacccggcagccctgccggcagccccacctccacagaggagggaaccagcaccgagcccagcgaaggcagcgccccaggcaccagcaccgagcctagtgagcaggagattaaacggatcaacaagatcagaagaagacttgtgaaagacagcaacaccaagaaggccggcaagacaggccccatgaaaaccctgctggttagagtgatgacacccgatctgagagagcggctggaaaacctgagaaagaagcctgaaaatatcccccagcccatcagcaatacatctagagccaacctgaataagctgctgaccgattacaccgaaatgaagaaggcgatcctgcatgtgtactgggaagagttccagaaggaccctgtgggcctgatgagccgggtggcccagcctgccagcaagaagatcgatcagaacaagctgaaacctgagatggacgagaagggcaacctgaccaccgccggctttgcctgctctcagtgtggccagcccctgttcgtgtacaagctggagcaggtgtctgagaagggcaaggcttacaccaactacttcggacggtgcaatgtggccgagcacgaaaagctgatcctgctggcccagctgaagcccgagaaggatagcgacgaagccgtgacatatagcctgggaaagtttgggcagagggccctggatttctacagcattcatgtgaccaaggagtccacccaccccgtgaagcccctggcccagatcgccggaaacagatacgcctccggacctgtgggaaaggccctgagcgacgcatgtatgggcacaatcgcctccttcctgtctaagtaccaggacatcatcatcgaacaccagaaggtggtgaagggcaaccagaagagactggagagcctgcgggagctggccggcaaggaaaacctggaataccctagcgtgaccctgccacctcagcctcacaccaaggagggcgttgatgcctacaacgaagtgatcgcccgggtgcgaatgtgggtgaacctgaacctgtggcagaagctgaagctaagcagagatgatgccaagcctctgctgagactgaagggattcccttcctttcctctggtcgagagacaggccaacgaagtggactggtgggacatggtgtgtaacgtgaagaagctgatcaacgagaaaaaggaggatggcaaggtgttttggcagaatctggctggctacaagagacaggaagccctgagaccatacctgagcagcgaggaagatcggaagaagggaaagaaattcgctcggtaccagctgggcgacctgctgctgcacctggaaaagaagcacggcgaggactggggaaaggtgtacgacgaggcctgggagcggattgacaagaaagtggaaggcctgagcaagcacatcaagctggaagaggaacggagaagcgaggacgcccagagcaaggccgccctgaccgactggctgcgggctaaggccagcttcgtgatcgagggcctgaaggaggccgacaaggacgagttctgcagatgcgagctgaagctgcagaagtggtacggggacctgcggggaaagcccttcgccatcgaagccgagaacagcatcctggacatcagcggcttcagcaagcagtacaactgtgccttcatctggcagaaggacggcgtgaagaagctgaacctgtacctgatcatcaactacttcaagggcggcaagctgcggttcaagaagatcaaacctgaagccttcgaagccaacagattctacaccgtgatcaacaaaaagagcggcgagatcgtgcccatggaggtgaacttcaacttcgacgaccccaacctgatcatcctgcctctggcctttggcaagagacagggcagagaattcatctggaacgacctgctgtccctggaaaccggcagcctgaagctggccaacggaagagtgatcgagaagacactgtacaacagaagaacccggcaggatgagcctgccctgttcgtggccctgaccttcgagcggcgggaggtcctggactcctccaatatcaaaccaatgaacctgatcggcgtggcaagaggcgaaaacatccccgccgtgatcgccctgaccgaccccgagggctgcccactgagccggtttaaggatagcctgggaaacccaacccacatcctgagaatcggcgagagctataaggagaagcagcggaccatccaggccaagaaggaggtggagcagcggagagccggcggctacagccggaagtacgccagcaaagccaagaatctggcagacgatatggtgagaaacaccgctagagatctgctgtactacgccgtgacccaggatgccatgctgatcttcgccaacctgagccggggcttcggccggcagggcaagcggaccttcatggccgagagacagtacacacggatggaggactggctgaccgccaagctggcctacgagggcctgagcaagacctacctgtccaagacactggcccagtacacctccaagacatgcagcaactgtgggtttaccatcaccagcgccgactacgacagggtgctggagaagctgaagaagacagcaacaggctggatgaccacaattaacggcaaggagctgaaggtggagggccagattacctactacaacagatacaagagacagaacgtagtcaaggacctgtccgtcgagctggatagactgagcgaagaatctgtgaacaacgacatctcctcctggacaaagggcagaagcggagaagctctgagcctcctgaagaaaagattctcccatagacccgtgcaggagaagttcgtgtgcctgaactgcggcttcgagacacacgcagccgagcaagccgccctgaacatcgccagatcctggctgttcctgcggagccaggagtacaagaaataccagacaaacaagacaaccggcaacaccgataagagagccttcgtcgagacctggcagtccttttaccggaagaagcttaaggaggtgtggaaacctgccgtgcggtctggcggatctggcggaggctccaccagccccaagaaaaagagaaaagtctaagctgccttctgcggggcttgccttctggccatgcccttcttctctcccttgcacctgtacctcttggtctttgaataaagcctgagtaggaaggctagcaaaaaaaaaaaaaaaaaaaaaaaaaaaaaaaaaaaaaaaaaaaaaaaaaaaaaaaaaaaaaaaaaaaaaaaaaaaaaaaa

SEQ ID NO: 12202 - RNA, 5785 nt, synthetic construct
  source 1..5785: mol_type = other RNA
aggaaataagagagaaaagaagagtaagaagaaatataagagccaccatggcccctaagaagaagcgtaaagtgagccggatggaacgcctcgtctacgaggtgcggcagaagtgcagaaacatcgaggacatctgcatctcctgcggatctctgaacgtgaccctggagcacccactgttcatcggcggcatgtgccagaactgtaaaaactgttttctggagtgtgcctatcaatacgacgatgacggctaccagagctactgcaccatctgttgcggcggaagagaggtgctgatgtgtggaaataacaactgctgccggtgcttctgcgtggaatgcgtggacctgctggtgggccccggcgccgcccaggccgctattaaggaagatccttggaactgctacatgtgcggccacaagggcacatacggcctgctgagacggagagaggactggcctagcagactgcagatgttcttcgccaataaccacgaccaggagttcgacccccctaaggtgtaccctcccgtccccgccgagaagagaaagcccatccgggtcctgagcctgttcgatggcatcgccaccggtctgctggtgctgaaggacctgggcatccaggtggataggtacattgcctccgaggtgtgcgaggactccatcaccgtgggaatggtgcgtcatcagggcaagatcatgtacgtgggcgacgtgcggagcgtgacacagaagcatatccaggagtggggccctttcgacctggtgatcggcggcagcccttgcaatgacctgagcatcgtgaacccagcccggaagggcctgtacgagggaaccggcagactgttcttcgagttttacagactgctgcacgacgcccggcctaaggaaggcgacgaccggcccttcttttggctgttcgagaatgtggtggccatgggagtcagcgacaagcgggatattagccggttcctggagagcaaccccgtgatgatcgatgccaaggaagtgagcgccgcccaccgggccagatacttctggggcaatctgcctggcatgaacagacccctggccagcaccgtgaacgacaagctggagctgcaggagtgcctggagcacggccggatcgccaagttcagcaaggtgagaaccatcaccacccgaagcaacagcatcaaacaaggcaaggaccagcactttcctgtgttcatgaacgagaaggaggacatcctgtggtgtaccgagatggagagagtgttcgggttcccagtccactacacagatgtcagcaacatgtctagactggccagacagagactgctgggaagaagctggtccgtccctgtgatcagacacctgttcgcccctctgaaggagtacttcgcctgcgtgagcagcggcaacagcaacgccaacagccggggccccagcttctctagcggcctggtgccactgtccctgagagggagccacatgggccccatggagatctacaaaaccgtgagcgcctggaagcggcagcctgtgcgcgtgctgagcctgtttcggaatatcgataaagtcctgaaaagcctgggattcctggagagcggctctggctccggcggtggcaccctgaagtacgtggaggatgtgacaaacgtggtcagacgggatgtggagaagtggggccccttcgatctggtgtacggcagcacccaacccctgggcagctcttgtgaccggtgccctggctggtacatgtttcagttccaccggatcctgcagtacgccctgccgagacaggagtcccagcggccattcttttggattttcatggacaacttgctgctgaccgaggatgaccaggaaactaccactcggttcctgcagaccgaagccgtgaccctgcaggacgtgagaggccgggactaccagaacgccatgcgggtgtggtccaacatccctggactgaaaagcaagcacgcacctctgacccctaaagaagaggagtacctgcaggcccaggtgcggagcagaagcaagctggacgcccctaaggtggatctgctggtgaagaattgcctcctgcccctgagagagtacttcaagtatttcagccagaatagtctgcccctgggaggcagcggcggcggcaggcccggcgccgtgagcttcgccgacgtggccgtgtacttcagccccgaggagtggggctgcctgaggcccgcccagagggccctgtacagggacgtgatgagggagacctacggccacctgggcgccctgggcttcgccggccccaagcccgccctgatcagctggctggagaggaagaaggaggtgtggagccccgaggccgaggaccccgaggccggcgccaggcaccccggcagcggcggcggcccaagcagcggcgcccctcctcccagcggcggcagcccagccggctccccaacctctaccgaggagggcacctctgagtccgccacccccgagagcggccctggcacctccaccgagcccagcgagggcagcgcacccggcagccctgccggcagccccacctccacagaggagggaaccagcaccgagcccagcgaaggcagcgccccaggcaccagcaccgagcctagtgagcaggagattaaacggatcaacaagatcagaagaagacttgtgaaagacagcaacaccaagaaggccggcaagacaggccccatgaaaaccctgctggttagagtgatgacacccgatctgagagagcggctggaaaacctgagaaagaagcctgaaaatatcccccagcccatcagcaatacatctagagccaacctgaataagctgctgaccgattacaccgaaatgaagaaggcgatcctgcatgtgtactgggaagagttccagaaggaccctgtgggcctgatgagccgggtggcccagcctgccagcaagaagatcgatcagaacaagctgaaacctgagatggacgagaagggcaacctgaccaccgccggctttgcctgctctcagtgtggccagcccctgttcgtgtacaagctggagcaggtgtctgagaagggcaaggcttacaccaactacttcggacggtgcaatgtggccgagcacgaaaagctgatcctgctggcccagctgaagcccgagaaggatagcgacgaagccgtgacatatagcctgggaaagtttgggcagagggccctggatttctacagcattcatgtgaccaaggagtccacccaccccgtgaagcccctggcccagatcgccggaaacagatacgcctccggacctgtgggaaaggccctgagcgacgcatgtatgggcacaatcgcctccttcctgtctaagtaccaggacatcatcatcgaacaccagaaggtggtgaagggcaaccagaagagactggagagcctgcgggagctggccggcaaggaaaacctggaataccctagcgtgaccctgccacctcagcctcacaccaaggagggcgttgatgcctacaacgaagtgatcgcccgggtgcgaatgtgggtgaacctgaacctgtggcagaagctgaagctaagcagagatgatgccaagcctctgctgagactgaagggattcccttcctttcctctggtcgagagacaggccaacgaagtggactggtgggacatggtgtgtaacgtgaagaagctgatcaacgagaaaaaggaggatggcaaggtgttttggcagaatctggctggctacaagagacaggaagccctgagaccatacctgagcagcgaggaagatcggaagaagggaaagaaattcgctcggtaccagctgggcgacctgctgctgcacctggaaaagaagcacggcgaggactggggaaaggtgtacgacgaggcctgggagcggattgacaagaaagtggaaggcctgagcaagcacatcaagctggaagaggaacggagaagcgaggacgcccagagcaaggccgccctgaccgactggctgcgggctaaggccagcttcgtgatcgagggcctgaaggaggccgacaaggacgagttctgcagatgcgagctgaagctgcagaagtggtacggggacctgcggggaaagcccttcgccatcgaagccgagaacagcatcctggacatcagcggcttcagcaagcagtacaactgtgccttcatctggcagaaggacggcgtgaagaagctgaacctgtacctgatcatcaactacttcaagggcggcaagctgcggttcaagaagatcaaacctgaagccttcgaagccaacagattctacaccgtgatcaacaaaaagagcggcgagatcgtgcccatggaggtgaacttcaacttcgacgaccccaacctgatcatcctgcctctggcctttggcaagagacagggcagagaattcatctggaacgacctgctgtccctggaaaccggcagcctgaagctggccaacggaagagtgatcgagaagacactgtacaacagaagaacccggcaggatgagcctgccctgttcgtggccctgaccttcgagcggcgggaggtcctggactcctccaatatcaaaccaatgaacctgatcggcgtggcaagaggcgaaaacatccccgccgtgatcgccctgaccgaccccgagggctgcccactgagccggtttaaggatagcctgggaaacccaacccacatcctgagaatcggcgagagctataaggagaagcagcggaccatccaggccaagaaggaggtggagcagcggagagccggcggctacagccggaagtacgccagcaaagccaagaatctggcagacgatatggtgagaaacaccgctagagatctgctgtactacgccgtgacccaggatgccatgctgatcttcgccaacctgagccggggcttcggccggcagggcaagcggaccttcatggccgagagacagtacacacggatggaggactggctgaccgccaagctggcctacgagggcctgagcaagacctacctgtccaagacactggcccagtacacctccaagacatgcagcaactgtgggtttaccatcaccagcgccgactacgacagggtgctggagaagctgaagaagacagcaacaggctggatgaccacaattaacggcaaggagctgaaggtggagggccagattacctactacaacagatacaagagacagaacgtagtcaaggacctgtccgtcgagctggatagactgagcgaagaatctgtgaacaacgacatctcctcctggacaaagggcagaagcggagaagctctgagcctcctgaagaaaagattctcccatagacccgtgcaggagaagttcgtgtgcctgaactgcggcttcgagacacacgcagccgagcaagccgccctgaacatcgccagatcctggctgttcctgcggagccaggagtacaagaaataccagacaaacaagacaaccggcaacaccgataagagagccttcgtcgagacctggcagtccttttaccggaagaagcttaaggaggtgtggaaacctgccgtgcggtctggcggatctggcggaggctccaccagccccaagaaaaagagaaaagtctaagctgccttctgcggggcttgccttctggccatgcccttcttctctcccttgcacctgtacctcttggtctttgaataaagcctgagtaggaaggctagcaaaaaaaaaaaaaaaaaaaaaaaaaaaaaaaaaaaaaaaaaaaaaaaaaaaaaaaaaaaaaaaaaaaaaaaaaaaaaaaa

SEQ ID NO: 12203 - RNA, 5785 nt, synthetic construct
  source 1..5785: mol_type = other RNA
aggaaataagagagaaaagaagagtaagaagaaatataagagccaccatggcccctaagaagaagcgtaaagtgagccggatggaacgcctcgtctacgaggtgcggcagaagtgcagaaacatcgaggacatctgcatctcctgcggatctctgaacgtgaccctggagcacccactgttcatcggcggcatgtgccagaactgtaaaaactgttttctggagtgtgcctatcaatacgacgatgacggctaccagagctactgcaccatctgttgcggcggaagagaggtgctgatgtgtggaaataacaactgctgccggtgcttctgcgtggaatgcgtggacctgctggtgggccccggcgccgcccaggccgctattaaggaagatccttggaactgctacatgtgcggccacaagggcacatacggcctgctgagacggagagaggactggcctagcagactgcagatgttcttcgccaataaccacgaccaggagttcgacccccctaaggtgtaccctcccgtccccgccgagaagagaaagcccatccgggtcctgagcctgttcgatggcatcgccaccggtctgctggtgctgaaggacctgggcatccaggtggataggtacattgcctccgaggtgtgcgaggactccatcaccgtgggaatggtgcgtcatcagggcaagatcatgtacgtgggcgacgtgcggagcgtgacacagaagcatatccaggagtggggccctttcgacctggtgatcggcggcagcccttgcaatgacctgagcatcgtgaacccagcccggaagggcctgtacgagggaaccggcagactgttcttcgagttttacagactgctgcacgacgcccggcctaaggaaggcgacgaccggcccttcttttggctgttcgagaatgtggtggccatgggagtcagcgacaagcgggatattagccggttcctggagagcaaccccgtgatgatcgatgccaaggaagtgagcgccgcccaccgggccagatacttctggggcaatctgcctggcatgaacagacccctggccagcaccgtgaacgacaagctggagctgcaggagtgcctggagcacggccggatcgccaagttcagcaaggtgagaaccatcaccacccgaagcaacagcatcaaacaaggcaaggaccagcactttcctgtgttcatgaacgagaaggaggacatcctgtggtgtaccgagatggagagagtgttcgggttcccagtccactacacagatgtcagcaacatgtctagactggccagacagagactgctgggaagaagctggtccgtccctgtgatcagacacctgttcgcccctctgaaggagtacttcgcctgcgtgagcagcggcaacagcaacgccaacagccggggccccagcttctctagcggcctggtgccactgtccctgagagggagccacatgggccccatggagatctacaaaaccgtgagcgcctggaagcggcagcctgtgcgcgtgctgagcctgtttcggaatatcgataaagtcctgaaaagcctgggattcctggagagcggctctggctccggcggtggcaccctgaagtacgtggaggatgtgacaaacgtggtcagacgggatgtggagaagtggggccccttcgatctggtgtacggcagcacccaacccctgggcagctcttgtgaccggtgccctggctggtacatgtttcagttccaccggatcctgcagtacgccctgccgagacaggagtcccagcggccattcttttggattttcatggacaacttgctgctgaccgaggatgaccaggaaactaccactcggttcctgcagaccgaagccgtgaccctgcaggacgtgagaggccgggactaccagaacgccatgcgggtgtggtccaacatccctggactgaaaagcaagcacgcacctctgacccctaaagaagaggagtacctgcaggcccaggtgcggagcagaagcaagctggacgcccctaaggtggatctgctggtgaagaattgcctcctgcccctgagagagtacttcaagtatttcagccagaatagtctgcccctgggaggcagcggcggcggcagccaggagagcgtgaccttcagggacgtggccatcgacttcagccaggaggagtgggagtggctgcagcccgcccagagggacctgtacaggcacgtgatgctggagaactacagccacctggtgagcctgggcctgaacatcagcaagccctacgtggtgagcctgctggagcagggcaagggcccctggctggagaagggcgacgtgaggagggacctgttcagcgagagccacggcgagggcggcccaagcagcggcgcccctcctcccagcggcggcagcccagccggctccccaacctctaccgaggagggcacctctgagtccgccacccccgagagcggccctggcacctccaccgagcccagcgagggcagcgcacccggcagccctgccggcagccccacctccacagaggagggaaccagcaccgagcccagcgaaggcagcgccccaggcaccagcaccgagcctagtgagcaggagattaaacggatcaacaagatcagaagaagacttgtgaaagacagcaacaccaagaaggccggcaagacaggccccatgaaaaccctgctggttagagtgatgacacccgatctgagagagcggctggaaaacctgagaaagaagcctgaaaatatcccccagcccatcagcaatacatctagagccaacctgaataagctgctgaccgattacaccgaaatgaagaaggcgatcctgcatgtgtactgggaagagttccagaaggaccctgtgggcctgatgagccgggtggcccagcctgccagcaagaagatcgatcagaacaagctgaaacctgagatggacgagaagggcaacctgaccaccgccggctttgcctgctctcagtgtggccagcccctgttcgtgtacaagctggagcaggtgtctgagaagggcaaggcttacaccaactacttcggacggtgcaatgtggccgagcacgaaaagctgatcctgctggcccagctgaagcccgagaaggatagcgacgaagccgtgacatatagcctgggaaagtttgggcagagggccctggatttctacagcattcatgtgaccaaggagtccacccaccccgtgaagcccctggcccagatcgccggaaacagatacgcctccggacctgtgggaaaggccctgagcgacgcatgtatgggcacaatcgcctccttcctgtctaagtaccaggacatcatcatcgaacaccagaaggtggtgaagggcaaccagaagagactggagagcctgcgggagctggccggcaaggaaaacctggaataccctagcgtgaccctgccacctcagcctcacaccaaggagggcgttgatgcctacaacgaagtgatcgcccgggtgcgaatgtgggtgaacctgaacctgtggcagaagctgaagctaagcagagatgatgccaagcctctgctgagactgaagggattcccttcctttcctctggtcgagagacaggccaacgaagtggactggtgggacatggtgtgtaacgtgaagaagctgatcaacgagaaaaaggaggatggcaaggtgttttggcagaatctggctggctacaagagacaggaagccctgagaccatacctgagcagcgaggaagatcggaagaagggaaagaaattcgctcggtaccagctgggcgacctgctgctgcacctggaaaagaagcacggcgaggactggggaaaggtgtacgacgaggcctgggagcggattgacaagaaagtggaaggcctgagcaagcacatcaagctggaagaggaacggagaagcgaggacgcccagagcaaggccgccctgaccgactggctgcgggctaaggccagcttcgtgatcgagggcctgaaggaggccgacaaggacgagttctgcagatgcgagctgaagctgcagaagtggtacggggacctgcggggaaagcccttcgccatcgaagccgagaacagcatcctggacatcagcggcttcagcaagcagtacaactgtgccttcatctggcagaaggacggcgtgaagaagctgaacctgtacctgatcatcaactacttcaagggcggcaagctgcggttcaagaagatcaaacctgaagccttcgaagccaacagattctacaccgtgatcaacaaaaagagcggcgagatcgtgcccatggaggtgaacttcaacttcgacgaccccaacctgatcatcctgcctctggcctttggcaagagacagggcagagaattcatctggaacgacctgctgtccctggaaaccggcagcctgaagctggccaacggaagagtgatcgagaagacactgtacaacagaagaacccggcaggatgagcctgccctgttcgtggccctgaccttcgagcggcgggaggtcctggactcctccaatatcaaaccaatgaacctgatcggcgtggcaagaggcgaaaacatccccgccgtgatcgccctgaccgaccccgagggctgcccactgagccggtttaaggatagcctgggaaacccaacccacatcctgagaatcggcgagagctataaggagaagcagcggaccatccaggccaagaaggaggtggagcagcggagagccggcggctacagccggaagtacgccagcaaagccaagaatctggcagacgatatggtgagaaacaccgctagagatctgctgtactacgccgtgacccaggatgccatgctgatcttcgccaacctgagccggggcttcggccggcagggcaagcggaccttcatggccgagagacagtacacacggatggaggactggctgaccgccaagctggcctacgagggcctgagcaagacctacctgtccaagacactggcccagtacacctccaagacatgcagcaactgtgggtttaccatcaccagcgccgactacgacagggtgctggagaagctgaagaagacagcaacaggctggatgaccacaattaacggcaaggagctgaaggtggagggccagattacctactacaacagatacaagagacagaacgtagtcaaggacctgtccgtcgagctggatagactgagcgaagaatctgtgaacaacgacatctcctcctggacaaagggcagaagcggagaagctctgagcctcctgaagaaaagattctcccatagacccgtgcaggagaagttcgtgtgcctgaactgcggcttcgagacacacgcagccgagcaagccgccctgaacatcgccagatcctggctgttcctgcggagccaggagtacaagaaataccagacaaacaagacaaccggcaacaccgataagagagccttcgtcgagacctggcagtccttttaccggaagaagcttaaggaggtgtggaaacctgccgtgcggtctggcggatctggcggaggctccaccagccccaagaaaaagagaaaagtctaagctgccttctgcggggcttgccttctggccatgcccttcttctctcccttgcacctgtacctcttggtctttgaataaagcctgagtaggaaggctagcaaaaaaaaaaaaaaaaaaaaaaaaaaaaaaaaaaaaaaaaaaaaaaaaaaaaaaaaaaaaaaaaaaaaaaaaaaaaaaaa

SEQ ID NO: 12204 - RNA, 5785 nt, synthetic construct
  source 1..5785: mol_type = other RNA
aggaaataagagagaaaagaagagtaagaagaaatataagagccaccatggcccctaagaagaagcgtaaagtgagccggatggaacgcctcgtctacgaggtgcggcagaagtgcagaaacatcgaggacatctgcatctcctgcggatctctgaacgtgaccctggagcacccactgttcatcggcggcatgtgccagaactgtaaaaactgttttctggagtgtgcctatcaatacgacgatgacggctaccagagctactgcaccatctgttgcggcggaagagaggtgctgatgtgtggaaataacaactgctgccggtgcttctgcgtggaatgcgtggacctgctggtgggccccggcgccgcccaggccgctattaaggaagatccttggaactgctacatgtgcggccacaagggcacatacggcctgctgagacggagagaggactggcctagcagactgcagatgttcttcgccaataaccacgaccaggagttcgacccccctaaggtgtaccctcccgtccccgccgagaagagaaagcccatccgggtcctgagcctgttcgatggcatcgccaccggtctgctggtgctgaaggacctgggcatccaggtggataggtacattgcctccgaggtgtgcgaggactccatcaccgtgggaatggtgcgtcatcagggcaagatcatgtacgtgggcgacgtgcggagcgtgacacagaagcatatccaggagtggggccctttcgacctggtgatcggcggcagcccttgcaatgacctgagcatcgtgaacccagcccggaagggcctgtacgagggaaccggcagactgttcttcgagttttacagactgctgcacgacgcccggcctaaggaaggcgacgaccggcccttcttttggctgttcgagaatgtggtggccatgggagtcagcgacaagcgggatattagccggttcctggagagcaaccccgtgatgatcgatgccaaggaagtgagcgccgcccaccgggccagatacttctggggcaatctgcctggcatgaacagacccctggccagcaccgtgaacgacaagctggagctgcaggagtgcctggagcacggccggatcgccaagttcagcaaggtgagaaccatcaccacccgaagcaacagcatcaaacaaggcaaggaccagcactttcctgtgttcatgaacgagaaggaggacatcctgtggtgtaccgagatggagagagtgttcgggttcccagtccactacacagatgtcagcaacatgtctagactggccagacagagactgctgggaagaagctggtccgtccctgtgatcagacacctgttcgcccctctgaaggagtacttcgcctgcgtgagcagcggcaacagcaacgccaacagccggggccccagcttctctagcggcctggtgccactgtccctgagagggagccacatgggccccatggagatctacaaaaccgtgagcgcctggaagcggcagcctgtgcgcgtgctgagcctgtttcggaatatcgataaagtcctgaaaagcctgggattcctggagagcggctctggctccggcggtggcaccctgaagtacgtggaggatgtgacaaacgtggtcagacgggatgtggagaagtggggccccttcgatctggtgtacggcagcacccaacccctgggcagctcttgtgaccggtgccctggctggtacatgtttcagttccaccggatcctgcagtacgccctgccgagacaggagtcccagcggccattcttttggattttcatggacaacttgctgctgaccgaggatgaccaggaaactaccactcggttcctgcagaccgaagccgtgaccctgcaggacgtgagaggccgggactaccagaacgccatgcgggtgtggtccaacatccctggactgaaaagcaagcacgcacctctgacccctaaagaagaggagtacctgcaggcccaggtgcggagcagaagcaagctggacgcccctaaggtggatctgctggtgaagaattgcctcctgcccctgagagagtacttcaagtatttcagccagaatagtctgcccctgggaggcagcggcggcggcgaggagctgcccgtggtgttcgaggacgtggccgtgtacttcaccagggaggagtggggcgccctggacaagtggcagaaggagctgtacagggacgtgatgcagatgaactacgagctgctggccagcctgggccccgccgccgccaagcccgacctgatcagcaagctggagaggagggccgccccctggatcagggacccccacggccccaagctgggcaagggcaggcccccccccggcggcggcccaagcagcggcgcccctcctcccagcggcggcagcccagccggctccccaacctctaccgaggagggcacctctgagtccgccacccccgagagcggccctggcacctccaccgagcccagcgagggcagcgcacccggcagccctgccggcagccccacctccacagaggagggaaccagcaccgagcccagcgaaggcagcgccccaggcaccagcaccgagcctagtgagcaggagattaaacggatcaacaagatcagaagaagacttgtgaaagacagcaacaccaagaaggccggcaagacaggccccatgaaaaccctgctggttagagtgatgacacccgatctgagagagcggctggaaaacctgagaaagaagcctgaaaatatcccccagcccatcagcaatacatctagagccaacctgaataagctgctgaccgattacaccgaaatgaagaaggcgatcctgcatgtgtactgggaagagttccagaaggaccctgtgggcctgatgagccgggtggcccagcctgccagcaagaagatcgatcagaacaagctgaaacctgagatggacgagaagggcaacctgaccaccgccggctttgcctgctctcagtgtggccagcccctgttcgtgtacaagctggagcaggtgtctgagaagggcaaggcttacaccaactacttcggacggtgcaatgtggccgagcacgaaaagctgatcctgctggcccagctgaagcccgagaaggatagcgacgaagccgtgacatatagcctgggaaagtttgggcagagggccctggatttctacagcattcatgtgaccaaggagtccacccaccccgtgaagcccctggcccagatcgccggaaacagatacgcctccggacctgtgggaaaggccctgagcgacgcatgtatgggcacaatcgcctccttcctgtctaagtaccaggacatcatcatcgaacaccagaaggtggtgaagggcaaccagaagagactggagagcctgcgggagctggccggcaaggaaaacctggaataccctagcgtgaccctgccacctcagcctcacaccaaggagggcgttgatgcctacaacgaagtgatcgcccgggtgcgaatgtgggtgaacctgaacctgtggcagaagctgaagctaagcagagatgatgccaagcctctgctgagactgaagggattcccttcctttcctctggtcgagagacaggccaacgaagtggactggtgggacatggtgtgtaacgtgaagaagctgatcaacgagaaaaaggaggatggcaaggtgttttggcagaatctggctggctacaagagacaggaagccctgagaccatacctgagcagcgaggaagatcggaagaagggaaagaaattcgctcggtaccagctgggcgacctgctgctgcacctggaaaagaagcacggcgaggactggggaaaggtgtacgacgaggcctgggagcggattgacaagaaagtggaaggcctgagcaagcacatcaagctggaagaggaacggagaagcgaggacgcccagagcaaggccgccctgaccgactggctgcgggctaaggccagcttcgtgatcgagggcctgaaggaggccgacaaggacgagttctgcagatgcgagctgaagctgcagaagtggtacggggacctgcggggaaagcccttcgccatcgaagccgagaacagcatcctggacatcagcggcttcagcaagcagtacaactgtgccttcatctggcagaaggacggcgtgaagaagctgaacctgtacctgatcatcaactacttcaagggcggcaagctgcggttcaagaagatcaaacctgaagccttcgaagccaacagattctacaccgtgatcaacaaaaagagcggcgagatcgtgcccatggaggtgaacttcaacttcgacgaccccaacctgatcatcctgcctctggcctttggcaagagacagggcagagaattcatctggaacgacctgctgtccctggaaaccggcagcctgaagctggccaacggaagagtgatcgagaagacactgtacaacagaagaacccggcaggatgagcctgccctgttcgtggccctgaccttcgagcggcgggaggtcctggactcctccaatatcaaaccaatgaacctgatcggcgtggcaagaggcgaaaacatccccgccgtgatcgccctgaccgaccccgagggctgcccactgagccggtttaaggatagcctgggaaacccaacccacatcctgagaatcggcgagagctataaggagaagcagcggaccatccaggccaagaaggaggtggagcagcggagagccggcggctacagccggaagtacgccagcaaagccaagaatctggcagacgatatggtgagaaacaccgctagagatctgctgtactacgccgtgacccaggatgccatgctgatcttcgccaacctgagccggggcttcggccggcagggcaagcggaccttcatggccgagagacagtacacacggatggaggactggctgaccgccaagctggcctacgagggcctgagcaagacctacctgtccaagacactggcccagtacacctccaagacatgcagcaactgtgggtttaccatcaccagcgccgactacgacagggtgctggagaagctgaagaagacagcaacaggctggatgaccacaattaacggcaaggagctgaaggtggagggccagattacctactacaacagatacaagagacagaacgtagtcaaggacctgtccgtcgagctggatagactgagcgaagaatctgtgaacaacgacatctcctcctggacaaagggcagaagcggagaagctctgagcctcctgaagaaaagattctcccatagacccgtgcaggagaagttcgtgtgcctgaactgcggcttcgagacacacgcagccgagcaagccgccctgaacatcgccagatcctggctgttcctgcggagccaggagtacaagaaataccagacaaacaagacaaccggcaacaccgataagagagccttcgtcgagacctggcagtccttttaccggaagaagcttaaggaggtgtggaaacctgccgtgcggtctggcggatctggcggaggctccaccagccccaagaaaaagagaaaagtctaagctgccttctgcggggcttgccttctggccatgcccttcttctctcccttgcacctgtacctcttggtctttgaataaagcctgagtaggaaggctagcaaaaaaaaaaaaaaaaaaaaaaaaaaaaaaaaaaaaaaaaaaaaaaaaaaaaaaaaaaaaaaaaaaaaaaaaaaaaaaaa

SEQ ID NO: 12205 - RNA, 5785 nt, synthetic construct
  source 1..5785: mol_type = other RNA
aggaaataagagagaaaagaagagtaagaagaaatataagagccaccatggcccctaagaagaagcgtaaagtgagccggatggaacgcctcgtctacgaggtgcggcagaagtgcagaaacatcgaggacatctgcatctcctgcggatctctgaacgtgaccctggagcacccactgttcatcggcggcatgtgccagaactgtaaaaactgttttctggagtgtgcctatcaatacgacgatgacggctaccagagctactgcaccatctgttgcggcggaagagaggtgctgatgtgtggaaataacaactgctgccggtgcttctgcgtggaatgcgtggacctgctggtgggccccggcgccgcccaggccgctattaaggaagatccttggaactgctacatgtgcggccacaagggcacatacggcctgctgagacggagagaggactggcctagcagactgcagatgttcttcgccaataaccacgaccaggagttcgacccccctaaggtgtaccctcccgtccccgccgagaagagaaagcccatccgggtcctgagcctgttcgatggcatcgccaccggtctgctggtgctgaaggacctgggcatccaggtggataggtacattgcctccgaggtgtgcgaggactccatcaccgtgggaatggtgcgtcatcagggcaagatcatgtacgtgggcgacgtgcggagcgtgacacagaagcatatccaggagtggggccctttcgacctggtgatcggcggcagcccttgcaatgacctgagcatcgtgaacccagcccggaagggcctgtacgagggaaccggcagactgttcttcgagttttacagactgctgcacgacgcccggcctaaggaaggcgacgaccggcccttcttttggctgttcgagaatgtggtggccatgggagtcagcgacaagcgggatattagccggttcctggagagcaaccccgtgatgatcgatgccaaggaagtgagcgccgcccaccgggccagatacttctggggcaatctgcctggcatgaacagacccctggccagcaccgtgaacgacaagctggagctgcaggagtgcctggagcacggccggatcgccaagttcagcaaggtgagaaccatcaccacccgaagcaacagcatcaaacaaggcaaggaccagcactttcctgtgttcatgaacgagaaggaggacatcctgtggtgtaccgagatggagagagtgttcgggttcccagtccactacacagatgtcagcaacatgtctagactggccagacagagactgctgggaagaagctggtccgtccctgtgatcagacacctgttcgcccctctgaaggagtacttcgcctgcgtgagcagcggcaacagcaacgccaacagccggggccccagcttctctagcggcctggtgccactgtccctgagagggagccacatgggccccatggagatctacaaaaccgtgagcgcctggaagcggcagcctgtgcgcgtgctgagcctgtttcggaatatcgataaagtcctgaaaagcctgggattcctggagagcggctctggctccggcggtggcaccctgaagtacgtggaggatgtgacaaacgtggtcagacgggatgtggagaagtggggccccttcgatctggtgtacggcagcacccaacccctgggcagctcttgtgaccggtgccctggctggtacatgtttcagttccaccggatcctgcagtacgccctgccgagacaggagtcccagcggccattcttttggattttcatggacaacttgctgctgaccgaggatgaccaggaaactaccactcggttcctgcagaccgaagccgtgaccctgcaggacgtgagaggccgggactaccagaacgccatgcgggtgtggtccaacatccctggactgaaaagcaagcacgcacctctgacccctaaagaagaggagtacctgcaggcccaggtgcggagcagaagcaagctggacgcccctaaggtggatctgctggtgaagaattgcctcctgcccctgagagagtacttcaagtatttcagccagaatagtctgcccctgggaggcagcggcggcggcatgatgttccaggacagcgtggccttcgaggacgtggccgtgaccttcacccaggaggagtgggccctgctggaccccagccagaagaacctgtacagggacgtgatgcaggagaccttcaggaacctggccagcatcggcaagaagtggaagccccagaacatctacgtggagtacgagaacctgaggaggaacctgaggatcgtgggcgagaggctgttcgagagcaaggagggccaccagggcggcccaagcagcggcgcccctcctcccagcggcggcagcccagccggctccccaacctctaccgaggagggcacctctgagtccgccacccccgagagcggccctggcacctccaccgagcccagcgagggcagcgcacccggcagccctgccggcagccccacctccacagaggagggaaccagcaccgagcccagcgaaggcagcgccccaggcaccagcaccgagcctagtgagcaggagattaaacggatcaacaagatcagaagaagacttgtgaaagacagcaacaccaagaaggccggcaagacaggccccatgaaaaccctgctggttagagtgatgacacccgatctgagagagcggctggaaaacctgagaaagaagcctgaaaatatcccccagcccatcagcaatacatctagagccaacctgaataagctgctgaccgattacaccgaaatgaagaaggcgatcctgcatgtgtactgggaagagttccagaaggaccctgtgggcctgatgagccgggtggcccagcctgccagcaagaagatcgatcagaacaagctgaaacctgagatggacgagaagggcaacctgaccaccgccggctttgcctgctctcagtgtggccagcccctgttcgtgtacaagctggagcaggtgtctgagaagggcaaggcttacaccaactacttcggacggtgcaatgtggccgagcacgaaaagctgatcctgctggcccagctgaagcccgagaaggatagcgacgaagccgtgacatatagcctgggaaagtttgggcagagggccctggatttctacagcattcatgtgaccaaggagtccacccaccccgtgaagcccctggcccagatcgccggaaacagatacgcctccggacctgtgggaaaggccctgagcgacgcatgtatgggcacaatcgcctccttcctgtctaagtaccaggacatcatcatcgaacaccagaaggtggtgaagggcaaccagaagagactggagagcctgcgggagctggccggcaaggaaaacctggaataccctagcgtgaccctgccacctcagcctcacaccaaggagggcgttgatgcctacaacgaagtgatcgcccgggtgcgaatgtgggtgaacctgaacctgtggcagaagctgaagctaagcagagatgatgccaagcctctgctgagactgaagggattcccttcctttcctctggtcgagagacaggccaacgaagtggactggtgggacatggtgtgtaacgtgaagaagctgatcaacgagaaaaaggaggatggcaaggtgttttggcagaatctggctggctacaagagacaggaagccctgagaccatacctgagcagcgaggaagatcggaagaagggaaagaaattcgctcggtaccagctgggcgacctgctgctgcacctggaaaagaagcacggcgaggactggggaaaggtgtacgacgaggcctgggagcggattgacaagaaagtggaaggcctgagcaagcacatcaagctggaagaggaacggagaagcgaggacgcccagagcaaggccgccctgaccgactggctgcgggctaaggccagcttcgtgatcgagggcctgaaggaggccgacaaggacgagttctgcagatgcgagctgaagctgcagaagtggtacggggacctgcggggaaagcccttcgccatcgaagccgagaacagcatcctggacatcagcggcttcagcaagcagtacaactgtgccttcatctggcagaaggacggcgtgaagaagctgaacctgtacctgatcatcaactacttcaagggcggcaagctgcggttcaagaagatcaaacctgaagccttcgaagccaacagattctacaccgtgatcaacaaaaagagcggcgagatcgtgcccatggaggtgaacttcaacttcgacgaccccaacctgatcatcctgcctctggcctttggcaagagacagggcagagaattcatctggaacgacctgctgtccctggaaaccggcagcctgaagctggccaacggaagagtgatcgagaagacactgtacaacagaagaacccggcaggatgagcctgccctgttcgtggccctgaccttcgagcggcgggaggtcctggactcctccaatatcaaaccaatgaacctgatcggcgtggcaagaggcgaaaacatccccgccgtgatcgccctgaccgaccccgagggctgcccactgagccggtttaaggatagcctgggaaacccaacccacatcctgagaatcggcgagagctataaggagaagcagcggaccatccaggccaagaaggaggtggagcagcggagagccggcggctacagccggaagtacgccagcaaagccaagaatctggcagacgatatggtgagaaacaccgctagagatctgctgtactacgccgtgacccaggatgccatgctgatcttcgccaacctgagccggggcttcggccggcagggcaagcggaccttcatggccgagagacagtacacacggatggaggactggctgaccgccaagctggcctacgagggcctgagcaagacctacctgtccaagacactggcccagtacacctccaagacatgcagcaactgtgggtttaccatcaccagcgccgactacgacagggtgctggagaagctgaagaagacagcaacaggctggatgaccacaattaacggcaaggagctgaaggtggagggccagattacctactacaacagatacaagagacagaacgtagtcaaggacctgtccgtcgagctggatagactgagcgaagaatctgtgaacaacgacatctcctcctggacaaagggcagaagcggagaagctctgagcctcctgaagaaaagattctcccatagacccgtgcaggagaagttcgtgtgcctgaactgcggcttcgagacacacgcagccgagcaagccgccctgaacatcgccagatcctggctgttcctgcggagccaggagtacaagaaataccagacaaacaagacaaccggcaacaccgataagagagccttcgtcgagacctggcagtccttttaccggaagaagcttaaggaggtgtggaaacctgccgtgcggtctggcggatctggcggaggctccaccagccccaagaaaaagagaaaagtctaagctgccttctgcggggcttgccttctggccatgcccttcttctctcccttgcacctgtacctcttggtctttgaataaagcctgagtaggaaggctagcaaaaaaaaaaaaaaaaaaaaaaaaaaaaaaaaaaaaaaaaaaaaaaaaaaaaaaaaaaaaaaaaaaaaaaaaaaaaaaaa

SEQ ID NO: 12206 - RNA, 5785 nt, synthetic construct
  source 1..5785: mol_type = other RNA
aggaaataagagagaaaagaagagtaagaagaaatataagagccaccatggcccctaagaagaagcgtaaagtgagccggatggaacgcctcgtctacgaggtgcggcagaagtgcagaaacatcgaggacatctgcatctcctgcggatctctgaacgtgaccctggagcacccactgttcatcggcggcatgtgccagaactgtaaaaactgttttctggagtgtgcctatcaatacgacgatgacggctaccagagctactgcaccatctgttgcggcggaagagaggtgctgatgtgtggaaataacaactgctgccggtgcttctgcgtggaatgcgtggacctgctggtgggccccggcgccgcccaggccgctattaaggaagatccttggaactgctacatgtgcggccacaagggcacatacggcctgctgagacggagagaggactggcctagcagactgcagatgttcttcgccaataaccacgaccaggagttcgacccccctaaggtgtaccctcccgtccccgccgagaagagaaagcccatccgggtcctgagcctgttcgatggcatcgccaccggtctgctggtgctgaaggacctgggcatccaggtggataggtacattgcctccgaggtgtgcgaggactccatcaccgtgggaatggtgcgtcatcagggcaagatcatgtacgtgggcgacgtgcggagcgtgacacagaagcatatccaggagtggggccctttcgacctggtgatcggcggcagcccttgcaatgacctgagcatcgtgaacccagcccggaagggcctgtacgagggaaccggcagactgttcttcgagttttacagactgctgcacgacgcccggcctaaggaaggcgacgaccggcccttcttttggctgttcgagaatgtggtggccatgggagtcagcgacaagcgggatattagccggttcctggagagcaaccccgtgatgatcgatgccaaggaagtgagcgccgcccaccgggccagatacttctggggcaatctgcctggcatgaacagacccctggccagcaccgtgaacgacaagctggagctgcaggagtgcctggagcacggccggatcgccaagttcagcaaggtgagaaccatcaccacccgaagcaacagcatcaaacaaggcaaggaccagcactttcctgtgttcatgaacgagaaggaggacatcctgtggtgtaccgagatggagagagtgttcgggttcccagtccactacacagatgtcagcaacatgtctagactggccagacagagactgctgggaagaagctggtccgtccctgtgatcagacacctgttcgcccctctgaaggagtacttcgcctgcgtgagcagcggcaacagcaacgccaacagccggggccccagcttctctagcggcctggtgccactgtccctgagagggagccacatgggccccatggagatctacaaaaccgtgagcgcctggaagcggcagcctgtgcgcgtgctgagcctgtttcggaatatcgataaagtcctgaaaagcctgggattcctggagagcggctctggctccggcggtggcaccctgaagtacgtggaggatgtgacaaacgtggtcagacgggatgtggagaagtggggccccttcgatctggtgtacggcagcacccaacccctgggcagctcttgtgaccggtgccctggctggtacatgtttcagttccaccggatcctgcagtacgccctgccgagacaggagtcccagcggccattcttttggattttcatggacaacttgctgctgaccgaggatgaccaggaaactaccactcggttcctgcagaccgaagccgtgaccctgcaggacgtgagaggccgggactaccagaacgccatgcgggtgtggtccaacatccctggactgaaaagcaagcacgcacctctgacccctaaagaagaggagtacctgcaggcccaggtgcggagcagaagcaagctggacgcccctaaggtggatctgctggtgaagaattgcctcctgcccctgagagagtacttcaagtatttcagccagaatagtctgcccctgggaggcagcggcggcggcgacagcgtggccttcgaggacgtggccgtgaacttcacccaggaggagtgggccctgctggacaggagccagaagaagctgtacagggaggtgatgcaggagaccctgaggaacctgaccagcatcggcaagacctggagcaaccagaacgccgaggagaggcaccagaaccccaggaggaacctgaggaggctgatcggcgagaggctgttccagagcaaggagagccaccagcacgccgagggcggcccaagcagcggcgcccctcctcccagcggcggcagcccagccggctccccaacctctaccgaggagggcacctctgagtccgccacccccgagagcggccctggcacctccaccgagcccagcgagggcagcgcacccggcagccctgccggcagccccacctccacagaggagggaaccagcaccgagcccagcgaaggcagcgccccaggcaccagcaccgagcctagtgagcaggagattaaacggatcaacaagatcagaagaagacttgtgaaagacagcaacaccaagaaggccggcaagacaggccccatgaaaaccctgctggttagagtgatgacacccgatctgagagagcggctggaaaacctgagaaagaagcctgaaaatatcccccagcccatcagcaatacatctagagccaacctgaataagctgctgaccgattacaccgaaatgaagaaggcgatcctgcatgtgtactgggaagagttccagaaggaccctgtgggcctgatgagccgggtggcccagcctgccagcaagaagatcgatcagaacaagctgaaacctgagatggacgagaagggcaacctgaccaccgccggctttgcctgctctcagtgtggccagcccctgttcgtgtacaagctggagcaggtgtctgagaagggcaaggcttacaccaactacttcggacggtgcaatgtggccgagcacgaaaagctgatcctgctggcccagctgaagcccgagaaggatagcgacgaagccgtgacatatagcctgggaaagtttgggcagagggccctggatttctacagcattcatgtgaccaaggagtccacccaccccgtgaagcccctggcccagatcgccggaaacagatacgcctccggacctgtgggaaaggccctgagcgacgcatgtatgggcacaatcgcctccttcctgtctaagtaccaggacatcatcatcgaacaccagaaggtggtgaagggcaaccagaagagactggagagcctgcgggagctggccggcaaggaaaacctggaataccctagcgtgaccctgccacctcagcctcacaccaaggagggcgttgatgcctacaacgaagtgatcgcccgggtgcgaatgtgggtgaacctgaacctgtggcagaagctgaagctaagcagagatgatgccaagcctctgctgagactgaagggattcccttcctttcctctggtcgagagacaggccaacgaagtggactggtgggacatggtgtgtaacgtgaagaagctgatcaacgagaaaaaggaggatggcaaggtgttttggcagaatctggctggctacaagagacaggaagccctgagaccatacctgagcagcgaggaagatcggaagaagggaaagaaattcgctcggtaccagctgggcgacctgctgctgcacctggaaaagaagcacggcgaggactggggaaaggtgtacgacgaggcctgggagcggattgacaagaaagtggaaggcctgagcaagcacatcaagctggaagaggaacggagaagcgaggacgcccagagcaaggccgccctgaccgactggctgcgggctaaggccagcttcgtgatcgagggcctgaaggaggccgacaaggacgagttctgcagatgcgagctgaagctgcagaagtggtacggggacctgcggggaaagcccttcgccatcgaagccgagaacagcatcctggacatcagcggcttcagcaagcagtacaactgtgccttcatctggcagaaggacggcgtgaagaagctgaacctgtacctgatcatcaactacttcaagggcggcaagctgcggttcaagaagatcaaacctgaagccttcgaagccaacagattctacaccgtgatcaacaaaaagagcggcgagatcgtgcccatggaggtgaacttcaacttcgacgaccccaacctgatcatcctgcctctggcctttggcaagagacagggcagagaattcatctggaacgacctgctgtccctggaaaccggcagcctgaagctggccaacggaagagtgatcgagaagacactgtacaacagaagaacccggcaggatgagcctgccctgttcgtggccctgaccttcgagcggcgggaggtcctggactcctccaatatcaaaccaatgaacctgatcggcgtggcaagaggcgaaaacatccccgccgtgatcgccctgaccgaccccgagggctgcccactgagccggtttaaggatagcctgggaaacccaacccacatcctgagaatcggcgagagctataaggagaagcagcggaccatccaggccaagaaggaggtggagcagcggagagccggcggctacagccggaagtacgccagcaaagccaagaatctggcagacgatatggtgagaaacaccgctagagatctgctgtactacgccgtgacccaggatgccatgctgatcttcgccaacctgagccggggcttcggccggcagggcaagcggaccttcatggccgagagacagtacacacggatggaggactggctgaccgccaagctggcctacgagggcctgagcaagacctacctgtccaagacactggcccagtacacctccaagacatgcagcaactgtgggtttaccatcaccagcgccgactacgacagggtgctggagaagctgaagaagacagcaacaggctggatgaccacaattaacggcaaggagctgaaggtggagggccagattacctactacaacagatacaagagacagaacgtagtcaaggacctgtccgtcgagctggatagactgagcgaagaatctgtgaacaacgacatctcctcctggacaaagggcagaagcggagaagctctgagcctcctgaagaaaagattctcccatagacccgtgcaggagaagttcgtgtgcctgaactgcggcttcgagacacacgcagccgagcaagccgccctgaacatcgccagatcctggctgttcctgcggagccaggagtacaagaaataccagacaaacaagacaaccggcaacaccgataagagagccttcgtcgagacctggcagtccttttaccggaagaagcttaaggaggtgtggaaacctgccgtgcggtctggcggatctggcggaggctccaccagccccaagaaaaagagaaaagtctaagctgccttctgcggggcttgccttctggccatgcccttcttctctcccttgcacctgtacctcttggtctttgaataaagcctgagtaggaaggctagcaaaaaaaaaaaaaaaaaaaaaaaaaaaaaaaaaaaaaaaaaaaaaaaaaaaaaaaaaaaaaaaaaaaaaaaaaaaaaaaa

SEQ ID NO: 12207 - RNA, 5785 nt, synthetic construct
  source 1..5785: mol_type = other RNA
aggaaataagagagaaaagaagagtaagaagaaatataagagccaccatggcccctaagaagaagcgtaaagtgagccggatggaacgcctcgtctacgaggtgcggcagaagtgcagaaacatcgaggacatctgcatctcctgcggatctctgaacgtgaccctggagcacccactgttcatcggcggcatgtgccagaactgtaaaaactgttttctggagtgtgcctatcaatacgacgatgacggctaccagagctactgcaccatctgttgcggcggaagagaggtgctgatgtgtggaaataacaactgctgccggtgcttctgcgtggaatgcgtggacctgctggtgggccccggcgccgcccaggccgctattaaggaagatccttggaactgctacatgtgcggccacaagggcacatacggcctgctgagacggagagaggactggcctagcagactgcagatgttcttcgccaataaccacgaccaggagttcgacccccctaaggtgtaccctcccgtccccgccgagaagagaaagcccatccgggtcctgagcctgttcgatggcatcgccaccggtctgctggtgctgaaggacctgggcatccaggtggataggtacattgcctccgaggtgtgcgaggactccatcaccgtgggaatggtgcgtcatcagggcaagatcatgtacgtgggcgacgtgcggagcgtgacacagaagcatatccaggagtggggccctttcgacctggtgatcggcggcagcccttgcaatgacctgagcatcgtgaacccagcccggaagggcctgtacgagggaaccggcagactgttcttcgagttttacagactgctgcacgacgcccggcctaaggaaggcgacgaccggcccttcttttggctgttcgagaatgtggtggccatgggagtcagcgacaagcgggatattagccggttcctggagagcaaccccgtgatgatcgatgccaaggaagtgagcgccgcccaccgggccagatacttctggggcaatctgcctggcatgaacagacccctggccagcaccgtgaacgacaagctggagctgcaggagtgcctggagcacggccggatcgccaagttcagcaaggtgagaaccatcaccacccgaagcaacagcatcaaacaaggcaaggaccagcactttcctgtgttcatgaacgagaaggaggacatcctgtggtgtaccgagatggagagagtgttcgggttcccagtccactacacagatgtcagcaacatgtctagactggccagacagagactgctgggaagaagctggtccgtccctgtgatcagacacctgttcgcccctctgaaggagtacttcgcctgcgtgagcagcggcaacagcaacgccaacagccggggccccagcttctctagcggcctggtgccactgtccctgagagggagccacatgggccccatggagatctacaaaaccgtgagcgcctggaagcggcagcctgtgcgcgtgctgagcctgtttcggaatatcgataaagtcctgaaaagcctgggattcctggagagcggctctggctccggcggtggcaccctgaagtacgtggaggatgtgacaaacgtggtcagacgggatgtggagaagtggggccccttcgatctggtgtacggcagcacccaacccctgggcagctcttgtgaccggtgccctggctggtacatgtttcagttccaccggatcctgcagtacgccctgccgagacaggagtcccagcggccattcttttggattttcatggacaacttgctgctgaccgaggatgaccaggaaactaccactcggttcctgcagaccgaagccgtgaccctgcaggacgtgagaggccgggactaccagaacgccatgcgggtgtggtccaacatccctggactgaaaagcaagcacgcacctctgacccctaaagaagaggagtacctgcaggcccaggtgcggagcagaagcaagctggacgcccctaaggtggatctgctggtgaagaattgcctcctgcccctgagagagtacttcaagtatttcagccagaatagtctgcccctgggaggcagcggcggcggcttccagggcagcgtgatgttcagcgacgtgagcatcgacttcagccaggaggagtgggagtacctggacctggagcagagggccctgtacagggacgtgatgctggagaactacagcaacctggtgagcctgggctgcttcatcagcaagcccgacgtgatcagcctgctggagcagggcaaggagccctggaaggtggtgaggaagggcaagaggaggtaccccgacctggagaccaggtacggcggcccaagcagcggcgcccctcctcccagcggcggcagcccagccggctccccaacctctaccgaggagggcacctctgagtccgccacccccgagagcggccctggcacctccaccgagcccagcgagggcagcgcacccggcagccctgccggcagccccacctccacagaggagggaaccagcaccgagcccagcgaaggcagcgccccaggcaccagcaccgagcctagtgagcaggagattaaacggatcaacaagatcagaagaagacttgtgaaagacagcaacaccaagaaggccggcaagacaggccccatgaaaaccctgctggttagagtgatgacacccgatctgagagagcggctggaaaacctgagaaagaagcctgaaaatatcccccagcccatcagcaatacatctagagccaacctgaataagctgctgaccgattacaccgaaatgaagaaggcgatcctgcatgtgtactgggaagagttccagaaggaccctgtgggcctgatgagccgggtggcccagcctgccagcaagaagatcgatcagaacaagctgaaacctgagatggacgagaagggcaacctgaccaccgccggctttgcctgctctcagtgtggccagcccctgttcgtgtacaagctggagcaggtgtctgagaagggcaaggcttacaccaactacttcggacggtgcaatgtggccgagcacgaaaagctgatcctgctggcccagctgaagcccgagaaggatagcgacgaagccgtgacatatagcctgggaaagtttgggcagagggccctggatttctacagcattcatgtgaccaaggagtccacccaccccgtgaagcccctggcccagatcgccggaaacagatacgcctccggacctgtgggaaaggccctgagcgacgcatgtatgggcacaatcgcctccttcctgtctaagtaccaggacatcatcatcgaacaccagaaggtggtgaagggcaaccagaagagactggagagcctgcgggagctggccggcaaggaaaacctggaataccctagcgtgaccctgccacctcagcctcacaccaaggagggcgttgatgcctacaacgaagtgatcgcccgggtgcgaatgtgggtgaacctgaacctgtggcagaagctgaagctaagcagagatgatgccaagcctctgctgagactgaagggattcccttcctttcctctggtcgagagacaggccaacgaagtggactggtgggacatggtgtgtaacgtgaagaagctgatcaacgagaaaaaggaggatggcaaggtgttttggcagaatctggctggctacaagagacaggaagccctgagaccatacctgagcagcgaggaagatcggaagaagggaaagaaattcgctcggtaccagctgggcgacctgctgctgcacctggaaaagaagcacggcgaggactggggaaaggtgtacgacgaggcctgggagcggattgacaagaaagtggaaggcctgagcaagcacatcaagctggaagaggaacggagaagcgaggacgcccagagcaaggccgccctgaccgactggctgcgggctaaggccagcttcgtgatcgagggcctgaaggaggccgacaaggacgagttctgcagatgcgagctgaagctgcagaagtggtacggggacctgcggggaaagcccttcgccatcgaagccgagaacagcatcctggacatcagcggcttcagcaagcagtacaactgtgccttcatctggcagaaggacggcgtgaagaagctgaacctgtacctgatcatcaactacttcaagggcggcaagctgcggttcaagaagatcaaacctgaagccttcgaagccaacagattctacaccgtgatcaacaaaaagagcggcgagatcgtgcccatggaggtgaacttcaacttcgacgaccccaacctgatcatcctgcctctggcctttggcaagagacagggcagagaattcatctggaacgacctgctgtccctggaaaccggcagcctgaagctggccaacggaagagtgatcgagaagacactgtacaacagaagaacccggcaggatgagcctgccctgttcgtggccctgaccttcgagcggcgggaggtcctggactcctccaatatcaaaccaatgaacctgatcggcgtggcaagaggcgaaaacatccccgccgtgatcgccctgaccgaccccgagggctgcccactgagccggtttaaggatagcctgggaaacccaacccacatcctgagaatcggcgagagctataaggagaagcagcggaccatccaggccaagaaggaggtggagcagcggagagccggcggctacagccggaagtacgccagcaaagccaagaatctggcagacgatatggtgagaaacaccgctagagatctgctgtactacgccgtgacccaggatgccatgctgatcttcgccaacctgagccggggcttcggccggcagggcaagcggaccttcatggccgagagacagtacacacggatggaggactggctgaccgccaagctggcctacgagggcctgagcaagacctacctgtccaagacactggcccagtacacctccaagacatgcagcaactgtgggtttaccatcaccagcgccgactacgacagggtgctggagaagctgaagaagacagcaacaggctggatgaccacaattaacggcaaggagctgaaggtggagggccagattacctactacaacagatacaagagacagaacgtagtcaaggacctgtccgtcgagctggatagactgagcgaagaatctgtgaacaacgacatctcctcctggacaaagggcagaagcggagaagctctgagcctcctgaagaaaagattctcccatagacccgtgcaggagaagttcgtgtgcctgaactgcggcttcgagacacacgcagccgagcaagccgccctgaacatcgccagatcctggctgttcctgcggagccaggagtacaagaaataccagacaaacaagacaaccggcaacaccgataagagagccttcgtcgagacctggcagtccttttaccggaagaagcttaaggaggtgtggaaacctgccgtgcggtctggcggatctggcggaggctccaccagccccaagaaaaagagaaaagtctaagctgccttctgcggggcttgccttctggccatgcccttcttctctcccttgcacctgtacctcttggtctttgaataaagcctgagtaggaaggctagcaaaaaaaaaaaaaaaaaaaaaaaaaaaaaaaaaaaaaaaaaaaaaaaaaaaaaaaaaaaaaaaaaaaaaaaaaaaaaaaa

SEQ ID NO: 12208 - RNA, 5785 nt, synthetic construct
  source 1..5785: mol_type = other RNA
aggaaataagagagaaaagaagagtaagaagaaatataagagccaccatggcccctaagaagaagcgtaaagtgagccggatggaacgcctcgtctacgaggtgcggcagaagtgcagaaacatcgaggacatctgcatctcctgcggatctctgaacgtgaccctggagcacccactgttcatcggcggcatgtgccagaactgtaaaaactgttttctggagtgtgcctatcaatacgacgatgacggctaccagagctactgcaccatctgttgcggcggaagagaggtgctgatgtgtggaaataacaactgctgccggtgcttctgcgtggaatgcgtggacctgctggtgggccccggcgccgcccaggccgctattaaggaagatccttggaactgctacatgtgcggccacaagggcacatacggcctgctgagacggagagaggactggcctagcagactgcagatgttcttcgccaataaccacgaccaggagttcgacccccctaaggtgtaccctcccgtccccgccgagaagagaaagcccatccgggtcctgagcctgttcgatggcatcgccaccggtctgctggtgctgaaggacctgggcatccaggtggataggtacattgcctccgaggtgtgcgaggactccatcaccgtgggaatggtgcgtcatcagggcaagatcatgtacgtgggcgacgtgcggagcgtgacacagaagcatatccaggagtggggccctttcgacctggtgatcggcggcagcccttgcaatgacctgagcatcgtgaacccagcccggaagggcctgtacgagggaaccggcagactgttcttcgagttttacagactgctgcacgacgcccggcctaaggaaggcgacgaccggcccttcttttggctgttcgagaatgtggtggccatgggagtcagcgacaagcgggatattagccggttcctggagagcaaccccgtgatgatcgatgccaaggaagtgagcgccgcccaccgggccagatacttctggggcaatctgcctggcatgaacagacccctggccagcaccgtgaacgacaagctggagctgcaggagtgcctggagcacggccggatcgccaagttcagcaaggtgagaaccatcaccacccgaagcaacagcatcaaacaaggcaaggaccagcactttcctgtgttcatgaacgagaaggaggacatcctgtggtgtaccgagatggagagagtgttcgggttcccagtccactacacagatgtcagcaacatgtctagactggccagacagagactgctgggaagaagctggtccgtccctgtgatcagacacctgttcgcccctctgaaggagtacttcgcctgcgtgagcagcggcaacagcaacgccaacagccggggccccagcttctctagcggcctggtgccactgtccctgagagggagccacatgggccccatggagatctacaaaaccgtgagcgcctggaagcggcagcctgtgcgcgtgctgagcctgtttcggaatatcgataaagtcctgaaaagcctgggattcctggagagcggctctggctccggcggtggcaccctgaagtacgtggaggatgtgacaaacgtggtcagacgggatgtggagaagtggggccccttcgatctggtgtacggcagcacccaacccctgggcagctcttgtgaccggtgccctggctggtacatgtttcagttccaccggatcctgcagtacgccctgccgagacaggagtcccagcggccattcttttggattttcatggacaacttgctgctgaccgaggatgaccaggaaactaccactcggttcctgcagaccgaagccgtgaccctgcaggacgtgagaggccgggactaccagaacgccatgcgggtgtggtccaacatccctggactgaaaagcaagcacgcacctctgacccctaaagaagaggagtacctgcaggcccaggtgcggagcagaagcaagctggacgcccctaaggtggatctgctggtgaagaattgcctcctgcccctgagagagtacttcaagtatttcagccagaatagtctgcccctgggaggcagcggcggcggcagccagagcctggtgaccttcggcgacgtggccgtggagttcagccccgaggagtgggagtggctggacagcgcccagaggagcctgtacaggagcgtgatgctggagaactacaggagcctggtgagcctgggcctgtgcgtgagcaagcccaagatgatcagcagcctggagcagaggaaggagccctgggtggccaagaggaccctgaccaggggcggctgccccgacagcagggccctgggcggcccaagcagcggcgcccctcctcccagcggcggcagcccagccggctccccaacctctaccgaggagggcacctctgagtccgccacccccgagagcggccctggcacctccaccgagcccagcgagggcagcgcacccggcagccctgccggcagccccacctccacagaggagggaaccagcaccgagcccagcgaaggcagcgccccaggcaccagcaccgagcctagtgagcaggagattaaacggatcaacaagatcagaagaagacttgtgaaagacagcaacaccaagaaggccggcaagacaggccccatgaaaaccctgctggttagagtgatgacacccgatctgagagagcggctggaaaacctgagaaagaagcctgaaaatatcccccagcccatcagcaatacatctagagccaacctgaataagctgctgaccgattacaccgaaatgaagaaggcgatcctgcatgtgtactgggaagagttccagaaggaccctgtgggcctgatgagccgggtggcccagcctgccagcaagaagatcgatcagaacaagctgaaacctgagatggacgagaagggcaacctgaccaccgccggctttgcctgctctcagtgtggccagcccctgttcgtgtacaagctggagcaggtgtctgagaagggcaaggcttacaccaactacttcggacggtgcaatgtggccgagcacgaaaagctgatcctgctggcccagctgaagcccgagaaggatagcgacgaagccgtgacatatagcctgggaaagtttgggcagagggccctggatttctacagcattcatgtgaccaaggagtccacccaccccgtgaagcccctggcccagatcgccggaaacagatacgcctccggacctgtgggaaaggccctgagcgacgcatgtatgggcacaatcgcctccttcctgtctaagtaccaggacatcatcatcgaacaccagaaggtggtgaagggcaaccagaagagactggagagcctgcgggagctggccggcaaggaaaacctggaataccctagcgtgaccctgccacctcagcctcacaccaaggagggcgttgatgcctacaacgaagtgatcgcccgggtgcgaatgtgggtgaacctgaacctgtggcagaagctgaagctaagcagagatgatgccaagcctctgctgagactgaagggattcccttcctttcctctggtcgagagacaggccaacgaagtggactggtgggacatggtgtgtaacgtgaagaagctgatcaacgagaaaaaggaggatggcaaggtgttttggcagaatctggctggctacaagagacaggaagccctgagaccatacctgagcagcgaggaagatcggaagaagggaaagaaattcgctcggtaccagctgggcgacctgctgctgcacctggaaaagaagcacggcgaggactggggaaaggtgtacgacgaggcctgggagcggattgacaagaaagtggaaggcctgagcaagcacatcaagctggaagaggaacggagaagcgaggacgcccagagcaaggccgccctgaccgactggctgcgggctaaggccagcttcgtgatcgagggcctgaaggaggccgacaaggacgagttctgcagatgcgagctgaagctgcagaagtggtacggggacctgcggggaaagcccttcgccatcgaagccgagaacagcatcctggacatcagcggcttcagcaagcagtacaactgtgccttcatctggcagaaggacggcgtgaagaagctgaacctgtacctgatcatcaactacttcaagggcggcaagctgcggttcaagaagatcaaacctgaagccttcgaagccaacagattctacaccgtgatcaacaaaaagagcggcgagatcgtgcccatggaggtgaacttcaacttcgacgaccccaacctgatcatcctgcctctggcctttggcaagagacagggcagagaattcatctggaacgacctgctgtccctggaaaccggcagcctgaagctggccaacggaagagtgatcgagaagacactgtacaacagaagaacccggcaggatgagcctgccctgttcgtggccctgaccttcgagcggcgggaggtcctggactcctccaatatcaaaccaatgaacctgatcggcgtggcaagaggcgaaaacatccccgccgtgatcgccctgaccgaccccgagggctgcccactgagccggtttaaggatagcctgggaaacccaacccacatcctgagaatcggcgagagctataaggagaagcagcggaccatccaggccaagaaggaggtggagcagcggagagccggcggctacagccggaagtacgccagcaaagccaagaatctggcagacgatatggtgagaaacaccgctagagatctgctgtactacgccgtgacccaggatgccatgctgatcttcgccaacctgagccggggcttcggccggcagggcaagcggaccttcatggccgagagacagtacacacggatggaggactggctgaccgccaagctggcctacgagggcctgagcaagacctacctgtccaagacactggcccagtacacctccaagacatgcagcaactgtgggtttaccatcaccagcgccgactacgacagggtgctggagaagctgaagaagacagcaacaggctggatgaccacaattaacggcaaggagctgaaggtggagggccagattacctactacaacagatacaagagacagaacgtagtcaaggacctgtccgtcgagctggatagactgagcgaagaatctgtgaacaacgacatctcctcctggacaaagggcagaagcggagaagctctgagcctcctgaagaaaagattctcccatagacccgtgcaggagaagttcgtgtgcctgaactgcggcttcgagacacacgcagccgagcaagccgccctgaacatcgccagatcctggctgttcctgcggagccaggagtacaagaaataccagacaaacaagacaaccggcaacaccgataagagagccttcgtcgagacctggcagtccttttaccggaagaagcttaaggaggtgtggaaacctgccgtgcggtctggcggatctggcggaggctccaccagccccaagaaaaagagaaaagtctaagctgccttctgcggggcttgccttctggccatgcccttcttctctcccttgcacctgtacctcttggtctttgaataaagcctgagtaggaaggctagcaaaaaaaaaaaaaaaaaaaaaaaaaaaaaaaaaaaaaaaaaaaaaaaaaaaaaaaaaaaaaaaaaaaaaaaaaaaaaaaa

SEQ ID NO: 12209 - RNA, 5785 nt, synthetic construct
  source 1..5785: mol_type = other RNA
aggaaataagagagaaaagaagagtaagaagaaatataagagccaccatggcccctaagaagaagcgtaaagtgagccggatggaacgcctcgtctacgaggtgcggcagaagtgcagaaacatcgaggacatctgcatctcctgcggatctctgaacgtgaccctggagcacccactgttcatcggcggcatgtgccagaactgtaaaaactgttttctggagtgtgcctatcaatacgacgatgacggctaccagagctactgcaccatctgttgcggcggaagagaggtgctgatgtgtggaaataacaactgctgccggtgcttctgcgtggaatgcgtggacctgctggtgggccccggcgccgcccaggccgctattaaggaagatccttggaactgctacatgtgcggccacaagggcacatacggcctgctgagacggagagaggactggcctagcagactgcagatgttcttcgccaataaccacgaccaggagttcgacccccctaaggtgtaccctcccgtccccgccgagaagagaaagcccatccgggtcctgagcctgttcgatggcatcgccaccggtctgctggtgctgaaggacctgggcatccaggtggataggtacattgcctccgaggtgtgcgaggactccatcaccgtgggaatggtgcgtcatcagggcaagatcatgtacgtgggcgacgtgcggagcgtgacacagaagcatatccaggagtggggccctttcgacctggtgatcggcggcagcccttgcaatgacctgagcatcgtgaacccagcccggaagggcctgtacgagggaaccggcagactgttcttcgagttttacagactgctgcacgacgcccggcctaaggaaggcgacgaccggcccttcttttggctgttcgagaatgtggtggccatgggagtcagcgacaagcgggatattagccggttcctggagagcaaccccgtgatgatcgatgccaaggaagtgagcgccgcccaccgggccagatacttctggggcaatctgcctggcatgaacagacccctggccagcaccgtgaacgacaagctggagctgcaggagtgcctggagcacggccggatcgccaagttcagcaaggtgagaaccatcaccacccgaagcaacagcatcaaacaaggcaaggaccagcactttcctgtgttcatgaacgagaaggaggacatcctgtggtgtaccgagatggagagagtgttcgggttcccagtccactacacagatgtcagcaacatgtctagactggccagacagagactgctgggaagaagctggtccgtccctgtgatcagacacctgttcgcccctctgaaggagtacttcgcctgcgtgagcagcggcaacagcaacgccaacagccggggccccagcttctctagcggcctggtgccactgtccctgagagggagccacatgggccccatggagatctacaaaaccgtgagcgcctggaagcggcagcctgtgcgcgtgctgagcctgtttcggaatatcgataaagtcctgaaaagcctgggattcctggagagcggctctggctccggcggtggcaccctgaagtacgtggaggatgtgacaaacgtggtcagacgggatgtggagaagtggggccccttcgatctggtgtacggcagcacccaacccctgggcagctcttgtgaccggtgccctggctggtacatgtttcagttccaccggatcctgcagtacgccctgccgagacaggagtcccagcggccattcttttggattttcatggacaacttgctgctgaccgaggatgaccaggaaactaccactcggttcctgcagaccgaagccgtgaccctgcaggacgtgagaggccgggactaccagaacgccatgcgggtgtggtccaacatccctggactgaaaagcaagcacgcacctctgacccctaaagaagaggagtacctgcaggcccaggtgcggagcagaagcaagctggacgcccctaaggtggatctgctggtgaagaattgcctcctgcccctgagagagtacttcaagtatttcagccagaatagtctgcccctgggaggcagcggcggcggcagccaggagagcgtggccttcgaggacgtggccgtgtacttcaccaccaaggagtgggccatcatggtgcccgccgagagggccctgtacagggacgtgatgctggagaactacgaggccgtggccttcgtggtgccccccaccagcaagcccgccctgatcagccacctggagcagggcaaggagagctgcttcatcaggccccagggcgtgctgagcaggagcgactggagggccggcctgggcggcccaagcagcggcgcccctcctcccagcggcggcagcccagccggctccccaacctctaccgaggagggcacctctgagtccgccacccccgagagcggccctggcacctccaccgagcccagcgagggcagcgcacccggcagccctgccggcagccccacctccacagaggagggaaccagcaccgagcccagcgaaggcagcgccccaggcaccagcaccgagcctagtgagcaggagattaaacggatcaacaagatcagaagaagacttgtgaaagacagcaacaccaagaaggccggcaagacaggccccatgaaaaccctgctggttagagtgatgacacccgatctgagagagcggctggaaaacctgagaaagaagcctgaaaatatcccccagcccatcagcaatacatctagagccaacctgaataagctgctgaccgattacaccgaaatgaagaaggcgatcctgcatgtgtactgggaagagttccagaaggaccctgtgggcctgatgagccgggtggcccagcctgccagcaagaagatcgatcagaacaagctgaaacctgagatggacgagaagggcaacctgaccaccgccggctttgcctgctctcagtgtggccagcccctgttcgtgtacaagctggagcaggtgtctgagaagggcaaggcttacaccaactacttcggacggtgcaatgtggccgagcacgaaaagctgatcctgctggcccagctgaagcccgagaaggatagcgacgaagccgtgacatatagcctgggaaagtttgggcagagggccctggatttctacagcattcatgtgaccaaggagtccacccaccccgtgaagcccctggcccagatcgccggaaacagatacgcctccggacctgtgggaaaggccctgagcgacgcatgtatgggcacaatcgcctccttcctgtctaagtaccaggacatcatcatcgaacaccagaaggtggtgaagggcaaccagaagagactggagagcctgcgggagctggccggcaaggaaaacctggaataccctagcgtgaccctgccacctcagcctcacaccaaggagggcgttgatgcctacaacgaagtgatcgcccgggtgcgaatgtgggtgaacctgaacctgtggcagaagctgaagctaagcagagatgatgccaagcctctgctgagactgaagggattcccttcctttcctctggtcgagagacaggccaacgaagtggactggtgggacatggtgtgtaacgtgaagaagctgatcaacgagaaaaaggaggatggcaaggtgttttggcagaatctggctggctacaagagacaggaagccctgagaccatacctgagcagcgaggaagatcggaagaagggaaagaaattcgctcggtaccagctgggcgacctgctgctgcacctggaaaagaagcacggcgaggactggggaaaggtgtacgacgaggcctgggagcggattgacaagaaagtggaaggcctgagcaagcacatcaagctggaagaggaacggagaagcgaggacgcccagagcaaggccgccctgaccgactggctgcgggctaaggccagcttcgtgatcgagggcctgaaggaggccgacaaggacgagttctgcagatgcgagctgaagctgcagaagtggtacggggacctgcggggaaagcccttcgccatcgaagccgagaacagcatcctggacatcagcggcttcagcaagcagtacaactgtgccttcatctggcagaaggacggcgtgaagaagctgaacctgtacctgatcatcaactacttcaagggcggcaagctgcggttcaagaagatcaaacctgaagccttcgaagccaacagattctacaccgtgatcaacaaaaagagcggcgagatcgtgcccatggaggtgaacttcaacttcgacgaccccaacctgatcatcctgcctctggcctttggcaagagacagggcagagaattcatctggaacgacctgctgtccctggaaaccggcagcctgaagctggccaacggaagagtgatcgagaagacactgtacaacagaagaacccggcaggatgagcctgccctgttcgtggccctgaccttcgagcggcgggaggtcctggactcctccaatatcaaaccaatgaacctgatcggcgtggcaagaggcgaaaacatccccgccgtgatcgccctgaccgaccccgagggctgcccactgagccggtttaaggatagcctgggaaacccaacccacatcctgagaatcggcgagagctataaggagaagcagcggaccatccaggccaagaaggaggtggagcagcggagagccggcggctacagccggaagtacgccagcaaagccaagaatctggcagacgatatggtgagaaacaccgctagagatctgctgtactacgccgtgacccaggatgccatgctgatcttcgccaacctgagccggggcttcggccggcagggcaagcggaccttcatggccgagagacagtacacacggatggaggactggctgaccgccaagctggcctacgagggcctgagcaagacctacctgtccaagacactggcccagtacacctccaagacatgcagcaactgtgggtttaccatcaccagcgccgactacgacagggtgctggagaagctgaagaagacagcaacaggctggatgaccacaattaacggcaaggagctgaaggtggagggccagattacctactacaacagatacaagagacagaacgtagtcaaggacctgtccgtcgagctggatagactgagcgaagaatctgtgaacaacgacatctcctcctggacaaagggcagaagcggagaagctctgagcctcctgaagaaaagattctcccatagacccgtgcaggagaagttcgtgtgcctgaactgcggcttcgagacacacgcagccgagcaagccgccctgaacatcgccagatcctggctgttcctgcggagccaggagtacaagaaataccagacaaacaagacaaccggcaacaccgataagagagccttcgtcgagacctggcagtccttttaccggaagaagcttaaggaggtgtggaaacctgccgtgcggtctggcggatctggcggaggctccaccagccccaagaaaaagagaaaagtctaagctgccttctgcggggcttgccttctggccatgcccttcttctctcccttgcacctgtacctcttggtctttgaataaagcctgagtaggaaggctagcaaaaaaaaaaaaaaaaaaaaaaaaaaaaaaaaaaaaaaaaaaaaaaaaaaaaaaaaaaaaaaaaaaaaaaaaaaaaaaaa

SEQ ID NO: 12210 - RNA, 5785 nt, synthetic construct
  source 1..5785: mol_type = other RNA
aggaaataagagagaaaagaagagtaagaagaaatataagagccaccatggcccctaagaagaagcgtaaagtgagccggatggaacgcctcgtctacgaggtgcggcagaagtgcagaaacatcgaggacatctgcatctcctgcggatctctgaacgtgaccctggagcacccactgttcatcggcggcatgtgccagaactgtaaaaactgttttctggagtgtgcctatcaatacgacgatgacggctaccagagctactgcaccatctgttgcggcggaagagaggtgctgatgtgtggaaataacaactgctgccggtgcttctgcgtggaatgcgtggacctgctggtgggccccggcgccgcccaggccgctattaaggaagatccttggaactgctacatgtgcggccacaagggcacatacggcctgctgagacggagagaggactggcctagcagactgcagatgttcttcgccaataaccacgaccaggagttcgacccccctaaggtgtaccctcccgtccccgccgagaagagaaagcccatccgggtcctgagcctgttcgatggcatcgccaccggtctgctggtgctgaaggacctgggcatccaggtggataggtacattgcctccgaggtgtgcgaggactccatcaccgtgggaatggtgcgtcatcagggcaagatcatgtacgtgggcgacgtgcggagcgtgacacagaagcatatccaggagtggggccctttcgacctggtgatcggcggcagcccttgcaatgacctgagcatcgtgaacccagcccggaagggcctgtacgagggaaccggcagactgttcttcgagttttacagactgctgcacgacgcccggcctaaggaaggcgacgaccggcccttcttttggctgttcgagaatgtggtggccatgggagtcagcgacaagcgggatattagccggttcctggagagcaaccccgtgatgatcgatgccaaggaagtgagcgccgcccaccgggccagatacttctggggcaatctgcctggcatgaacagacccctggccagcaccgtgaacgacaagctggagctgcaggagtgcctggagcacggccggatcgccaagttcagcaaggtgagaaccatcaccacccgaagcaacagcatcaaacaaggcaaggaccagcactttcctgtgttcatgaacgagaaggaggacatcctgtggtgtaccgagatggagagagtgttcgggttcccagtccactacacagatgtcagcaacatgtctagactggccagacagagactgctgggaagaagctggtccgtccctgtgatcagacacctgttcgcccctctgaaggagtacttcgcctgcgtgagcagcggcaacagcaacgccaacagccggggccccagcttctctagcggcctggtgccactgtccctgagagggagccacatgggccccatggagatctacaaaaccgtgagcgcctggaagcggcagcctgtgcgcgtgctgagcctgtttcggaatatcgataaagtcctgaaaagcctgggattcctggagagcggctctggctccggcggtggcaccctgaagtacgtggaggatgtgacaaacgtggtcagacgggatgtggagaagtggggccccttcgatctggtgtacggcagcacccaacccctgggcagctcttgtgaccggtgccctggctggtacatgtttcagttccaccggatcctgcagtacgccctgccgagacaggagtcccagcggccattcttttggattttcatggacaacttgctgctgaccgaggatgaccaggaaactaccactcggttcctgcagaccgaagccgtgaccctgcaggacgtgagaggccgggactaccagaacgccatgcgggtgtggtccaacatccctggactgaaaagcaagcacgcacctctgacccctaaagaagaggagtacctgcaggcccaggtgcggagcagaagcaagctggacgcccctaaggtggatctgctggtgaagaattgcctcctgcccctgagagagtacttcaagtatttcagccagaatagtctgcccctgggaggcagcggcggcggcagcaaggtgcccgtgaccttcggcgacctggccatctacttcagccaggaggagtgggagtggctgagccccatccagaaggacctgtacgaggacgtgatgctggagaactaccagaacctggtgagcctgggcctgagcttcaggaggcccaacgtgatcaccctgctggagaagggcaaggccccctggatcgtggagcccgtgaggaagaggaggggcgtggacagcggcagcaagagcggcggcccaagcagcggcgcccctcctcccagcggcggcagcccagccggctccccaacctctaccgaggagggcacctctgagtccgccacccccgagagcggccctggcacctccaccgagcccagcgagggcagcgcacccggcagccctgccggcagccccacctccacagaggagggaaccagcaccgagcccagcgaaggcagcgccccaggcaccagcaccgagcctagtgagcaggagattaaacggatcaacaagatcagaagaagacttgtgaaagacagcaacaccaagaaggccggcaagacaggccccatgaaaaccctgctggttagagtgatgacacccgatctgagagagcggctggaaaacctgagaaagaagcctgaaaatatcccccagcccatcagcaatacatctagagccaacctgaataagctgctgaccgattacaccgaaatgaagaaggcgatcctgcatgtgtactgggaagagttccagaaggaccctgtgggcctgatgagccgggtggcccagcctgccagcaagaagatcgatcagaacaagctgaaacctgagatggacgagaagggcaacctgaccaccgccggctttgcctgctctcagtgtggccagcccctgttcgtgtacaagctggagcaggtgtctgagaagggcaaggcttacaccaactacttcggacggtgcaatgtggccgagcacgaaaagctgatcctgctggcccagctgaagcccgagaaggatagcgacgaagccgtgacatatagcctgggaaagtttgggcagagggccctggatttctacagcattcatgtgaccaaggagtccacccaccccgtgaagcccctggcccagatcgccggaaacagatacgcctccggacctgtgggaaaggccctgagcgacgcatgtatgggcacaatcgcctccttcctgtctaagtaccaggacatcatcatcgaacaccagaaggtggtgaagggcaaccagaagagactggagagcctgcgggagctggccggcaaggaaaacctggaataccctagcgtgaccctgccacctcagcctcacaccaaggagggcgttgatgcctacaacgaagtgatcgcccgggtgcgaatgtgggtgaacctgaacctgtggcagaagctgaagctaagcagagatgatgccaagcctctgctgagactgaagggattcccttcctttcctctggtcgagagacaggccaacgaagtggactggtgggacatggtgtgtaacgtgaagaagctgatcaacgagaaaaaggaggatggcaaggtgttttggcagaatctggctggctacaagagacaggaagccctgagaccatacctgagcagcgaggaagatcggaagaagggaaagaaattcgctcggtaccagctgggcgacctgctgctgcacctggaaaagaagcacggcgaggactggggaaaggtgtacgacgaggcctgggagcggattgacaagaaagtggaaggcctgagcaagcacatcaagctggaagaggaacggagaagcgaggacgcccagagcaaggccgccctgaccgactggctgcgggctaaggccagcttcgtgatcgagggcctgaaggaggccgacaaggacgagttctgcagatgcgagctgaagctgcagaagtggtacggggacctgcggggaaagcccttcgccatcgaagccgagaacagcatcctggacatcagcggcttcagcaagcagtacaactgtgccttcatctggcagaaggacggcgtgaagaagctgaacctgtacctgatcatcaactacttcaagggcggcaagctgcggttcaagaagatcaaacctgaagccttcgaagccaacagattctacaccgtgatcaacaaaaagagcggcgagatcgtgcccatggaggtgaacttcaacttcgacgaccccaacctgatcatcctgcctctggcctttggcaagagacagggcagagaattcatctggaacgacctgctgtccctggaaaccggcagcctgaagctggccaacggaagagtgatcgagaagacactgtacaacagaagaacccggcaggatgagcctgccctgttcgtggccctgaccttcgagcggcgggaggtcctggactcctccaatatcaaaccaatgaacctgatcggcgtggcaagaggcgaaaacatccccgccgtgatcgccctgaccgaccccgagggctgcccactgagccggtttaaggatagcctgggaaacccaacccacatcctgagaatcggcgagagctataaggagaagcagcggaccatccaggccaagaaggaggtggagcagcggagagccggcggctacagccggaagtacgccagcaaagccaagaatctggcagacgatatggtgagaaacaccgctagagatctgctgtactacgccgtgacccaggatgccatgctgatcttcgccaacctgagccggggcttcggccggcagggcaagcggaccttcatggccgagagacagtacacacggatggaggactggctgaccgccaagctggcctacgagggcctgagcaagacctacctgtccaagacactggcccagtacacctccaagacatgcagcaactgtgggtttaccatcaccagcgccgactacgacagggtgctggagaagctgaagaagacagcaacaggctggatgaccacaattaacggcaaggagctgaaggtggagggccagattacctactacaacagatacaagagacagaacgtagtcaaggacctgtccgtcgagctggatagactgagcgaagaatctgtgaacaacgacatctcctcctggacaaagggcagaagcggagaagctctgagcctcctgaagaaaagattctcccatagacccgtgcaggagaagttcgtgtgcctgaactgcggcttcgagacacacgcagccgagcaagccgccctgaacatcgccagatcctggctgttcctgcggagccaggagtacaagaaataccagacaaacaagacaaccggcaacaccgataagagagccttcgtcgagacctggcagtccttttaccggaagaagcttaaggaggtgtggaaacctgccgtgcggtctggcggatctggcggaggctccaccagccccaagaaaaagagaaaagtctaagctgccttctgcggggcttgccttctggccatgcccttcttctctcccttgcacctgtacctcttggtctttgaataaagcctgagtaggaaggctagcaaaaaaaaaaaaaaaaaaaaaaaaaaaaaaaaaaaaaaaaaaaaaaaaaaaaaaaaaaaaaaaaaaaaaaaaaaaaaaaa

SEQ ID NO: 12211 - RNA, 5785 nt, synthetic construct
  source 1..5785: mol_type = other RNA
aggaaataagagagaaaagaagagtaagaagaaatataagagccaccatggcccctaagaagaagcgtaaagtgagccggatggaacgcctcgtctacgaggtgcggcagaagtgcagaaacatcgaggacatctgcatctcctgcggatctctgaacgtgaccctggagcacccactgttcatcggcggcatgtgccagaactgtaaaaactgttttctggagtgtgcctatcaatacgacgatgacggctaccagagctactgcaccatctgttgcggcggaagagaggtgctgatgtgtggaaataacaactgctgccggtgcttctgcgtggaatgcgtggacctgctggtgggccccggcgccgcccaggccgctattaaggaagatccttggaactgctacatgtgcggccacaagggcacatacggcctgctgagacggagagaggactggcctagcagactgcagatgttcttcgccaataaccacgaccaggagttcgacccccctaaggtgtaccctcccgtccccgccgagaagagaaagcccatccgggtcctgagcctgttcgatggcatcgccaccggtctgctggtgctgaaggacctgggcatccaggtggataggtacattgcctccgaggtgtgcgaggactccatcaccgtgggaatggtgcgtcatcagggcaagatcatgtacgtgggcgacgtgcggagcgtgacacagaagcatatccaggagtggggccctttcgacctggtgatcggcggcagcccttgcaatgacctgagcatcgtgaacccagcccggaagggcctgtacgagggaaccggcagactgttcttcgagttttacagactgctgcacgacgcccggcctaaggaaggcgacgaccggcccttcttttggctgttcgagaatgtggtggccatgggagtcagcgacaagcgggatattagccggttcctggagagcaaccccgtgatgatcgatgccaaggaagtgagcgccgcccaccgggccagatacttctggggcaatctgcctggcatgaacagacccctggccagcaccgtgaacgacaagctggagctgcaggagtgcctggagcacggccggatcgccaagttcagcaaggtgagaaccatcaccacccgaagcaacagcatcaaacaaggcaaggaccagcactttcctgtgttcatgaacgagaaggaggacatcctgtggtgtaccgagatggagagagtgttcgggttcccagtccactacacagatgtcagcaacatgtctagactggccagacagagactgctgggaagaagctggtccgtccctgtgatcagacacctgttcgcccctctgaaggagtacttcgcctgcgtgagcagcggcaacagcaacgccaacagccggggccccagcttctctagcggcctggtgccactgtccctgagagggagccacatgggccccatggagatctacaaaaccgtgagcgcctggaagcggcagcctgtgcgcgtgctgagcctgtttcggaatatcgataaagtcctgaaaagcctgggattcctggagagcggctctggctccggcggtggcaccctgaagtacgtggaggatgtgacaaacgtggtcagacgggatgtggagaagtggggccccttcgatctggtgtacggcagcacccaacccctgggcagctcttgtgaccggtgccctggctggtacatgtttcagttccaccggatcctgcagtacgccctgccgagacaggagtcccagcggccattcttttggattttcatggacaacttgctgctgaccgaggatgaccaggaaactaccactcggttcctgcagaccgaagccgtgaccctgcaggacgtgagaggccgggactaccagaacgccatgcgggtgtggtccaacatccctggactgaaaagcaagcacgcacctctgacccctaaagaagaggagtacctgcaggcccaggtgcggagcagaagcaagctggacgcccctaaggtggatctgctggtgaagaattgcctcctgcccctgagagagtacttcaagtatttcagccagaatagtctgcccctgggaggcagcggcggcggcaagcccggcgccgtgagcttcgccgacgtggccgtgtacttcagccccgaggagtggggctgcctgaggcccgcccagagggccctgtacagggacgtgatgagggagacctacggccacctgggcgccctgggcttccccggccccaagcccgccctgatcagctggatggagcaggagagcgaggcctggagcagcgccgcccaggaccccgagaacggcgagagcctgggcggcgccaggggcggcccaagcagcggcgcccctcctcccagcggcggcagcccagccggctccccaacctctaccgaggagggcacctctgagtccgccacccccgagagcggccctggcacctccaccgagcccagcgagggcagcgcacccggcagccctgccggcagccccacctccacagaggagggaaccagcaccgagcccagcgaaggcagcgccccaggcaccagcaccgagcctagtgagcaggagattaaacggatcaacaagatcagaagaagacttgtgaaagacagcaacaccaagaaggccggcaagacaggccccatgaaaaccctgctggttagagtgatgacacccgatctgagagagcggctggaaaacctgagaaagaagcctgaaaatatcccccagcccatcagcaatacatctagagccaacctgaataagctgctgaccgattacaccgaaatgaagaaggcgatcctgcatgtgtactgggaagagttccagaaggaccctgtgggcctgatgagccgggtggcccagcctgccagcaagaagatcgatcagaacaagctgaaacctgagatggacgagaagggcaacctgaccaccgccggctttgcctgctctcagtgtggccagcccctgttcgtgtacaagctggagcaggtgtctgagaagggcaaggcttacaccaactacttcggacggtgcaatgtggccgagcacgaaaagctgatcctgctggcccagctgaagcccgagaaggatagcgacgaagccgtgacatatagcctgggaaagtttgggcagagggccctggatttctacagcattcatgtgaccaaggagtccacccaccccgtgaagcccctggcccagatcgccggaaacagatacgcctccggacctgtgggaaaggccctgagcgacgcatgtatgggcacaatcgcctccttcctgtctaagtaccaggacatcatcatcgaacaccagaaggtggtgaagggcaaccagaagagactggagagcctgcgggagctggccggcaaggaaaacctggaataccctagcgtgaccctgccacctcagcctcacaccaaggagggcgttgatgcctacaacgaagtgatcgcccgggtgcgaatgtgggtgaacctgaacctgtggcagaagctgaagctaagcagagatgatgccaagcctctgctgagactgaagggattcccttcctttcctctggtcgagagacaggccaacgaagtggactggtgggacatggtgtgtaacgtgaagaagctgatcaacgagaaaaaggaggatggcaaggtgttttggcagaatctggctggctacaagagacaggaagccctgagaccatacctgagcagcgaggaagatcggaagaagggaaagaaattcgctcggtaccagctgggcgacctgctgctgcacctggaaaagaagcacggcgaggactggggaaaggtgtacgacgaggcctgggagcggattgacaagaaagtggaaggcctgagcaagcacatcaagctggaagaggaacggagaagcgaggacgcccagagcaaggccgccctgaccgactggctgcgggctaaggccagcttcgtgatcgagggcctgaaggaggccgacaaggacgagttctgcagatgcgagctgaagctgcagaagtggtacggggacctgcggggaaagcccttcgccatcgaagccgagaacagcatcctggacatcagcggcttcagcaagcagtacaactgtgccttcatctggcagaaggacggcgtgaagaagctgaacctgtacctgatcatcaactacttcaagggcggcaagctgcggttcaagaagatcaaacctgaagccttcgaagccaacagattctacaccgtgatcaacaaaaagagcggcgagatcgtgcccatggaggtgaacttcaacttcgacgaccccaacctgatcatcctgcctctggcctttggcaagagacagggcagagaattcatctggaacgacctgctgtccctggaaaccggcagcctgaagctggccaacggaagagtgatcgagaagacactgtacaacagaagaacccggcaggatgagcctgccctgttcgtggccctgaccttcgagcggcgggaggtcctggactcctccaatatcaaaccaatgaacctgatcggcgtggcaagaggcgaaaacatccccgccgtgatcgccctgaccgaccccgagggctgcccactgagccggtttaaggatagcctgggaaacccaacccacatcctgagaatcggcgagagctataaggagaagcagcggaccatccaggccaagaaggaggtggagcagcggagagccggcggctacagccggaagtacgccagcaaagccaagaatctggcagacgatatggtgagaaacaccgctagagatctgctgtactacgccgtgacccaggatgccatgctgatcttcgccaacctgagccggggcttcggccggcagggcaagcggaccttcatggccgagagacagtacacacggatggaggactggctgaccgccaagctggcctacgagggcctgagcaagacctacctgtccaagacactggcccagtacacctccaagacatgcagcaactgtgggtttaccatcaccagcgccgactacgacagggtgctggagaagctgaagaagacagcaacaggctggatgaccacaattaacggcaaggagctgaaggtggagggccagattacctactacaacagatacaagagacagaacgtagtcaaggacctgtccgtcgagctggatagactgagcgaagaatctgtgaacaacgacatctcctcctggacaaagggcagaagcggagaagctctgagcctcctgaagaaaagattctcccatagacccgtgcaggagaagttcgtgtgcctgaactgcggcttcgagacacacgcagccgagcaagccgccctgaacatcgccagatcctggctgttcctgcggagccaggagtacaagaaataccagacaaacaagacaaccggcaacaccgataagagagccttcgtcgagacctggcagtccttttaccggaagaagcttaaggaggtgtggaaacctgccgtgcggtctggcggatctggcggaggctccaccagccccaagaaaaagagaaaagtctaagctgccttctgcggggcttgccttctggccatgcccttcttctctcccttgcacctgtacctcttggtctttgaataaagcctgagtaggaaggctagcaaaaaaaaaaaaaaaaaaaaaaaaaaaaaaaaaaaaaaaaaaaaaaaaaaaaaaaaaaaaaaaaaaaaaaaaaaaaaaaa

SEQ ID NO: 12212 - RNA, 5785 nt, synthetic construct
  source 1..5785: mol_type = other RNA
aggaaataagagagaaaagaagagtaagaagaaatataagagccaccatggcccctaagaagaagcgtaaagtgagccggatggaacgcctcgtctacgaggtgcggcagaagtgcagaaacatcgaggacatctgcatctcctgcggatctctgaacgtgaccctggagcacccactgttcatcggcggcatgtgccagaactgtaaaaactgttttctggagtgtgcctatcaatacgacgatgacggctaccagagctactgcaccatctgttgcggcggaagagaggtgctgatgtgtggaaataacaactgctgccggtgcttctgcgtggaatgcgtggacctgctggtgggccccggcgccgcccaggccgctattaaggaagatccttggaactgctacatgtgcggccacaagggcacatacggcctgctgagacggagagaggactggcctagcagactgcagatgttcttcgccaataaccacgaccaggagttcgacccccctaaggtgtaccctcccgtccccgccgagaagagaaagcccatccgggtcctgagcctgttcgatggcatcgccaccggtctgctggtgctgaaggacctgggcatccaggtggataggtacattgcctccgaggtgtgcgaggactccatcaccgtgggaatggtgcgtcatcagggcaagatcatgtacgtgggcgacgtgcggagcgtgacacagaagcatatccaggagtggggccctttcgacctggtgatcggcggcagcccttgcaatgacctgagcatcgtgaacccagcccggaagggcctgtacgagggaaccggcagactgttcttcgagttttacagactgctgcacgacgcccggcctaaggaaggcgacgaccggcccttcttttggctgttcgagaatgtggtggccatgggagtcagcgacaagcgggatattagccggttcctggagagcaaccccgtgatgatcgatgccaaggaagtgagcgccgcccaccgggccagatacttctggggcaatctgcctggcatgaacagacccctggccagcaccgtgaacgacaagctggagctgcaggagtgcctggagcacggccggatcgccaagttcagcaaggtgagaaccatcaccacccgaagcaacagcatcaaacaaggcaaggaccagcactttcctgtgttcatgaacgagaaggaggacatcctgtggtgtaccgagatggagagagtgttcgggttcccagtccactacacagatgtcagcaacatgtctagactggccagacagagactgctgggaagaagctggtccgtccctgtgatcagacacctgttcgcccctctgaaggagtacttcgcctgcgtgagcagcggcaacagcaacgccaacagccggggccccagcttctctagcggcctggtgccactgtccctgagagggagccacatgggccccatggagatctacaaaaccgtgagcgcctggaagcggcagcctgtgcgcgtgctgagcctgtttcggaatatcgataaagtcctgaaaagcctgggattcctggagagcggctctggctccggcggtggcaccctgaagtacgtggaggatgtgacaaacgtggtcagacgggatgtggagaagtggggccccttcgatctggtgtacggcagcacccaacccctgggcagctcttgtgaccggtgccctggctggtacatgtttcagttccaccggatcctgcagtacgccctgccgagacaggagtcccagcggccattcttttggattttcatggacaacttgctgctgaccgaggatgaccaggaaactaccactcggttcctgcagaccgaagccgtgaccctgcaggacgtgagaggccgggactaccagaacgccatgcgggtgtggtccaacatccctggactgaaaagcaagcacgcacctctgacccctaaagaagaggagtacctgcaggcccaggtgcggagcagaagcaagctggacgcccctaaggtggatctgctggtgaagaattgcctcctgcccctgagagagtacttcaagtatttcagccagaatagtctgcccctgggaggcagcggcggcggcgtgaggatgcccgtgaccttcgaggacgtggccgtgaccttcacccaggaggagtggggccagctggaccccgcccagaggaccctgtaccaggaggtgatgctggagacctgcggcctgctggtgagcctgggctgccccctgcccaagcccgagctgttctaccccctggaccacagccccgagctgcagaccctgaagaggggcctgagccccaacagctgccccggcgacagcaccaagggcggcccaagcagcggcgcccctcctcccagcggcggcagcccagccggctccccaacctctaccgaggagggcacctctgagtccgccacccccgagagcggccctggcacctccaccgagcccagcgagggcagcgcacccggcagccctgccggcagccccacctccacagaggagggaaccagcaccgagcccagcgaaggcagcgccccaggcaccagcaccgagcctagtgagcaggagattaaacggatcaacaagatcagaagaagacttgtgaaagacagcaacaccaagaaggccggcaagacaggccccatgaaaaccctgctggttagagtgatgacacccgatctgagagagcggctggaaaacctgagaaagaagcctgaaaatatcccccagcccatcagcaatacatctagagccaacctgaataagctgctgaccgattacaccgaaatgaagaaggcgatcctgcatgtgtactgggaagagttccagaaggaccctgtgggcctgatgagccgggtggcccagcctgccagcaagaagatcgatcagaacaagctgaaacctgagatggacgagaagggcaacctgaccaccgccggctttgcctgctctcagtgtggccagcccctgttcgtgtacaagctggagcaggtgtctgagaagggcaaggcttacaccaactacttcggacggtgcaatgtggccgagcacgaaaagctgatcctgctggcccagctgaagcccgagaaggatagcgacgaagccgtgacatatagcctgggaaagtttgggcagagggccctggatttctacagcattcatgtgaccaaggagtccacccaccccgtgaagcccctggcccagatcgccggaaacagatacgcctccggacctgtgggaaaggccctgagcgacgcatgtatgggcacaatcgcctccttcctgtctaagtaccaggacatcatcatcgaacaccagaaggtggtgaagggcaaccagaagagactggagagcctgcgggagctggccggcaaggaaaacctggaataccctagcgtgaccctgccacctcagcctcacaccaaggagggcgttgatgcctacaacgaagtgatcgcccgggtgcgaatgtgggtgaacctgaacctgtggcagaagctgaagctaagcagagatgatgccaagcctctgctgagactgaagggattcccttcctttcctctggtcgagagacaggccaacgaagtggactggtgggacatggtgtgtaacgtgaagaagctgatcaacgagaaaaaggaggatggcaaggtgttttggcagaatctggctggctacaagagacaggaagccctgagaccatacctgagcagcgaggaagatcggaagaagggaaagaaattcgctcggtaccagctgggcgacctgctgctgcacctggaaaagaagcacggcgaggactggggaaaggtgtacgacgaggcctgggagcggattgacaagaaagtggaaggcctgagcaagcacatcaagctggaagaggaacggagaagcgaggacgcccagagcaaggccgccctgaccgactggctgcgggctaaggccagcttcgtgatcgagggcctgaaggaggccgacaaggacgagttctgcagatgcgagctgaagctgcagaagtggtacggggacctgcggggaaagcccttcgccatcgaagccgagaacagcatcctggacatcagcggcttcagcaagcagtacaactgtgccttcatctggcagaaggacggcgtgaagaagctgaacctgtacctgatcatcaactacttcaagggcggcaagctgcggttcaagaagatcaaacctgaagccttcgaagccaacagattctacaccgtgatcaacaaaaagagcggcgagatcgtgcccatggaggtgaacttcaacttcgacgaccccaacctgatcatcctgcctctggcctttggcaagagacagggcagagaattcatctggaacgacctgctgtccctggaaaccggcagcctgaagctggccaacggaagagtgatcgagaagacactgtacaacagaagaacccggcaggatgagcctgccctgttcgtggccctgaccttcgagcggcgggaggtcctggactcctccaatatcaaaccaatgaacctgatcggcgtggcaagaggcgaaaacatccccgccgtgatcgccctgaccgaccccgagggctgcccactgagccggtttaaggatagcctgggaaacccaacccacatcctgagaatcggcgagagctataaggagaagcagcggaccatccaggccaagaaggaggtggagcagcggagagccggcggctacagccggaagtacgccagcaaagccaagaatctggcagacgatatggtgagaaacaccgctagagatctgctgtactacgccgtgacccaggatgccatgctgatcttcgccaacctgagccggggcttcggccggcagggcaagcggaccttcatggccgagagacagtacacacggatggaggactggctgaccgccaagctggcctacgagggcctgagcaagacctacctgtccaagacactggcccagtacacctccaagacatgcagcaactgtgggtttaccatcaccagcgccgactacgacagggtgctggagaagctgaagaagacagcaacaggctggatgaccacaattaacggcaaggagctgaaggtggagggccagattacctactacaacagatacaagagacagaacgtagtcaaggacctgtccgtcgagctggatagactgagcgaagaatctgtgaacaacgacatctcctcctggacaaagggcagaagcggagaagctctgagcctcctgaagaaaagattctcccatagacccgtgcaggagaagttcgtgtgcctgaactgcggcttcgagacacacgcagccgagcaagccgccctgaacatcgccagatcctggctgttcctgcggagccaggagtacaagaaataccagacaaacaagacaaccggcaacaccgataagagagccttcgtcgagacctggcagtccttttaccggaagaagcttaaggaggtgtggaaacctgccgtgcggtctggcggatctggcggaggctccaccagccccaagaaaaagagaaaagtctaagctgccttctgcggggcttgccttctggccatgcccttcttctctcccttgcacctgtacctcttggtctttgaataaagcctgagtaggaaggctagcaaaaaaaaaaaaaaaaaaaaaaaaaaaaaaaaaaaaaaaaaaaaaaaaaaaaaaaaaaaaaaaaaaaaaaaaaaaaaaaa

SEQ ID NO: 12213 - RNA, 5785 nt, synthetic construct
  source 1..5785: mol_type = other RNA
aggaaataagagagaaaagaagagtaagaagaaatataagagccaccatggcccctaagaagaagcgtaaagtgagccggatggaacgcctcgtctacgaggtgcggcagaagtgcagaaacatcgaggacatctgcatctcctgcggatctctgaacgtgaccctggagcacccactgttcatcggcggcatgtgccagaactgtaaaaactgttttctggagtgtgcctatcaatacgacgatgacggctaccagagctactgcaccatctgttgcggcggaagagaggtgctgatgtgtggaaataacaactgctgccggtgcttctgcgtggaatgcgtggacctgctggtgggccccggcgccgcccaggccgctattaaggaagatccttggaactgctacatgtgcggccacaagggcacatacggcctgctgagacggagagaggactggcctagcagactgcagatgttcttcgccaataaccacgaccaggagttcgacccccctaaggtgtaccctcccgtccccgccgagaagagaaagcccatccgggtcctgagcctgttcgatggcatcgccaccggtctgctggtgctgaaggacctgggcatccaggtggataggtacattgcctccgaggtgtgcgaggactccatcaccgtgggaatggtgcgtcatcagggcaagatcatgtacgtgggcgacgtgcggagcgtgacacagaagcatatccaggagtggggccctttcgacctggtgatcggcggcagcccttgcaatgacctgagcatcgtgaacccagcccggaagggcctgtacgagggaaccggcagactgttcttcgagttttacagactgctgcacgacgcccggcctaaggaaggcgacgaccggcccttcttttggctgttcgagaatgtggtggccatgggagtcagcgacaagcgggatattagccggttcctggagagcaaccccgtgatgatcgatgccaaggaagtgagcgccgcccaccgggccagatacttctggggcaatctgcctggcatgaacagacccctggccagcaccgtgaacgacaagctggagctgcaggagtgcctggagcacggccggatcgccaagttcagcaaggtgagaaccatcaccacccgaagcaacagcatcaaacaaggcaaggaccagcactttcctgtgttcatgaacgagaaggaggacatcctgtggtgtaccgagatggagagagtgttcgggttcccagtccactacacagatgtcagcaacatgtctagactggccagacagagactgctgggaagaagctggtccgtccctgtgatcagacacctgttcgcccctctgaaggagtacttcgcctgcgtgagcagcggcaacagcaacgccaacagccggggccccagcttctctagcggcctggtgccactgtccctgagagggagccacatgggccccatggagatctacaaaaccgtgagcgcctggaagcggcagcctgtgcgcgtgctgagcctgtttcggaatatcgataaagtcctgaaaagcctgggattcctggagagcggctctggctccggcggtggcaccctgaagtacgtggaggatgtgacaaacgtggtcagacgggatgtggagaagtggggccccttcgatctggtgtacggcagcacccaacccctgggcagctcttgtgaccggtgccctggctggtacatgtttcagttccaccggatcctgcagtacgccctgccgagacaggagtcccagcggccattcttttggattttcatggacaacttgctgctgaccgaggatgaccaggaaactaccactcggttcctgcagaccgaagccgtgaccctgcaggacgtgagaggccgggactaccagaacgccatgcgggtgtggtccaacatccctggactgaaaagcaagcacgcacctctgacccctaaagaagaggagtacctgcaggcccaggtgcggagcagaagcaagctggacgcccctaaggtggatctgctggtgaagaattgcctcctgcccctgagagagtacttcaagtatttcagccagaatagtctgcccctgggaggcagcggcggcggcatggccttcgaggacgtggccgtgcacttcagccaggaggagtggggcctgctggacaccgcccagaggagcctgtacaggagggtgatgctggagaacttcgccctgctggccagcctgggcctgagcgtgagcaggccccacgtggtgacccagctggagaggggcgaggagccctgggtgctgagcggcgtggacgtgaccctgccccaggacgcccagaggaggcccaggaggggcagcggcggcccaagcagcggcgcccctcctcccagcggcggcagcccagccggctccccaacctctaccgaggagggcacctctgagtccgccacccccgagagcggccctggcacctccaccgagcccagcgagggcagcgcacccggcagccctgccggcagccccacctccacagaggagggaaccagcaccgagcccagcgaaggcagcgccccaggcaccagcaccgagcctagtgagcaggagattaaacggatcaacaagatcagaagaagacttgtgaaagacagcaacaccaagaaggccggcaagacaggccccatgaaaaccctgctggttagagtgatgacacccgatctgagagagcggctggaaaacctgagaaagaagcctgaaaatatcccccagcccatcagcaatacatctagagccaacctgaataagctgctgaccgattacaccgaaatgaagaaggcgatcctgcatgtgtactgggaagagttccagaaggaccctgtgggcctgatgagccgggtggcccagcctgccagcaagaagatcgatcagaacaagctgaaacctgagatggacgagaagggcaacctgaccaccgccggctttgcctgctctcagtgtggccagcccctgttcgtgtacaagctggagcaggtgtctgagaagggcaaggcttacaccaactacttcggacggtgcaatgtggccgagcacgaaaagctgatcctgctggcccagctgaagcccgagaaggatagcgacgaagccgtgacatatagcctgggaaagtttgggcagagggccctggatttctacagcattcatgtgaccaaggagtccacccaccccgtgaagcccctggcccagatcgccggaaacagatacgcctccggacctgtgggaaaggccctgagcgacgcatgtatgggcacaatcgcctccttcctgtctaagtaccaggacatcatcatcgaacaccagaaggtggtgaagggcaaccagaagagactggagagcctgcgggagctggccggcaaggaaaacctggaataccctagcgtgaccctgccacctcagcctcacaccaaggagggcgttgatgcctacaacgaagtgatcgcccgggtgcgaatgtgggtgaacctgaacctgtggcagaagctgaagctaagcagagatgatgccaagcctctgctgagactgaagggattcccttcctttcctctggtcgagagacaggccaacgaagtggactggtgggacatggtgtgtaacgtgaagaagctgatcaacgagaaaaaggaggatggcaaggtgttttggcagaatctggctggctacaagagacaggaagccctgagaccatacctgagcagcgaggaagatcggaagaagggaaagaaattcgctcggtaccagctgggcgacctgctgctgcacctggaaaagaagcacggcgaggactggggaaaggtgtacgacgaggcctgggagcggattgacaagaaagtggaaggcctgagcaagcacatcaagctggaagaggaacggagaagcgaggacgcccagagcaaggccgccctgaccgactggctgcgggctaaggccagcttcgtgatcgagggcctgaaggaggccgacaaggacgagttctgcagatgcgagctgaagctgcagaagtggtacggggacctgcggggaaagcccttcgccatcgaagccgagaacagcatcctggacatcagcggcttcagcaagcagtacaactgtgccttcatctggcagaaggacggcgtgaagaagctgaacctgtacctgatcatcaactacttcaagggcggcaagctgcggttcaagaagatcaaacctgaagccttcgaagccaacagattctacaccgtgatcaacaaaaagagcggcgagatcgtgcccatggaggtgaacttcaacttcgacgaccccaacctgatcatcctgcctctggcctttggcaagagacagggcagagaattcatctggaacgacctgctgtccctggaaaccggcagcctgaagctggccaacggaagagtgatcgagaagacactgtacaacagaagaacccggcaggatgagcctgccctgttcgtggccctgaccttcgagcggcgggaggtcctggactcctccaatatcaaaccaatgaacctgatcggcgtggcaagaggcgaaaacatccccgccgtgatcgccctgaccgaccccgagggctgcccactgagccggtttaaggatagcctgggaaacccaacccacatcctgagaatcggcgagagctataaggagaagcagcggaccatccaggccaagaaggaggtggagcagcggagagccggcggctacagccggaagtacgccagcaaagccaagaatctggcagacgatatggtgagaaacaccgctagagatctgctgtactacgccgtgacccaggatgccatgctgatcttcgccaacctgagccggggcttcggccggcagggcaagcggaccttcatggccgagagacagtacacacggatggaggactggctgaccgccaagctggcctacgagggcctgagcaagacctacctgtccaagacactggcccagtacacctccaagacatgcagcaactgtgggtttaccatcaccagcgccgactacgacagggtgctggagaagctgaagaagacagcaacaggctggatgaccacaattaacggcaaggagctgaaggtggagggccagattacctactacaacagatacaagagacagaacgtagtcaaggacctgtccgtcgagctggatagactgagcgaagaatctgtgaacaacgacatctcctcctggacaaagggcagaagcggagaagctctgagcctcctgaagaaaagattctcccatagacccgtgcaggagaagttcgtgtgcctgaactgcggcttcgagacacacgcagccgagcaagccgccctgaacatcgccagatcctggctgttcctgcggagccaggagtacaagaaataccagacaaacaagacaaccggcaacaccgataagagagccttcgtcgagacctggcagtccttttaccggaagaagcttaaggaggtgtggaaacctgccgtgcggtctggcggatctggcggaggctccaccagccccaagaaaaagagaaaagtctaagctgccttctgcggggcttgccttctggccatgcccttcttctctcccttgcacctgtacctcttggtctttgaataaagcctgagtaggaaggctagcaaaaaaaaaaaaaaaaaaaaaaaaaaaaaaaaaaaaaaaaaaaaaaaaaaaaaaaaaaaaaaaaaaaaaaaaaaaaaaaa

SEQ ID NO: 12214 - RNA, 5785 nt, synthetic construct
  source 1..5785: mol_type = other RNA
aggaaataagagagaaaagaagagtaagaagaaatataagagccaccatggcccctaagaagaagcgtaaagtgagccggatggaacgcctcgtctacgaggtgcggcagaagtgcagaaacatcgaggacatctgcatctcctgcggatctctgaacgtgaccctggagcacccactgttcatcggcggcatgtgccagaactgtaaaaactgttttctggagtgtgcctatcaatacgacgatgacggctaccagagctactgcaccatctgttgcggcggaagagaggtgctgatgtgtggaaataacaactgctgccggtgcttctgcgtggaatgcgtggacctgctggtgggccccggcgccgcccaggccgctattaaggaagatccttggaactgctacatgtgcggccacaagggcacatacggcctgctgagacggagagaggactggcctagcagactgcagatgttcttcgccaataaccacgaccaggagttcgacccccctaaggtgtaccctcccgtccccgccgagaagagaaagcccatccgggtcctgagcctgttcgatggcatcgccaccggtctgctggtgctgaaggacctgggcatccaggtggataggtacattgcctccgaggtgtgcgaggactccatcaccgtgggaatggtgcgtcatcagggcaagatcatgtacgtgggcgacgtgcggagcgtgacacagaagcatatccaggagtggggccctttcgacctggtgatcggcggcagcccttgcaatgacctgagcatcgtgaacccagcccggaagggcctgtacgagggaaccggcagactgttcttcgagttttacagactgctgcacgacgcccggcctaaggaaggcgacgaccggcccttcttttggctgttcgagaatgtggtggccatgggagtcagcgacaagcgggatattagccggttcctggagagcaaccccgtgatgatcgatgccaaggaagtgagcgccgcccaccgggccagatacttctggggcaatctgcctggcatgaacagacccctggccagcaccgtgaacgacaagctggagctgcaggagtgcctggagcacggccggatcgccaagttcagcaaggtgagaaccatcaccacccgaagcaacagcatcaaacaaggcaaggaccagcactttcctgtgttcatgaacgagaaggaggacatcctgtggtgtaccgagatggagagagtgttcgggttcccagtccactacacagatgtcagcaacatgtctagactggccagacagagactgctgggaagaagctggtccgtccctgtgatcagacacctgttcgcccctctgaaggagtacttcgcctgcgtgagcagcggcaacagcaacgccaacagccggggccccagcttctctagcggcctggtgccactgtccctgagagggagccacatgggccccatggagatctacaaaaccgtgagcgcctggaagcggcagcctgtgcgcgtgctgagcctgtttcggaatatcgataaagtcctgaaaagcctgggattcctggagagcggctctggctccggcggtggcaccctgaagtacgtggaggatgtgacaaacgtggtcagacgggatgtggagaagtggggccccttcgatctggtgtacggcagcacccaacccctgggcagctcttgtgaccggtgccctggctggtacatgtttcagttccaccggatcctgcagtacgccctgccgagacaggagtcccagcggccattcttttggattttcatggacaacttgctgctgaccgaggatgaccaggaaactaccactcggttcctgcagaccgaagccgtgaccctgcaggacgtgagaggccgggactaccagaacgccatgcgggtgtggtccaacatccctggactgaaaagcaagcacgcacctctgacccctaaagaagaggagtacctgcaggcccaggtgcggagcagaagcaagctggacgcccctaaggtggatctgctggtgaagaattgcctcctgcccctgagagagtacttcaagtatttcagccagaatagtctgcccctgggaggcagcggcggcggcttccagagcgaggtgatgttcagggacgtgaccgtgaacttcagccaggaggagtgggagtgcctgaacagctacgagagggacctgtacaaggacgtgatgctggagaactacagccacctggtgagcctgggctgcagcatcagcaagcccgacgtgatcaccctgctggagcagggcaaggagccctggatgatcgtgagggacgagaggaggaggtggagccaggacctggagaccaggggcggcccaagcagcggcgcccctcctcccagcggcggcagcccagccggctccccaacctctaccgaggagggcacctctgagtccgccacccccgagagcggccctggcacctccaccgagcccagcgagggcagcgcacccggcagccctgccggcagccccacctccacagaggagggaaccagcaccgagcccagcgaaggcagcgccccaggcaccagcaccgagcctagtgagcaggagattaaacggatcaacaagatcagaagaagacttgtgaaagacagcaacaccaagaaggccggcaagacaggccccatgaaaaccctgctggttagagtgatgacacccgatctgagagagcggctggaaaacctgagaaagaagcctgaaaatatcccccagcccatcagcaatacatctagagccaacctgaataagctgctgaccgattacaccgaaatgaagaaggcgatcctgcatgtgtactgggaagagttccagaaggaccctgtgggcctgatgagccgggtggcccagcctgccagcaagaagatcgatcagaacaagctgaaacctgagatggacgagaagggcaacctgaccaccgccggctttgcctgctctcagtgtggccagcccctgttcgtgtacaagctggagcaggtgtctgagaagggcaaggcttacaccaactacttcggacggtgcaatgtggccgagcacgaaaagctgatcctgctggcccagctgaagcccgagaaggatagcgacgaagccgtgacatatagcctgggaaagtttgggcagagggccctggatttctacagcattcatgtgaccaaggagtccacccaccccgtgaagcccctggcccagatcgccggaaacagatacgcctccggacctgtgggaaaggccctgagcgacgcatgtatgggcacaatcgcctccttcctgtctaagtaccaggacatcatcatcgaacaccagaaggtggtgaagggcaaccagaagagactggagagcctgcgggagctggccggcaaggaaaacctggaataccctagcgtgaccctgccacctcagcctcacaccaaggagggcgttgatgcctacaacgaagtgatcgcccgggtgcgaatgtgggtgaacctgaacctgtggcagaagctgaagctaagcagagatgatgccaagcctctgctgagactgaagggattcccttcctttcctctggtcgagagacaggccaacgaagtggactggtgggacatggtgtgtaacgtgaagaagctgatcaacgagaaaaaggaggatggcaaggtgttttggcagaatctggctggctacaagagacaggaagccctgagaccatacctgagcagcgaggaagatcggaagaagggaaagaaattcgctcggtaccagctgggcgacctgctgctgcacctggaaaagaagcacggcgaggactggggaaaggtgtacgacgaggcctgggagcggattgacaagaaagtggaaggcctgagcaagcacatcaagctggaagaggaacggagaagcgaggacgcccagagcaaggccgccctgaccgactggctgcgggctaaggccagcttcgtgatcgagggcctgaaggaggccgacaaggacgagttctgcagatgcgagctgaagctgcagaagtggtacggggacctgcggggaaagcccttcgccatcgaagccgagaacagcatcctggacatcagcggcttcagcaagcagtacaactgtgccttcatctggcagaaggacggcgtgaagaagctgaacctgtacctgatcatcaactacttcaagggcggcaagctgcggttcaagaagatcaaacctgaagccttcgaagccaacagattctacaccgtgatcaacaaaaagagcggcgagatcgtgcccatggaggtgaacttcaacttcgacgaccccaacctgatcatcctgcctctggcctttggcaagagacagggcagagaattcatctggaacgacctgctgtccctggaaaccggcagcctgaagctggccaacggaagagtgatcgagaagacactgtacaacagaagaacccggcaggatgagcctgccctgttcgtggccctgaccttcgagcggcgggaggtcctggactcctccaatatcaaaccaatgaacctgatcggcgtggcaagaggcgaaaacatccccgccgtgatcgccctgaccgaccccgagggctgcccactgagccggtttaaggatagcctgggaaacccaacccacatcctgagaatcggcgagagctataaggagaagcagcggaccatccaggccaagaaggaggtggagcagcggagagccggcggctacagccggaagtacgccagcaaagccaagaatctggcagacgatatggtgagaaacaccgctagagatctgctgtactacgccgtgacccaggatgccatgctgatcttcgccaacctgagccggggcttcggccggcagggcaagcggaccttcatggccgagagacagtacacacggatggaggactggctgaccgccaagctggcctacgagggcctgagcaagacctacctgtccaagacactggcccagtacacctccaagacatgcagcaactgtgggtttaccatcaccagcgccgactacgacagggtgctggagaagctgaagaagacagcaacaggctggatgaccacaattaacggcaaggagctgaaggtggagggccagattacctactacaacagatacaagagacagaacgtagtcaaggacctgtccgtcgagctggatagactgagcgaagaatctgtgaacaacgacatctcctcctggacaaagggcagaagcggagaagctctgagcctcctgaagaaaagattctcccatagacccgtgcaggagaagttcgtgtgcctgaactgcggcttcgagacacacgcagccgagcaagccgccctgaacatcgccagatcctggctgttcctgcggagccaggagtacaagaaataccagacaaacaagacaaccggcaacaccgataagagagccttcgtcgagacctggcagtccttttaccggaagaagcttaaggaggtgtggaaacctgccgtgcggtctggcggatctggcggaggctccaccagccccaagaaaaagagaaaagtctaagctgccttctgcggggcttgccttctggccatgcccttcttctctcccttgcacctgtacctcttggtctttgaataaagcctgagtaggaaggctagcaaaaaaaaaaaaaaaaaaaaaaaaaaaaaaaaaaaaaaaaaaaaaaaaaaaaaaaaaaaaaaaaaaaaaaaaaaaaaaaa

SEQ ID NO: 12215 - RNA, 5785 nt, synthetic construct
  source 1..5785: mol_type = other RNA
aggaaataagagagaaaagaagagtaagaagaaatataagagccaccatggcccctaagaagaagcgtaaagtgagccggatggaacgcctcgtctacgaggtgcggcagaagtgcagaaacatcgaggacatctgcatctcctgcggatctctgaacgtgaccctggagcacccactgttcatcggcggcatgtgccagaactgtaaaaactgttttctggagtgtgcctatcaatacgacgatgacggctaccagagctactgcaccatctgttgcggcggaagagaggtgctgatgtgtggaaataacaactgctgccggtgcttctgcgtggaatgcgtggacctgctggtgggccccggcgccgcccaggccgctattaaggaagatccttggaactgctacatgtgcggccacaagggcacatacggcctgctgagacggagagaggactggcctagcagactgcagatgttcttcgccaataaccacgaccaggagttcgacccccctaaggtgtaccctcccgtccccgccgagaagagaaagcccatccgggtcctgagcctgttcgatggcatcgccaccggtctgctggtgctgaaggacctgggcatccaggtggataggtacattgcctccgaggtgtgcgaggactccatcaccgtgggaatggtgcgtcatcagggcaagatcatgtacgtgggcgacgtgcggagcgtgacacagaagcatatccaggagtggggccctttcgacctggtgatcggcggcagcccttgcaatgacctgagcatcgtgaacccagcccggaagggcctgtacgagggaaccggcagactgttcttcgagttttacagactgctgcacgacgcccggcctaaggaaggcgacgaccggcccttcttttggctgttcgagaatgtggtggccatgggagtcagcgacaagcgggatattagccggttcctggagagcaaccccgtgatgatcgatgccaaggaagtgagcgccgcccaccgggccagatacttctggggcaatctgcctggcatgaacagacccctggccagcaccgtgaacgacaagctggagctgcaggagtgcctggagcacggccggatcgccaagttcagcaaggtgagaaccatcaccacccgaagcaacagcatcaaacaaggcaaggaccagcactttcctgtgttcatgaacgagaaggaggacatcctgtggtgtaccgagatggagagagtgttcgggttcccagtccactacacagatgtcagcaacatgtctagactggccagacagagactgctgggaagaagctggtccgtccctgtgatcagacacctgttcgcccctctgaaggagtacttcgcctgcgtgagcagcggcaacagcaacgccaacagccggggccccagcttctctagcggcctggtgccactgtccctgagagggagccacatgggccccatggagatctacaaaaccgtgagcgcctggaagcggcagcctgtgcgcgtgctgagcctgtttcggaatatcgataaagtcctgaaaagcctgggattcctggagagcggctctggctccggcggtggcaccctgaagtacgtggaggatgtgacaaacgtggtcagacgggatgtggagaagtggggccccttcgatctggtgtacggcagcacccaacccctgggcagctcttgtgaccggtgccctggctggtacatgtttcagttccaccggatcctgcagtacgccctgccgagacaggagtcccagcggccattcttttggattttcatggacaacttgctgctgaccgaggatgaccaggaaactaccactcggttcctgcagaccgaagccgtgaccctgcaggacgtgagaggccgggactaccagaacgccatgcgggtgtggtccaacatccctggactgaaaagcaagcacgcacctctgacccctaaagaagaggagtacctgcaggcccaggtgcggagcagaagcaagctggacgcccctaaggtggatctgctggtgaagaattgcctcctgcccctgagagagtacttcaagtatttcagccagaatagtctgcccctgggaggcagcggcggcggcgtgcaggagcccgtgaccttcaaggacgtggccgtggacttcacccaggaggagtggggccagctggacctggtgcagaggaccctgtacagggacgtgatgctggagacctacggccacctgctgagcgtgggcaaccagatcgccaagcccgaggtgatcagcctgctggagcagggcgaggagccctggagcgtggagcagacctgcccccagagggcctgccccgagtggatgaggaacggcggcccaagcagcggcgcccctcctcccagcggcggcagcccagccggctccccaacctctaccgaggagggcacctctgagtccgccacccccgagagcggccctggcacctccaccgagcccagcgagggcagcgcacccggcagccctgccggcagccccacctccacagaggagggaaccagcaccgagcccagcgaaggcagcgccccaggcaccagcaccgagcctagtgagcaggagattaaacggatcaacaagatcagaagaagacttgtgaaagacagcaacaccaagaaggccggcaagacaggccccatgaaaaccctgctggttagagtgatgacacccgatctgagagagcggctggaaaacctgagaaagaagcctgaaaatatcccccagcccatcagcaatacatctagagccaacctgaataagctgctgaccgattacaccgaaatgaagaaggcgatcctgcatgtgtactgggaagagttccagaaggaccctgtgggcctgatgagccgggtggcccagcctgccagcaagaagatcgatcagaacaagctgaaacctgagatggacgagaagggcaacctgaccaccgccggctttgcctgctctcagtgtggccagcccctgttcgtgtacaagctggagcaggtgtctgagaagggcaaggcttacaccaactacttcggacggtgcaatgtggccgagcacgaaaagctgatcctgctggcccagctgaagcccgagaaggatagcgacgaagccgtgacatatagcctgggaaagtttgggcagagggccctggatttctacagcattcatgtgaccaaggagtccacccaccccgtgaagcccctggcccagatcgccggaaacagatacgcctccggacctgtgggaaaggccctgagcgacgcatgtatgggcacaatcgcctccttcctgtctaagtaccaggacatcatcatcgaacaccagaaggtggtgaagggcaaccagaagagactggagagcctgcgggagctggccggcaaggaaaacctggaataccctagcgtgaccctgccacctcagcctcacaccaaggagggcgttgatgcctacaacgaagtgatcgcccgggtgcgaatgtgggtgaacctgaacctgtggcagaagctgaagctaagcagagatgatgccaagcctctgctgagactgaagggattcccttcctttcctctggtcgagagacaggccaacgaagtggactggtgggacatggtgtgtaacgtgaagaagctgatcaacgagaaaaaggaggatggcaaggtgttttggcagaatctggctggctacaagagacaggaagccctgagaccatacctgagcagcgaggaagatcggaagaagggaaagaaattcgctcggtaccagctgggcgacctgctgctgcacctggaaaagaagcacggcgaggactggggaaaggtgtacgacgaggcctgggagcggattgacaagaaagtggaaggcctgagcaagcacatcaagctggaagaggaacggagaagcgaggacgcccagagcaaggccgccctgaccgactggctgcgggctaaggccagcttcgtgatcgagggcctgaaggaggccgacaaggacgagttctgcagatgcgagctgaagctgcagaagtggtacggggacctgcggggaaagcccttcgccatcgaagccgagaacagcatcctggacatcagcggcttcagcaagcagtacaactgtgccttcatctggcagaaggacggcgtgaagaagctgaacctgtacctgatcatcaactacttcaagggcggcaagctgcggttcaagaagatcaaacctgaagccttcgaagccaacagattctacaccgtgatcaacaaaaagagcggcgagatcgtgcccatggaggtgaacttcaacttcgacgaccccaacctgatcatcctgcctctggcctttggcaagagacagggcagagaattcatctggaacgacctgctgtccctggaaaccggcagcctgaagctggccaacggaagagtgatcgagaagacactgtacaacagaagaacccggcaggatgagcctgccctgttcgtggccctgaccttcgagcggcgggaggtcctggactcctccaatatcaaaccaatgaacctgatcggcgtggcaagaggcgaaaacatccccgccgtgatcgccctgaccgaccccgagggctgcccactgagccggtttaaggatagcctgggaaacccaacccacatcctgagaatcggcgagagctataaggagaagcagcggaccatccaggccaagaaggaggtggagcagcggagagccggcggctacagccggaagtacgccagcaaagccaagaatctggcagacgatatggtgagaaacaccgctagagatctgctgtactacgccgtgacccaggatgccatgctgatcttcgccaacctgagccggggcttcggccggcagggcaagcggaccttcatggccgagagacagtacacacggatggaggactggctgaccgccaagctggcctacgagggcctgagcaagacctacctgtccaagacactggcccagtacacctccaagacatgcagcaactgtgggtttaccatcaccagcgccgactacgacagggtgctggagaagctgaagaagacagcaacaggctggatgaccacaattaacggcaaggagctgaaggtggagggccagattacctactacaacagatacaagagacagaacgtagtcaaggacctgtccgtcgagctggatagactgagcgaagaatctgtgaacaacgacatctcctcctggacaaagggcagaagcggagaagctctgagcctcctgaagaaaagattctcccatagacccgtgcaggagaagttcgtgtgcctgaactgcggcttcgagacacacgcagccgagcaagccgccctgaacatcgccagatcctggctgttcctgcggagccaggagtacaagaaataccagacaaacaagacaaccggcaacaccgataagagagccttcgtcgagacctggcagtccttttaccggaagaagcttaaggaggtgtggaaacctgccgtgcggtctggcggatctggcggaggctccaccagccccaagaaaaagagaaaagtctaagctgccttctgcggggcttgccttctggccatgcccttcttctctcccttgcacctgtacctcttggtctttgaataaagcctgagtaggaaggctagcaaaaaaaaaaaaaaaaaaaaaaaaaaaaaaaaaaaaaaaaaaaaaaaaaaaaaaaaaaaaaaaaaaaaaaaaaaaaaaaa

SEQ ID NO: 12216 - RNA, 5785 nt, synthetic construct
  source 1..5785: mol_type = other RNA
aggaaataagagagaaaagaagagtaagaagaaatataagagccaccatggcccctaagaagaagcgtaaagtgagccggatggaacgcctcgtctacgaggtgcggcagaagtgcagaaacatcgaggacatctgcatctcctgcggatctctgaacgtgaccctggagcacccactgttcatcggcggcatgtgccagaactgtaaaaactgttttctggagtgtgcctatcaatacgacgatgacggctaccagagctactgcaccatctgttgcggcggaagagaggtgctgatgtgtggaaataacaactgctgccggtgcttctgcgtggaatgcgtggacctgctggtgggccccggcgccgcccaggccgctattaaggaagatccttggaactgctacatgtgcggccacaagggcacatacggcctgctgagacggagagaggactggcctagcagactgcagatgttcttcgccaataaccacgaccaggagttcgacccccctaaggtgtaccctcccgtccccgccgagaagagaaagcccatccgggtcctgagcctgttcgatggcatcgccaccggtctgctggtgctgaaggacctgggcatccaggtggataggtacattgcctccgaggtgtgcgaggactccatcaccgtgggaatggtgcgtcatcagggcaagatcatgtacgtgggcgacgtgcggagcgtgacacagaagcatatccaggagtggggccctttcgacctggtgatcggcggcagcccttgcaatgacctgagcatcgtgaacccagcccggaagggcctgtacgagggaaccggcagactgttcttcgagttttacagactgctgcacgacgcccggcctaaggaaggcgacgaccggcccttcttttggctgttcgagaatgtggtggccatgggagtcagcgacaagcgggatattagccggttcctggagagcaaccccgtgatgatcgatgccaaggaagtgagcgccgcccaccgggccagatacttctggggcaatctgcctggcatgaacagacccctggccagcaccgtgaacgacaagctggagctgcaggagtgcctggagcacggccggatcgccaagttcagcaaggtgagaaccatcaccacccgaagcaacagcatcaaacaaggcaaggaccagcactttcctgtgttcatgaacgagaaggaggacatcctgtggtgtaccgagatggagagagtgttcgggttcccagtccactacacagatgtcagcaacatgtctagactggccagacagagactgctgggaagaagctggtccgtccctgtgatcagacacctgttcgcccctctgaaggagtacttcgcctgcgtgagcagcggcaacagcaacgccaacagccggggccccagcttctctagcggcctggtgccactgtccctgagagggagccacatgggccccatggagatctacaaaaccgtgagcgcctggaagcggcagcctgtgcgcgtgctgagcctgtttcggaatatcgataaagtcctgaaaagcctgggattcctggagagcggctctggctccggcggtggcaccctgaagtacgtggaggatgtgacaaacgtggtcagacgggatgtggagaagtggggccccttcgatctggtgtacggcagcacccaacccctgggcagctcttgtgaccggtgccctggctggtacatgtttcagttccaccggatcctgcagtacgccctgccgagacaggagtcccagcggccattcttttggattttcatggacaacttgctgctgaccgaggatgaccaggaaactaccactcggttcctgcagaccgaagccgtgaccctgcaggacgtgagaggccgggactaccagaacgccatgcgggtgtggtccaacatccctggactgaaaagcaagcacgcacctctgacccctaaagaagaggagtacctgcaggcccaggtgcggagcagaagcaagctggacgcccctaaggtggatctgctggtgaagaattgcctcctgcccctgagagagtacttcaagtatttcagccagaatagtctgcccctgggaggcagcggcggcggcggcgaggagcccgtgaacttcgaggaggtggccgtgtacttcagcagggaggagtgggccctgctggaccccgcccagagggccctgtacagggacgtgatgctggagacctacgagtgcgtggccagcctggcccccctgcccgcccccaagcccatggtgatcagcctgctggaggagggcgaggagccctggatccccgacgtgggcagccccgaggccgtggccggcgacgtgagccccggcggcccaagcagcggcgcccctcctcccagcggcggcagcccagccggctccccaacctctaccgaggagggcacctctgagtccgccacccccgagagcggccctggcacctccaccgagcccagcgagggcagcgcacccggcagccctgccggcagccccacctccacagaggagggaaccagcaccgagcccagcgaaggcagcgccccaggcaccagcaccgagcctagtgagcaggagattaaacggatcaacaagatcagaagaagacttgtgaaagacagcaacaccaagaaggccggcaagacaggccccatgaaaaccctgctggttagagtgatgacacccgatctgagagagcggctggaaaacctgagaaagaagcctgaaaatatcccccagcccatcagcaatacatctagagccaacctgaataagctgctgaccgattacaccgaaatgaagaaggcgatcctgcatgtgtactgggaagagttccagaaggaccctgtgggcctgatgagccgggtggcccagcctgccagcaagaagatcgatcagaacaagctgaaacctgagatggacgagaagggcaacctgaccaccgccggctttgcctgctctcagtgtggccagcccctgttcgtgtacaagctggagcaggtgtctgagaagggcaaggcttacaccaactacttcggacggtgcaatgtggccgagcacgaaaagctgatcctgctggcccagctgaagcccgagaaggatagcgacgaagccgtgacatatagcctgggaaagtttgggcagagggccctggatttctacagcattcatgtgaccaaggagtccacccaccccgtgaagcccctggcccagatcgccggaaacagatacgcctccggacctgtgggaaaggccctgagcgacgcatgtatgggcacaatcgcctccttcctgtctaagtaccaggacatcatcatcgaacaccagaaggtggtgaagggcaaccagaagagactggagagcctgcgggagctggccggcaaggaaaacctggaataccctagcgtgaccctgccacctcagcctcacaccaaggagggcgttgatgcctacaacgaagtgatcgcccgggtgcgaatgtgggtgaacctgaacctgtggcagaagctgaagctaagcagagatgatgccaagcctctgctgagactgaagggattcccttcctttcctctggtcgagagacaggccaacgaagtggactggtgggacatggtgtgtaacgtgaagaagctgatcaacgagaaaaaggaggatggcaaggtgttttggcagaatctggctggctacaagagacaggaagccctgagaccatacctgagcagcgaggaagatcggaagaagggaaagaaattcgctcggtaccagctgggcgacctgctgctgcacctggaaaagaagcacggcgaggactggggaaaggtgtacgacgaggcctgggagcggattgacaagaaagtggaaggcctgagcaagcacatcaagctggaagaggaacggagaagcgaggacgcccagagcaaggccgccctgaccgactggctgcgggctaaggccagcttcgtgatcgagggcctgaaggaggccgacaaggacgagttctgcagatgcgagctgaagctgcagaagtggtacggggacctgcggggaaagcccttcgccatcgaagccgagaacagcatcctggacatcagcggcttcagcaagcagtacaactgtgccttcatctggcagaaggacggcgtgaagaagctgaacctgtacctgatcatcaactacttcaagggcggcaagctgcggttcaagaagatcaaacctgaagccttcgaagccaacagattctacaccgtgatcaacaaaaagagcggcgagatcgtgcccatggaggtgaacttcaacttcgacgaccccaacctgatcatcctgcctctggcctttggcaagagacagggcagagaattcatctggaacgacctgctgtccctggaaaccggcagcctgaagctggccaacggaagagtgatcgagaagacactgtacaacagaagaacccggcaggatgagcctgccctgttcgtggccctgaccttcgagcggcgggaggtcctggactcctccaatatcaaaccaatgaacctgatcggcgtggcaagaggcgaaaacatccccgccgtgatcgccctgaccgaccccgagggctgcccactgagccggtttaaggatagcctgggaaacccaacccacatcctgagaatcggcgagagctataaggagaagcagcggaccatccaggccaagaaggaggtggagcagcggagagccggcggctacagccggaagtacgccagcaaagccaagaatctggcagacgatatggtgagaaacaccgctagagatctgctgtactacgccgtgacccaggatgccatgctgatcttcgccaacctgagccggggcttcggccggcagggcaagcggaccttcatggccgagagacagtacacacggatggaggactggctgaccgccaagctggcctacgagggcctgagcaagacctacctgtccaagacactggcccagtacacctccaagacatgcagcaactgtgggtttaccatcaccagcgccgactacgacagggtgctggagaagctgaagaagacagcaacaggctggatgaccacaattaacggcaaggagctgaaggtggagggccagattacctactacaacagatacaagagacagaacgtagtcaaggacctgtccgtcgagctggatagactgagcgaagaatctgtgaacaacgacatctcctcctggacaaagggcagaagcggagaagctctgagcctcctgaagaaaagattctcccatagacccgtgcaggagaagttcgtgtgcctgaactgcggcttcgagacacacgcagccgagcaagccgccctgaacatcgccagatcctggctgttcctgcggagccaggagtacaagaaataccagacaaacaagacaaccggcaacaccgataagagagccttcgtcgagacctggcagtccttttaccggaagaagcttaaggaggtgtggaaacctgccgtgcggtctggcggatctggcggaggctccaccagccccaagaaaaagagaaaagtctaagctgccttctgcggggcttgccttctggccatgcccttcttctctcccttgcacctgtacctcttggtctttgaataaagcctgagtaggaaggctagcaaaaaaaaaaaaaaaaaaaaaaaaaaaaaaaaaaaaaaaaaaaaaaaaaaaaaaaaaaaaaaaaaaaaaaaaaaaaaaaa

SEQ ID NO: 12217 - RNA, 5785 nt, synthetic construct
  source 1..5785: mol_type = other RNA
aggaaataagagagaaaagaagagtaagaagaaatataagagccaccatggcccctaagaagaagcgtaaagtgagccggatggaacgcctcgtctacgaggtgcggcagaagtgcagaaacatcgaggacatctgcatctcctgcggatctctgaacgtgaccctggagcacccactgttcatcggcggcatgtgccagaactgtaaaaactgttttctggagtgtgcctatcaatacgacgatgacggctaccagagctactgcaccatctgttgcggcggaagagaggtgctgatgtgtggaaataacaactgctgccggtgcttctgcgtggaatgcgtggacctgctggtgggccccggcgccgcccaggccgctattaaggaagatccttggaactgctacatgtgcggccacaagggcacatacggcctgctgagacggagagaggactggcctagcagactgcagatgttcttcgccaataaccacgaccaggagttcgacccccctaaggtgtaccctcccgtccccgccgagaagagaaagcccatccgggtcctgagcctgttcgatggcatcgccaccggtctgctggtgctgaaggacctgggcatccaggtggataggtacattgcctccgaggtgtgcgaggactccatcaccgtgggaatggtgcgtcatcagggcaagatcatgtacgtgggcgacgtgcggagcgtgacacagaagcatatccaggagtggggccctttcgacctggtgatcggcggcagcccttgcaatgacctgagcatcgtgaacccagcccggaagggcctgtacgagggaaccggcagactgttcttcgagttttacagactgctgcacgacgcccggcctaaggaaggcgacgaccggcccttcttttggctgttcgagaatgtggtggccatgggagtcagcgacaagcgggatattagccggttcctggagagcaaccccgtgatgatcgatgccaaggaagtgagcgccgcccaccgggccagatacttctggggcaatctgcctggcatgaacagacccctggccagcaccgtgaacgacaagctggagctgcaggagtgcctggagcacggccggatcgccaagttcagcaaggtgagaaccatcaccacccgaagcaacagcatcaaacaaggcaaggaccagcactttcctgtgttcatgaacgagaaggaggacatcctgtggtgtaccgagatggagagagtgttcgggttcccagtccactacacagatgtcagcaacatgtctagactggccagacagagactgctgggaagaagctggtccgtccctgtgatcagacacctgttcgcccctctgaaggagtacttcgcctgcgtgagcagcggcaacagcaacgccaacagccggggccccagcttctctagcggcctggtgccactgtccctgagagggagccacatgggccccatggagatctacaaaaccgtgagcgcctggaagcggcagcctgtgcgcgtgctgagcctgtttcggaatatcgataaagtcctgaaaagcctgggattcctggagagcggctctggctccggcggtggcaccctgaagtacgtggaggatgtgacaaacgtggtcagacgggatgtggagaagtggggccccttcgatctggtgtacggcagcacccaacccctgggcagctcttgtgaccggtgccctggctggtacatgtttcagttccaccggatcctgcagtacgccctgccgagacaggagtcccagcggccattcttttggattttcatggacaacttgctgctgaccgaggatgaccaggaaactaccactcggttcctgcagaccgaagccgtgaccctgcaggacgtgagaggccgggactaccagaacgccatgcgggtgtggtccaacatccctggactgaaaagcaagcacgcacctctgacccctaaagaagaggagtacctgcaggcccaggtgcggagcagaagcaagctggacgcccctaaggtggatctgctggtgaagaattgcctcctgcccctgagagagtacttcaagtatttcagccagaatagtctgcccctgggaggcagcggcggcggccagccccagggcaccatgaccttcaaggacgtggaggtgaccttcagccaggacgagtggggcctgctggacgccagccagaggaacctgtacagggacgtgatgctggagaactacggcaacatggccagcgtggtgggccccttcaccaagcccgccctgatcagctggctggaggccagggagccctggggcctgaacgtgcagggcgtgcagttcaagggcaaccccggcgccgcccccggcggcccaagcagcggcgcccctcctcccagcggcggcagcccagccggctccccaacctctaccgaggagggcacctctgagtccgccacccccgagagcggccctggcacctccaccgagcccagcgagggcagcgcacccggcagccctgccggcagccccacctccacagaggagggaaccagcaccgagcccagcgaaggcagcgccccaggcaccagcaccgagcctagtgagcaggagattaaacggatcaacaagatcagaagaagacttgtgaaagacagcaacaccaagaaggccggcaagacaggccccatgaaaaccctgctggttagagtgatgacacccgatctgagagagcggctggaaaacctgagaaagaagcctgaaaatatcccccagcccatcagcaatacatctagagccaacctgaataagctgctgaccgattacaccgaaatgaagaaggcgatcctgcatgtgtactgggaagagttccagaaggaccctgtgggcctgatgagccgggtggcccagcctgccagcaagaagatcgatcagaacaagctgaaacctgagatggacgagaagggcaacctgaccaccgccggctttgcctgctctcagtgtggccagcccctgttcgtgtacaagctggagcaggtgtctgagaagggcaaggcttacaccaactacttcggacggtgcaatgtggccgagcacgaaaagctgatcctgctggcccagctgaagcccgagaaggatagcgacgaagccgtgacatatagcctgggaaagtttgggcagagggccctggatttctacagcattcatgtgaccaaggagtccacccaccccgtgaagcccctggcccagatcgccggaaacagatacgcctccggacctgtgggaaaggccctgagcgacgcatgtatgggcacaatcgcctccttcctgtctaagtaccaggacatcatcatcgaacaccagaaggtggtgaagggcaaccagaagagactggagagcctgcgggagctggccggcaaggaaaacctggaataccctagcgtgaccctgccacctcagcctcacaccaaggagggcgttgatgcctacaacgaagtgatcgcccgggtgcgaatgtgggtgaacctgaacctgtggcagaagctgaagctaagcagagatgatgccaagcctctgctgagactgaagggattcccttcctttcctctggtcgagagacaggccaacgaagtggactggtgggacatggtgtgtaacgtgaagaagctgatcaacgagaaaaaggaggatggcaaggtgttttggcagaatctggctggctacaagagacaggaagccctgagaccatacctgagcagcgaggaagatcggaagaagggaaagaaattcgctcggtaccagctgggcgacctgctgctgcacctggaaaagaagcacggcgaggactggggaaaggtgtacgacgaggcctgggagcggattgacaagaaagtggaaggcctgagcaagcacatcaagctggaagaggaacggagaagcgaggacgcccagagcaaggccgccctgaccgactggctgcgggctaaggccagcttcgtgatcgagggcctgaaggaggccgacaaggacgagttctgcagatgcgagctgaagctgcagaagtggtacggggacctgcggggaaagcccttcgccatcgaagccgagaacagcatcctggacatcagcggcttcagcaagcagtacaactgtgccttcatctggcagaaggacggcgtgaagaagctgaacctgtacctgatcatcaactacttcaagggcggcaagctgcggttcaagaagatcaaacctgaagccttcgaagccaacagattctacaccgtgatcaacaaaaagagcggcgagatcgtgcccatggaggtgaacttcaacttcgacgaccccaacctgatcatcctgcctctggcctttggcaagagacagggcagagaattcatctggaacgacctgctgtccctggaaaccggcagcctgaagctggccaacggaagagtgatcgagaagacactgtacaacagaagaacccggcaggatgagcctgccctgttcgtggccctgaccttcgagcggcgggaggtcctggactcctccaatatcaaaccaatgaacctgatcggcgtggcaagaggcgaaaacatccccgccgtgatcgccctgaccgaccccgagggctgcccactgagccggtttaaggatagcctgggaaacccaacccacatcctgagaatcggcgagagctataaggagaagcagcggaccatccaggccaagaaggaggtggagcagcggagagccggcggctacagccggaagtacgccagcaaagccaagaatctggcagacgatatggtgagaaacaccgctagagatctgctgtactacgccgtgacccaggatgccatgctgatcttcgccaacctgagccggggcttcggccggcagggcaagcggaccttcatggccgagagacagtacacacggatggaggactggctgaccgccaagctggcctacgagggcctgagcaagacctacctgtccaagacactggcccagtacacctccaagacatgcagcaactgtgggtttaccatcaccagcgccgactacgacagggtgctggagaagctgaagaagacagcaacaggctggatgaccacaattaacggcaaggagctgaaggtggagggccagattacctactacaacagatacaagagacagaacgtagtcaaggacctgtccgtcgagctggatagactgagcgaagaatctgtgaacaacgacatctcctcctggacaaagggcagaagcggagaagctctgagcctcctgaagaaaagattctcccatagacccgtgcaggagaagttcgtgtgcctgaactgcggcttcgagacacacgcagccgagcaagccgccctgaacatcgccagatcctggctgttcctgcggagccaggagtacaagaaataccagacaaacaagacaaccggcaacaccgataagagagccttcgtcgagacctggcagtccttttaccggaagaagcttaaggaggtgtggaaacctgccgtgcggtctggcggatctggcggaggctccaccagccccaagaaaaagagaaaagtctaagctgccttctgcggggcttgccttctggccatgcccttcttctctcccttgcacctgtacctcttggtctttgaataaagcctgagtaggaaggctagcaaaaaaaaaaaaaaaaaaaaaaaaaaaaaaaaaaaaaaaaaaaaaaaaaaaaaaaaaaaaaaaaaaaaaaaaaaaaaaaa

SEQ ID NO: 12218 - RNA, 5785 nt, synthetic construct
  source 1..5785: mol_type = other RNA
aggaaataagagagaaaagaagagtaagaagaaatataagagccaccatggcccctaagaagaagcgtaaagtgagccggatggaacgcctcgtctacgaggtgcggcagaagtgcagaaacatcgaggacatctgcatctcctgcggatctctgaacgtgaccctggagcacccactgttcatcggcggcatgtgccagaactgtaaaaactgttttctggagtgtgcctatcaatacgacgatgacggctaccagagctactgcaccatctgttgcggcggaagagaggtgctgatgtgtggaaataacaactgctgccggtgcttctgcgtggaatgcgtggacctgctggtgggccccggcgccgcccaggccgctattaaggaagatccttggaactgctacatgtgcggccacaagggcacatacggcctgctgagacggagagaggactggcctagcagactgcagatgttcttcgccaataaccacgaccaggagttcgacccccctaaggtgtaccctcccgtccccgccgagaagagaaagcccatccgggtcctgagcctgttcgatggcatcgccaccggtctgctggtgctgaaggacctgggcatccaggtggataggtacattgcctccgaggtgtgcgaggactccatcaccgtgggaatggtgcgtcatcagggcaagatcatgtacgtgggcgacgtgcggagcgtgacacagaagcatatccaggagtggggccctttcgacctggtgatcggcggcagcccttgcaatgacctgagcatcgtgaacccagcccggaagggcctgtacgagggaaccggcagactgttcttcgagttttacagactgctgcacgacgcccggcctaaggaaggcgacgaccggcccttcttttggctgttcgagaatgtggtggccatgggagtcagcgacaagcgggatattagccggttcctggagagcaaccccgtgatgatcgatgccaaggaagtgagcgccgcccaccgggccagatacttctggggcaatctgcctggcatgaacagacccctggccagcaccgtgaacgacaagctggagctgcaggagtgcctggagcacggccggatcgccaagttcagcaaggtgagaaccatcaccacccgaagcaacagcatcaaacaaggcaaggaccagcactttcctgtgttcatgaacgagaaggaggacatcctgtggtgtaccgagatggagagagtgttcgggttcccagtccactacacagatgtcagcaacatgtctagactggccagacagagactgctgggaagaagctggtccgtccctgtgatcagacacctgttcgcccctctgaaggagtacttcgcctgcgtgagcagcggcaacagcaacgccaacagccggggccccagcttctctagcggcctggtgccactgtccctgagagggagccacatgggccccatggagatctacaaaaccgtgagcgcctggaagcggcagcctgtgcgcgtgctgagcctgtttcggaatatcgataaagtcctgaaaagcctgggattcctggagagcggctctggctccggcggtggcaccctgaagtacgtggaggatgtgacaaacgtggtcagacgggatgtggagaagtggggccccttcgatctggtgtacggcagcacccaacccctgggcagctcttgtgaccggtgccctggctggtacatgtttcagttccaccggatcctgcagtacgccctgccgagacaggagtcccagcggccattcttttggattttcatggacaacttgctgctgaccgaggatgaccaggaaactaccactcggttcctgcagaccgaagccgtgaccctgcaggacgtgagaggccgggactaccagaacgccatgcgggtgtggtccaacatccctggactgaaaagcaagcacgcacctctgacccctaaagaagaggagtacctgcaggcccaggtgcggagcagaagcaagctggacgcccctaaggtggatctgctggtgaagaattgcctcctgcccctgagagagtacttcaagtatttcagccagaatagtctgcccctgggaggcagcggcggcggcaggcccggcgccgtgagcttcgccgacgtggccgtgtacttcagccccgaggagtggggctgcctgaggcccgcccagagggccctgtacagggacgtgatgagggagacctacggccacctgggcgccctgggcttcgccggccccaagcccgccctgatcagctggctggagaggaagaaggaggtgtggagccccgaggccgaggaccccgaggagggcgccaggcaccccggcagcggcggcggcccaagcagcggcgcccctcctcccagcggcggcagcccagccggctccccaacctctaccgaggagggcacctctgagtccgccacccccgagagcggccctggcacctccaccgagcccagcgagggcagcgcacccggcagccctgccggcagccccacctccacagaggagggaaccagcaccgagcccagcgaaggcagcgccccaggcaccagcaccgagcctagtgagcaggagattaaacggatcaacaagatcagaagaagacttgtgaaagacagcaacaccaagaaggccggcaagacaggccccatgaaaaccctgctggttagagtgatgacacccgatctgagagagcggctggaaaacctgagaaagaagcctgaaaatatcccccagcccatcagcaatacatctagagccaacctgaataagctgctgaccgattacaccgaaatgaagaaggcgatcctgcatgtgtactgggaagagttccagaaggaccctgtgggcctgatgagccgggtggcccagcctgccagcaagaagatcgatcagaacaagctgaaacctgagatggacgagaagggcaacctgaccaccgccggctttgcctgctctcagtgtggccagcccctgttcgtgtacaagctggagcaggtgtctgagaagggcaaggcttacaccaactacttcggacggtgcaatgtggccgagcacgaaaagctgatcctgctggcccagctgaagcccgagaaggatagcgacgaagccgtgacatatagcctgggaaagtttgggcagagggccctggatttctacagcattcatgtgaccaaggagtccacccaccccgtgaagcccctggcccagatcgccggaaacagatacgcctccggacctgtgggaaaggccctgagcgacgcatgtatgggcacaatcgcctccttcctgtctaagtaccaggacatcatcatcgaacaccagaaggtggtgaagggcaaccagaagagactggagagcctgcgggagctggccggcaaggaaaacctggaataccctagcgtgaccctgccacctcagcctcacaccaaggagggcgttgatgcctacaacgaagtgatcgcccgggtgcgaatgtgggtgaacctgaacctgtggcagaagctgaagctaagcagagatgatgccaagcctctgctgagactgaagggattcccttcctttcctctggtcgagagacaggccaacgaagtggactggtgggacatggtgtgtaacgtgaagaagctgatcaacgagaaaaaggaggatggcaaggtgttttggcagaatctggctggctacaagagacaggaagccctgagaccatacctgagcagcgaggaagatcggaagaagggaaagaaattcgctcggtaccagctgggcgacctgctgctgcacctggaaaagaagcacggcgaggactggggaaaggtgtacgacgaggcctgggagcggattgacaagaaagtggaaggcctgagcaagcacatcaagctggaagaggaacggagaagcgaggacgcccagagcaaggccgccctgaccgactggctgcgggctaaggccagcttcgtgatcgagggcctgaaggaggccgacaaggacgagttctgcagatgcgagctgaagctgcagaagtggtacggggacctgcggggaaagcccttcgccatcgaagccgagaacagcatcctggacatcagcggcttcagcaagcagtacaactgtgccttcatctggcagaaggacggcgtgaagaagctgaacctgtacctgatcatcaactacttcaagggcggcaagctgcggttcaagaagatcaaacctgaagccttcgaagccaacagattctacaccgtgatcaacaaaaagagcggcgagatcgtgcccatggaggtgaacttcaacttcgacgaccccaacctgatcatcctgcctctggcctttggcaagagacagggcagagaattcatctggaacgacctgctgtccctggaaaccggcagcctgaagctggccaacggaagagtgatcgagaagacactgtacaacagaagaacccggcaggatgagcctgccctgttcgtggccctgaccttcgagcggcgggaggtcctggactcctccaatatcaaaccaatgaacctgatcggcgtggcaagaggcgaaaacatccccgccgtgatcgccctgaccgaccccgagggctgcccactgagccggtttaaggatagcctgggaaacccaacccacatcctgagaatcggcgagagctataaggagaagcagcggaccatccaggccaagaaggaggtggagcagcggagagccggcggctacagccggaagtacgccagcaaagccaagaatctggcagacgatatggtgagaaacaccgctagagatctgctgtactacgccgtgacccaggatgccatgctgatcttcgccaacctgagccggggcttcggccggcagggcaagcggaccttcatggccgagagacagtacacacggatggaggactggctgaccgccaagctggcctacgagggcctgagcaagacctacctgtccaagacactggcccagtacacctccaagacatgcagcaactgtgggtttaccatcaccagcgccgactacgacagggtgctggagaagctgaagaagacagcaacaggctggatgaccacaattaacggcaaggagctgaaggtggagggccagattacctactacaacagatacaagagacagaacgtagtcaaggacctgtccgtcgagctggatagactgagcgaagaatctgtgaacaacgacatctcctcctggacaaagggcagaagcggagaagctctgagcctcctgaagaaaagattctcccatagacccgtgcaggagaagttcgtgtgcctgaactgcggcttcgagacacacgcagccgagcaagccgccctgaacatcgccagatcctggctgttcctgcggagccaggagtacaagaaataccagacaaacaagacaaccggcaacaccgataagagagccttcgtcgagacctggcagtccttttaccggaagaagcttaaggaggtgtggaaacctgccgtgcggtctggcggatctggcggaggctccaccagccccaagaaaaagagaaaagtctaagctgccttctgcggggcttgccttctggccatgcccttcttctctcccttgcacctgtacctcttggtctttgaataaagcctgagtaggaaggctagcaaaaaaaaaaaaaaaaaaaaaaaaaaaaaaaaaaaaaaaaaaaaaaaaaaaaaaaaaaaaaaaaaaaaaaaaaaaaaaaa

SEQ ID NO: 12219 - RNA, 5785 nt, synthetic construct
  source 1..5785: mol_type = other RNA
aggaaataagagagaaaagaagagtaagaagaaatataagagccaccatggcccctaagaagaagcgtaaagtgagccggatggaacgcctcgtctacgaggtgcggcagaagtgcagaaacatcgaggacatctgcatctcctgcggatctctgaacgtgaccctggagcacccactgttcatcggcggcatgtgccagaactgtaaaaactgttttctggagtgtgcctatcaatacgacgatgacggctaccagagctactgcaccatctgttgcggcggaagagaggtgctgatgtgtggaaataacaactgctgccggtgcttctgcgtggaatgcgtggacctgctggtgggccccggcgccgcccaggccgctattaaggaagatccttggaactgctacatgtgcggccacaagggcacatacggcctgctgagacggagagaggactggcctagcagactgcagatgttcttcgccaataaccacgaccaggagttcgacccccctaaggtgtaccctcccgtccccgccgagaagagaaagcccatccgggtcctgagcctgttcgatggcatcgccaccggtctgctggtgctgaaggacctgggcatccaggtggataggtacattgcctccgaggtgtgcgaggactccatcaccgtgggaatggtgcgtcatcagggcaagatcatgtacgtgggcgacgtgcggagcgtgacacagaagcatatccaggagtggggccctttcgacctggtgatcggcggcagcccttgcaatgacctgagcatcgtgaacccagcccggaagggcctgtacgagggaaccggcagactgttcttcgagttttacagactgctgcacgacgcccggcctaaggaaggcgacgaccggcccttcttttggctgttcgagaatgtggtggccatgggagtcagcgacaagcgggatattagccggttcctggagagcaaccccgtgatgatcgatgccaaggaagtgagcgccgcccaccgggccagatacttctggggcaatctgcctggcatgaacagacccctggccagcaccgtgaacgacaagctggagctgcaggagtgcctggagcacggccggatcgccaagttcagcaaggtgagaaccatcaccacccgaagcaacagcatcaaacaaggcaaggaccagcactttcctgtgttcatgaacgagaaggaggacatcctgtggtgtaccgagatggagagagtgttcgggttcccagtccactacacagatgtcagcaacatgtctagactggccagacagagactgctgggaagaagctggtccgtccctgtgatcagacacctgttcgcccctctgaaggagtacttcgcctgcgtgagcagcggcaacagcaacgccaacagccggggccccagcttctctagcggcctggtgccactgtccctgagagggagccacatgggccccatggagatctacaaaaccgtgagcgcctggaagcggcagcctgtgcgcgtgctgagcctgtttcggaatatcgataaagtcctgaaaagcctgggattcctggagagcggctctggctccggcggtggcaccctgaagtacgtggaggatgtgacaaacgtggtcagacgggatgtggagaagtggggccccttcgatctggtgtacggcagcacccaacccctgggcagctcttgtgaccggtgccctggctggtacatgtttcagttccaccggatcctgcagtacgccctgccgagacaggagtcccagcggccattcttttggattttcatggacaacttgctgctgaccgaggatgaccaggaaactaccactcggttcctgcagaccgaagccgtgaccctgcaggacgtgagaggccgggactaccagaacgccatgcgggtgtggtccaacatccctggactgaaaagcaagcacgcacctctgacccctaaagaagaggagtacctgcaggcccaggtgcggagcagaagcaagctggacgcccctaaggtggatctgctggtgaagaattgcctcctgcccctgagagagtacttcaagtatttcagccagaatagtctgcccctgggaggcagcggcggcggctggcccgagagcgtgaccttcgaggacgtggccgtgtacttcacccagaaccagtgggccagcctggaccccgcccagagggccctgtacagggaggtgatgctggagaactacgccaacgtggccagcctggtggccttccccttccccaagcccgccctgatcagccacctggagaggggcgaggccccctggggccccgacccctgggacaccgagatccccaggggcatcagccagggcggcggcccaagcagcggcgcccctcctcccagcggcggcagcccagccggctccccaacctctaccgaggagggcacctctgagtccgccacccccgagagcggccctggcacctccaccgagcccagcgagggcagcgcacccggcagccctgccggcagccccacctccacagaggagggaaccagcaccgagcccagcgaaggcagcgccccaggcaccagcaccgagcctagtgagcaggagattaaacggatcaacaagatcagaagaagacttgtgaaagacagcaacaccaagaaggccggcaagacaggccccatgaaaaccctgctggttagagtgatgacacccgatctgagagagcggctggaaaacctgagaaagaagcctgaaaatatcccccagcccatcagcaatacatctagagccaacctgaataagctgctgaccgattacaccgaaatgaagaaggcgatcctgcatgtgtactgggaagagttccagaaggaccctgtgggcctgatgagccgggtggcccagcctgccagcaagaagatcgatcagaacaagctgaaacctgagatggacgagaagggcaacctgaccaccgccggctttgcctgctctcagtgtggccagcccctgttcgtgtacaagctggagcaggtgtctgagaagggcaaggcttacaccaactacttcggacggtgcaatgtggccgagcacgaaaagctgatcctgctggcccagctgaagcccgagaaggatagcgacgaagccgtgacatatagcctgggaaagtttgggcagagggccctggatttctacagcattcatgtgaccaaggagtccacccaccccgtgaagcccctggcccagatcgccggaaacagatacgcctccggacctgtgggaaaggccctgagcgacgcatgtatgggcacaatcgcctccttcctgtctaagtaccaggacatcatcatcgaacaccagaaggtggtgaagggcaaccagaagagactggagagcctgcgggagctggccggcaaggaaaacctggaataccctagcgtgaccctgccacctcagcctcacaccaaggagggcgttgatgcctacaacgaagtgatcgcccgggtgcgaatgtgggtgaacctgaacctgtggcagaagctgaagctaagcagagatgatgccaagcctctgctgagactgaagggattcccttcctttcctctggtcgagagacaggccaacgaagtggactggtgggacatggtgtgtaacgtgaagaagctgatcaacgagaaaaaggaggatggcaaggtgttttggcagaatctggctggctacaagagacaggaagccctgagaccatacctgagcagcgaggaagatcggaagaagggaaagaaattcgctcggtaccagctgggcgacctgctgctgcacctggaaaagaagcacggcgaggactggggaaaggtgtacgacgaggcctgggagcggattgacaagaaagtggaaggcctgagcaagcacatcaagctggaagaggaacggagaagcgaggacgcccagagcaaggccgccctgaccgactggctgcgggctaaggccagcttcgtgatcgagggcctgaaggaggccgacaaggacgagttctgcagatgcgagctgaagctgcagaagtggtacggggacctgcggggaaagcccttcgccatcgaagccgagaacagcatcctggacatcagcggcttcagcaagcagtacaactgtgccttcatctggcagaaggacggcgtgaagaagctgaacctgtacctgatcatcaactacttcaagggcggcaagctgcggttcaagaagatcaaacctgaagccttcgaagccaacagattctacaccgtgatcaacaaaaagagcggcgagatcgtgcccatggaggtgaacttcaacttcgacgaccccaacctgatcatcctgcctctggcctttggcaagagacagggcagagaattcatctggaacgacctgctgtccctggaaaccggcagcctgaagctggccaacggaagagtgatcgagaagacactgtacaacagaagaacccggcaggatgagcctgccctgttcgtggccctgaccttcgagcggcgggaggtcctggactcctccaatatcaaaccaatgaacctgatcggcgtggcaagaggcgaaaacatccccgccgtgatcgccctgaccgaccccgagggctgcccactgagccggtttaaggatagcctgggaaacccaacccacatcctgagaatcggcgagagctataaggagaagcagcggaccatccaggccaagaaggaggtggagcagcggagagccggcggctacagccggaagtacgccagcaaagccaagaatctggcagacgatatggtgagaaacaccgctagagatctgctgtactacgccgtgacccaggatgccatgctgatcttcgccaacctgagccggggcttcggccggcagggcaagcggaccttcatggccgagagacagtacacacggatggaggactggctgaccgccaagctggcctacgagggcctgagcaagacctacctgtccaagacactggcccagtacacctccaagacatgcagcaactgtgggtttaccatcaccagcgccgactacgacagggtgctggagaagctgaagaagacagcaacaggctggatgaccacaattaacggcaaggagctgaaggtggagggccagattacctactacaacagatacaagagacagaacgtagtcaaggacctgtccgtcgagctggatagactgagcgaagaatctgtgaacaacgacatctcctcctggacaaagggcagaagcggagaagctctgagcctcctgaagaaaagattctcccatagacccgtgcaggagaagttcgtgtgcctgaactgcggcttcgagacacacgcagccgagcaagccgccctgaacatcgccagatcctggctgttcctgcggagccaggagtacaagaaataccagacaaacaagacaaccggcaacaccgataagagagccttcgtcgagacctggcagtccttttaccggaagaagcttaaggaggtgtggaaacctgccgtgcggtctggcggatctggcggaggctccaccagccccaagaaaaagagaaaagtctaagctgccttctgcggggcttgccttctggccatgcccttcttctctcccttgcacctgtacctcttggtctttgaataaagcctgagtaggaaggctagcaaaaaaaaaaaaaaaaaaaaaaaaaaaaaaaaaaaaaaaaaaaaaaaaaaaaaaaaaaaaaaaaaaaaaaaaaaaaaaaa

SEQ ID NO: 12220 - RNA, 5785 nt, synthetic construct
  source 1..5785: mol_type = other RNA
aggaaataagagagaaaagaagagtaagaagaaatataagagccaccatggcccctaagaagaagcgtaaagtgagccggatggaacgcctcgtctacgaggtgcggcagaagtgcagaaacatcgaggacatctgcatctcctgcggatctctgaacgtgaccctggagcacccactgttcatcggcggcatgtgccagaactgtaaaaactgttttctggagtgtgcctatcaatacgacgatgacggctaccagagctactgcaccatctgttgcggcggaagagaggtgctgatgtgtggaaataacaactgctgccggtgcttctgcgtggaatgcgtggacctgctggtgggccccggcgccgcccaggccgctattaaggaagatccttggaactgctacatgtgcggccacaagggcacatacggcctgctgagacggagagaggactggcctagcagactgcagatgttcttcgccaataaccacgaccaggagttcgacccccctaaggtgtaccctcccgtccccgccgagaagagaaagcccatccgggtcctgagcctgttcgatggcatcgccaccggtctgctggtgctgaaggacctgggcatccaggtggataggtacattgcctccgaggtgtgcgaggactccatcaccgtgggaatggtgcgtcatcagggcaagatcatgtacgtgggcgacgtgcggagcgtgacacagaagcatatccaggagtggggccctttcgacctggtgatcggcggcagcccttgcaatgacctgagcatcgtgaacccagcccggaagggcctgtacgagggaaccggcagactgttcttcgagttttacagactgctgcacgacgcccggcctaaggaaggcgacgaccggcccttcttttggctgttcgagaatgtggtggccatgggagtcagcgacaagcgggatattagccggttcctggagagcaaccccgtgatgatcgatgccaaggaagtgagcgccgcccaccgggccagatacttctggggcaatctgcctggcatgaacagacccctggccagcaccgtgaacgacaagctggagctgcaggagtgcctggagcacggccggatcgccaagttcagcaaggtgagaaccatcaccacccgaagcaacagcatcaaacaaggcaaggaccagcactttcctgtgttcatgaacgagaaggaggacatcctgtggtgtaccgagatggagagagtgttcgggttcccagtccactacacagatgtcagcaacatgtctagactggccagacagagactgctgggaagaagctggtccgtccctgtgatcagacacctgttcgcccctctgaaggagtacttcgcctgcgtgagcagcggcaacagcaacgccaacagccggggccccagcttctctagcggcctggtgccactgtccctgagagggagccacatgggccccatggagatctacaaaaccgtgagcgcctggaagcggcagcctgtgcgcgtgctgagcctgtttcggaatatcgataaagtcctgaaaagcctgggattcctggagagcggctctggctccggcggtggcaccctgaagtacgtggaggatgtgacaaacgtggtcagacgggatgtggagaagtggggccccttcgatctggtgtacggcagcacccaacccctgggcagctcttgtgaccggtgccctggctggtacatgtttcagttccaccggatcctgcagtacgccctgccgagacaggagtcccagcggccattcttttggattttcatggacaacttgctgctgaccgaggatgaccaggaaactaccactcggttcctgcagaccgaagccgtgaccctgcaggacgtgagaggccgggactaccagaacgccatgcgggtgtggtccaacatccctggactgaaaagcaagcacgcacctctgacccctaaagaagaggagtacctgcaggcccaggtgcggagcagaagcaagctggacgcccctaaggtggatctgctggtgaagaattgcctcctgcccctgagagagtacttcaagtatttcagccagaatagtctgcccctgggaggcagcggcggcggcgtgcaggagcccgtgaccttcaaggacgtggccgtggacttcacccaggaggagtggggccagctggacctggtgcagaggaccctgtacagggacgtgatgctggagacctacggccacctgctgagcgtgggcaaccagatcgccaagcccgaggtgatcagcctgctggagcagggcgaggagccctggagcgtggagcagacctgcccccagaggagctgccccgagtggatgaggaacggcggcccaagcagcggcgcccctcctcccagcggcggcagcccagccggctccccaacctctaccgaggagggcacctctgagtccgccacccccgagagcggccctggcacctccaccgagcccagcgagggcagcgcacccggcagccctgccggcagccccacctccacagaggagggaaccagcaccgagcccagcgaaggcagcgccccaggcaccagcaccgagcctagtgagcaggagattaaacggatcaacaagatcagaagaagacttgtgaaagacagcaacaccaagaaggccggcaagacaggccccatgaaaaccctgctggttagagtgatgacacccgatctgagagagcggctggaaaacctgagaaagaagcctgaaaatatcccccagcccatcagcaatacatctagagccaacctgaataagctgctgaccgattacaccgaaatgaagaaggcgatcctgcatgtgtactgggaagagttccagaaggaccctgtgggcctgatgagccgggtggcccagcctgccagcaagaagatcgatcagaacaagctgaaacctgagatggacgagaagggcaacctgaccaccgccggctttgcctgctctcagtgtggccagcccctgttcgtgtacaagctggagcaggtgtctgagaagggcaaggcttacaccaactacttcggacggtgcaatgtggccgagcacgaaaagctgatcctgctggcccagctgaagcccgagaaggatagcgacgaagccgtgacatatagcctgggaaagtttgggcagagggccctggatttctacagcattcatgtgaccaaggagtccacccaccccgtgaagcccctggcccagatcgccggaaacagatacgcctccggacctgtgggaaaggccctgagcgacgcatgtatgggcacaatcgcctccttcctgtctaagtaccaggacatcatcatcgaacaccagaaggtggtgaagggcaaccagaagagactggagagcctgcgggagctggccggcaaggaaaacctggaataccctagcgtgaccctgccacctcagcctcacaccaaggagggcgttgatgcctacaacgaagtgatcgcccgggtgcgaatgtgggtgaacctgaacctgtggcagaagctgaagctaagcagagatgatgccaagcctctgctgagactgaagggattcccttcctttcctctggtcgagagacaggccaacgaagtggactggtgggacatggtgtgtaacgtgaagaagctgatcaacgagaaaaaggaggatggcaaggtgttttggcagaatctggctggctacaagagacaggaagccctgagaccatacctgagcagcgaggaagatcggaagaagggaaagaaattcgctcggtaccagctgggcgacctgctgctgcacctggaaaagaagcacggcgaggactggggaaaggtgtacgacgaggcctgggagcggattgacaagaaagtggaaggcctgagcaagcacatcaagctggaagaggaacggagaagcgaggacgcccagagcaaggccgccctgaccgactggctgcgggctaaggccagcttcgtgatcgagggcctgaaggaggccgacaaggacgagttctgcagatgcgagctgaagctgcagaagtggtacggggacctgcggggaaagcccttcgccatcgaagccgagaacagcatcctggacatcagcggcttcagcaagcagtacaactgtgccttcatctggcagaaggacggcgtgaagaagctgaacctgtacctgatcatcaactacttcaagggcggcaagctgcggttcaagaagatcaaacctgaagccttcgaagccaacagattctacaccgtgatcaacaaaaagagcggcgagatcgtgcccatggaggtgaacttcaacttcgacgaccccaacctgatcatcctgcctctggcctttggcaagagacagggcagagaattcatctggaacgacctgctgtccctggaaaccggcagcctgaagctggccaacggaagagtgatcgagaagacactgtacaacagaagaacccggcaggatgagcctgccctgttcgtggccctgaccttcgagcggcgggaggtcctggactcctccaatatcaaaccaatgaacctgatcggcgtggcaagaggcgaaaacatccccgccgtgatcgccctgaccgaccccgagggctgcccactgagccggtttaaggatagcctgggaaacccaacccacatcctgagaatcggcgagagctataaggagaagcagcggaccatccaggccaagaaggaggtggagcagcggagagccggcggctacagccggaagtacgccagcaaagccaagaatctggcagacgatatggtgagaaacaccgctagagatctgctgtactacgccgtgacccaggatgccatgctgatcttcgccaacctgagccggggcttcggccggcagggcaagcggaccttcatggccgagagacagtacacacggatggaggactggctgaccgccaagctggcctacgagggcctgagcaagacctacctgtccaagacactggcccagtacacctccaagacatgcagcaactgtgggtttaccatcaccagcgccgactacgacagggtgctggagaagctgaagaagacagcaacaggctggatgaccacaattaacggcaaggagctgaaggtggagggccagattacctactacaacagatacaagagacagaacgtagtcaaggacctgtccgtcgagctggatagactgagcgaagaatctgtgaacaacgacatctcctcctggacaaagggcagaagcggagaagctctgagcctcctgaagaaaagattctcccatagacccgtgcaggagaagttcgtgtgcctgaactgcggcttcgagacacacgcagccgagcaagccgccctgaacatcgccagatcctggctgttcctgcggagccaggagtacaagaaataccagacaaacaagacaaccggcaacaccgataagagagccttcgtcgagacctggcagtccttttaccggaagaagcttaaggaggtgtggaaacctgccgtgcggtctggcggatctggcggaggctccaccagccccaagaaaaagagaaaagtctaagctgccttctgcggggcttgccttctggccatgcccttcttctctcccttgcacctgtacctcttggtctttgaataaagcctgagtaggaaggctagcaaaaaaaaaaaaaaaaaaaaaaaaaaaaaaaaaaaaaaaaaaaaaaaaaaaaaaaaaaaaaaaaaaaaaaaaaaaaaaaa

SEQ ID NO: 12221 - RNA, 5785 nt, synthetic construct
  source 1..5785: mol_type = other RNA
aggaaataagagagaaaagaagagtaagaagaaatataagagccaccatggcccctaagaagaagcgtaaagtgagccggatggaacgcctcgtctacgaggtgcggcagaagtgcagaaacatcgaggacatctgcatctcctgcggatctctgaacgtgaccctggagcacccactgttcatcggcggcatgtgccagaactgtaaaaactgttttctggagtgtgcctatcaatacgacgatgacggctaccagagctactgcaccatctgttgcggcggaagagaggtgctgatgtgtggaaataacaactgctgccggtgcttctgcgtggaatgcgtggacctgctggtgggccccggcgccgcccaggccgctattaaggaagatccttggaactgctacatgtgcggccacaagggcacatacggcctgctgagacggagagaggactggcctagcagactgcagatgttcttcgccaataaccacgaccaggagttcgacccccctaaggtgtaccctcccgtccccgccgagaagagaaagcccatccgggtcctgagcctgttcgatggcatcgccaccggtctgctggtgctgaaggacctgggcatccaggtggataggtacattgcctccgaggtgtgcgaggactccatcaccgtgggaatggtgcgtcatcagggcaagatcatgtacgtgggcgacgtgcggagcgtgacacagaagcatatccaggagtggggccctttcgacctggtgatcggcggcagcccttgcaatgacctgagcatcgtgaacccagcccggaagggcctgtacgagggaaccggcagactgttcttcgagttttacagactgctgcacgacgcccggcctaaggaaggcgacgaccggcccttcttttggctgttcgagaatgtggtggccatgggagtcagcgacaagcgggatattagccggttcctggagagcaaccccgtgatgatcgatgccaaggaagtgagcgccgcccaccgggccagatacttctggggcaatctgcctggcatgaacagacccctggccagcaccgtgaacgacaagctggagctgcaggagtgcctggagcacggccggatcgccaagttcagcaaggtgagaaccatcaccacccgaagcaacagcatcaaacaaggcaaggaccagcactttcctgtgttcatgaacgagaaggaggacatcctgtggtgtaccgagatggagagagtgttcgggttcccagtccactacacagatgtcagcaacatgtctagactggccagacagagactgctgggaagaagctggtccgtccctgtgatcagacacctgttcgcccctctgaaggagtacttcgcctgcgtgagcagcggcaacagcaacgccaacagccggggccccagcttctctagcggcctggtgccactgtccctgagagggagccacatgggccccatggagatctacaaaaccgtgagcgcctggaagcggcagcctgtgcgcgtgctgagcctgtttcggaatatcgataaagtcctgaaaagcctgggattcctggagagcggctctggctccggcggtggcaccctgaagtacgtggaggatgtgacaaacgtggtcagacgggatgtggagaagtggggccccttcgatctggtgtacggcagcacccaacccctgggcagctcttgtgaccggtgccctggctggtacatgtttcagttccaccggatcctgcagtacgccctgccgagacaggagtcccagcggccattcttttggattttcatggacaacttgctgctgaccgaggatgaccaggaaactaccactcggttcctgcagaccgaagccgtgaccctgcaggacgtgagaggccgggactaccagaacgccatgcgggtgtggtccaacatccctggactgaaaagcaagcacgcacctctgacccctaaagaagaggagtacctgcaggcccaggtgcggagcagaagcaagctggacgcccctaaggtggatctgctggtgaagaattgcctcctgcccctgagagagtacttcaagtatttcagccagaatagtctgcccctgggaggcagcggcggcggcatgcccctgggcagcgagctgttcagggacgtggccatcgtgttcagccaggaggagtggcagtggctggcccccgcccagagggacctgtacagggacgtgatgctggagacctacagcaacctggtgagcctgggcctggccatcagcaagcccgacgtgatcagcttcctggagcagggcaaggagccctggatggtggagagggtggtggccggcggcctgtgccccgaggccgagctgggcggcccaagcagcggcgcccctcctcccagcggcggcagcccagccggctccccaacctctaccgaggagggcacctctgagtccgccacccccgagagcggccctggcacctccaccgagcccagcgagggcagcgcacccggcagccctgccggcagccccacctccacagaggagggaaccagcaccgagcccagcgaaggcagcgccccaggcaccagcaccgagcctagtgagcaggagattaaacggatcaacaagatcagaagaagacttgtgaaagacagcaacaccaagaaggccggcaagacaggccccatgaaaaccctgctggttagagtgatgacacccgatctgagagagcggctggaaaacctgagaaagaagcctgaaaatatcccccagcccatcagcaatacatctagagccaacctgaataagctgctgaccgattacaccgaaatgaagaaggcgatcctgcatgtgtactgggaagagttccagaaggaccctgtgggcctgatgagccgggtggcccagcctgccagcaagaagatcgatcagaacaagctgaaacctgagatggacgagaagggcaacctgaccaccgccggctttgcctgctctcagtgtggccagcccctgttcgtgtacaagctggagcaggtgtctgagaagggcaaggcttacaccaactacttcggacggtgcaatgtggccgagcacgaaaagctgatcctgctggcccagctgaagcccgagaaggatagcgacgaagccgtgacatatagcctgggaaagtttgggcagagggccctggatttctacagcattcatgtgaccaaggagtccacccaccccgtgaagcccctggcccagatcgccggaaacagatacgcctccggacctgtgggaaaggccctgagcgacgcatgtatgggcacaatcgcctccttcctgtctaagtaccaggacatcatcatcgaacaccagaaggtggtgaagggcaaccagaagagactggagagcctgcgggagctggccggcaaggaaaacctggaataccctagcgtgaccctgccacctcagcctcacaccaaggagggcgttgatgcctacaacgaagtgatcgcccgggtgcgaatgtgggtgaacctgaacctgtggcagaagctgaagctaagcagagatgatgccaagcctctgctgagactgaagggattcccttcctttcctctggtcgagagacaggccaacgaagtggactggtgggacatggtgtgtaacgtgaagaagctgatcaacgagaaaaaggaggatggcaaggtgttttggcagaatctggctggctacaagagacaggaagccctgagaccatacctgagcagcgaggaagatcggaagaagggaaagaaattcgctcggtaccagctgggcgacctgctgctgcacctggaaaagaagcacggcgaggactggggaaaggtgtacgacgaggcctgggagcggattgacaagaaagtggaaggcctgagcaagcacatcaagctggaagaggaacggagaagcgaggacgcccagagcaaggccgccctgaccgactggctgcgggctaaggccagcttcgtgatcgagggcctgaaggaggccgacaaggacgagttctgcagatgcgagctgaagctgcagaagtggtacggggacctgcggggaaagcccttcgccatcgaagccgagaacagcatcctggacatcagcggcttcagcaagcagtacaactgtgccttcatctggcagaaggacggcgtgaagaagctgaacctgtacctgatcatcaactacttcaagggcggcaagctgcggttcaagaagatcaaacctgaagccttcgaagccaacagattctacaccgtgatcaacaaaaagagcggcgagatcgtgcccatggaggtgaacttcaacttcgacgaccccaacctgatcatcctgcctctggcctttggcaagagacagggcagagaattcatctggaacgacctgctgtccctggaaaccggcagcctgaagctggccaacggaagagtgatcgagaagacactgtacaacagaagaacccggcaggatgagcctgccctgttcgtggccctgaccttcgagcggcgggaggtcctggactcctccaatatcaaaccaatgaacctgatcggcgtggcaagaggcgaaaacatccccgccgtgatcgccctgaccgaccccgagggctgcccactgagccggtttaaggatagcctgggaaacccaacccacatcctgagaatcggcgagagctataaggagaagcagcggaccatccaggccaagaaggaggtggagcagcggagagccggcggctacagccggaagtacgccagcaaagccaagaatctggcagacgatatggtgagaaacaccgctagagatctgctgtactacgccgtgacccaggatgccatgctgatcttcgccaacctgagccggggcttcggccggcagggcaagcggaccttcatggccgagagacagtacacacggatggaggactggctgaccgccaagctggcctacgagggcctgagcaagacctacctgtccaagacactggcccagtacacctccaagacatgcagcaactgtgggtttaccatcaccagcgccgactacgacagggtgctggagaagctgaagaagacagcaacaggctggatgaccacaattaacggcaaggagctgaaggtggagggccagattacctactacaacagatacaagagacagaacgtagtcaaggacctgtccgtcgagctggatagactgagcgaagaatctgtgaacaacgacatctcctcctggacaaagggcagaagcggagaagctctgagcctcctgaagaaaagattctcccatagacccgtgcaggagaagttcgtgtgcctgaactgcggcttcgagacacacgcagccgagcaagccgccctgaacatcgccagatcctggctgttcctgcggagccaggagtacaagaaataccagacaaacaagacaaccggcaacaccgataagagagccttcgtcgagacctggcagtccttttaccggaagaagcttaaggaggtgtggaaacctgccgtgcggtctggcggatctggcggaggctccaccagccccaagaaaaagagaaaagtctaagctgccttctgcggggcttgccttctggccatgcccttcttctctcccttgcacctgtacctcttggtctttgaataaagcctgagtaggaaggctagcaaaaaaaaaaaaaaaaaaaaaaaaaaaaaaaaaaaaaaaaaaaaaaaaaaaaaaaaaaaaaaaaaaaaaaaaaaaaaaaa

SEQ ID NO: 12222 - RNA, 5785 nt, synthetic construct
  source 1..5785: mol_type = other RNA
aggaaataagagagaaaagaagagtaagaagaaatataagagccaccatggcccctaagaagaagcgtaaagtgagccggatggaacgcctcgtctacgaggtgcggcagaagtgcagaaacatcgaggacatctgcatctcctgcggatctctgaacgtgaccctggagcacccactgttcatcggcggcatgtgccagaactgtaaaaactgttttctggagtgtgcctatcaatacgacgatgacggctaccagagctactgcaccatctgttgcggcggaagagaggtgctgatgtgtggaaataacaactgctgccggtgcttctgcgtggaatgcgtggacctgctggtgggccccggcgccgcccaggccgctattaaggaagatccttggaactgctacatgtgcggccacaagggcacatacggcctgctgagacggagagaggactggcctagcagactgcagatgttcttcgccaataaccacgaccaggagttcgacccccctaaggtgtaccctcccgtccccgccgagaagagaaagcccatccgggtcctgagcctgttcgatggcatcgccaccggtctgctggtgctgaaggacctgggcatccaggtggataggtacattgcctccgaggtgtgcgaggactccatcaccgtgggaatggtgcgtcatcagggcaagatcatgtacgtgggcgacgtgcggagcgtgacacagaagcatatccaggagtggggccctttcgacctggtgatcggcggcagcccttgcaatgacctgagcatcgtgaacccagcccggaagggcctgtacgagggaaccggcagactgttcttcgagttttacagactgctgcacgacgcccggcctaaggaaggcgacgaccggcccttcttttggctgttcgagaatgtggtggccatgggagtcagcgacaagcgggatattagccggttcctggagagcaaccccgtgatgatcgatgccaaggaagtgagcgccgcccaccgggccagatacttctggggcaatctgcctggcatgaacagacccctggccagcaccgtgaacgacaagctggagctgcaggagtgcctggagcacggccggatcgccaagttcagcaaggtgagaaccatcaccacccgaagcaacagcatcaaacaaggcaaggaccagcactttcctgtgttcatgaacgagaaggaggacatcctgtggtgtaccgagatggagagagtgttcgggttcccagtccactacacagatgtcagcaacatgtctagactggccagacagagactgctgggaagaagctggtccgtccctgtgatcagacacctgttcgcccctctgaaggagtacttcgcctgcgtgagcagcggcaacagcaacgccaacagccggggccccagcttctctagcggcctggtgccactgtccctgagagggagccacatgggccccatggagatctacaaaaccgtgagcgcctggaagcggcagcctgtgcgcgtgctgagcctgtttcggaatatcgataaagtcctgaaaagcctgggattcctggagagcggctctggctccggcggtggcaccctgaagtacgtggaggatgtgacaaacgtggtcagacgggatgtggagaagtggggccccttcgatctggtgtacggcagcacccaacccctgggcagctcttgtgaccggtgccctggctggtacatgtttcagttccaccggatcctgcagtacgccctgccgagacaggagtcccagcggccattcttttggattttcatggacaacttgctgctgaccgaggatgaccaggaaactaccactcggttcctgcagaccgaagccgtgaccctgcaggacgtgagaggccgggactaccagaacgccatgcgggtgtggtccaacatccctggactgaaaagcaagcacgcacctctgacccctaaagaagaggagtacctgcaggcccaggtgcggagcagaagcaagctggacgcccctaaggtggatctgctggtgaagaattgcctcctgcccctgagagagtacttcaagtatttcagccagaatagtctgcccctgggaggcagcggcggcggccagccccaggaggccgtgaccttcaaggacgtggaggtgaccttcagccaggacgagtggggctggctggacgccagccagaggaacctgtacagggacgtgatgctggagaactacggcaacgtggccagcctggtgggccccttcaccaagcccgccctgatcagctggctggaggccagggagccctggggcctgaacgtgcagggcgcccaccccaagggcagccccagcgccgcccccggcggcccaagcagcggcgcccctcctcccagcggcggcagcccagccggctccccaacctctaccgaggagggcacctctgagtccgccacccccgagagcggccctggcacctccaccgagcccagcgagggcagcgcacccggcagccctgccggcagccccacctccacagaggagggaaccagcaccgagcccagcgaaggcagcgccccaggcaccagcaccgagcctagtgagcaggagattaaacggatcaacaagatcagaagaagacttgtgaaagacagcaacaccaagaaggccggcaagacaggccccatgaaaaccctgctggttagagtgatgacacccgatctgagagagcggctggaaaacctgagaaagaagcctgaaaatatcccccagcccatcagcaatacatctagagccaacctgaataagctgctgaccgattacaccgaaatgaagaaggcgatcctgcatgtgtactgggaagagttccagaaggaccctgtgggcctgatgagccgggtggcccagcctgccagcaagaagatcgatcagaacaagctgaaacctgagatggacgagaagggcaacctgaccaccgccggctttgcctgctctcagtgtggccagcccctgttcgtgtacaagctggagcaggtgtctgagaagggcaaggcttacaccaactacttcggacggtgcaatgtggccgagcacgaaaagctgatcctgctggcccagctgaagcccgagaaggatagcgacgaagccgtgacatatagcctgggaaagtttgggcagagggccctggatttctacagcattcatgtgaccaaggagtccacccaccccgtgaagcccctggcccagatcgccggaaacagatacgcctccggacctgtgggaaaggccctgagcgacgcatgtatgggcacaatcgcctccttcctgtctaagtaccaggacatcatcatcgaacaccagaaggtggtgaagggcaaccagaagagactggagagcctgcgggagctggccggcaaggaaaacctggaataccctagcgtgaccctgccacctcagcctcacaccaaggagggcgttgatgcctacaacgaagtgatcgcccgggtgcgaatgtgggtgaacctgaacctgtggcagaagctgaagctaagcagagatgatgccaagcctctgctgagactgaagggattcccttcctttcctctggtcgagagacaggccaacgaagtggactggtgggacatggtgtgtaacgtgaagaagctgatcaacgagaaaaaggaggatggcaaggtgttttggcagaatctggctggctacaagagacaggaagccctgagaccatacctgagcagcgaggaagatcggaagaagggaaagaaattcgctcggtaccagctgggcgacctgctgctgcacctggaaaagaagcacggcgaggactggggaaaggtgtacgacgaggcctgggagcggattgacaagaaagtggaaggcctgagcaagcacatcaagctggaagaggaacggagaagcgaggacgcccagagcaaggccgccctgaccgactggctgcgggctaaggccagcttcgtgatcgagggcctgaaggaggccgacaaggacgagttctgcagatgcgagctgaagctgcagaagtggtacggggacctgcggggaaagcccttcgccatcgaagccgagaacagcatcctggacatcagcggcttcagcaagcagtacaactgtgccttcatctggcagaaggacggcgtgaagaagctgaacctgtacctgatcatcaactacttcaagggcggcaagctgcggttcaagaagatcaaacctgaagccttcgaagccaacagattctacaccgtgatcaacaaaaagagcggcgagatcgtgcccatggaggtgaacttcaacttcgacgaccccaacctgatcatcctgcctctggcctttggcaagagacagggcagagaattcatctggaacgacctgctgtccctggaaaccggcagcctgaagctggccaacggaagagtgatcgagaagacactgtacaacagaagaacccggcaggatgagcctgccctgttcgtggccctgaccttcgagcggcgggaggtcctggactcctccaatatcaaaccaatgaacctgatcggcgtggcaagaggcgaaaacatccccgccgtgatcgccctgaccgaccccgagggctgcccactgagccggtttaaggatagcctgggaaacccaacccacatcctgagaatcggcgagagctataaggagaagcagcggaccatccaggccaagaaggaggtggagcagcggagagccggcggctacagccggaagtacgccagcaaagccaagaatctggcagacgatatggtgagaaacaccgctagagatctgctgtactacgccgtgacccaggatgccatgctgatcttcgccaacctgagccggggcttcggccggcagggcaagcggaccttcatggccgagagacagtacacacggatggaggactggctgaccgccaagctggcctacgagggcctgagcaagacctacctgtccaagacactggcccagtacacctccaagacatgcagcaactgtgggtttaccatcaccagcgccgactacgacagggtgctggagaagctgaagaagacagcaacaggctggatgaccacaattaacggcaaggagctgaaggtggagggccagattacctactacaacagatacaagagacagaacgtagtcaaggacctgtccgtcgagctggatagactgagcgaagaatctgtgaacaacgacatctcctcctggacaaagggcagaagcggagaagctctgagcctcctgaagaaaagattctcccatagacccgtgcaggagaagttcgtgtgcctgaactgcggcttcgagacacacgcagccgagcaagccgccctgaacatcgccagatcctggctgttcctgcggagccaggagtacaagaaataccagacaaacaagacaaccggcaacaccgataagagagccttcgtcgagacctggcagtccttttaccggaagaagcttaaggaggtgtggaaacctgccgtgcggtctggcggatctggcggaggctccaccagccccaagaaaaagagaaaagtctaagctgccttctgcggggcttgccttctggccatgcccttcttctctcccttgcacctgtacctcttggtctttgaataaagcctgagtaggaaggctagcaaaaaaaaaaaaaaaaaaaaaaaaaaaaaaaaaaaaaaaaaaaaaaaaaaaaaaaaaaaaaaaaaaaaaaaaaaaaaaaa

SEQ ID NO: 12223 - RNA, 5785 nt, synthetic construct
  source 1..5785: mol_type = other RNA
aggaaataagagagaaaagaagagtaagaagaaatataagagccaccatggcccctaagaagaagcgtaaagtgagccggatggaacgcctcgtctacgaggtgcggcagaagtgcagaaacatcgaggacatctgcatctcctgcggatctctgaacgtgaccctggagcacccactgttcatcggcggcatgtgccagaactgtaaaaactgttttctggagtgtgcctatcaatacgacgatgacggctaccagagctactgcaccatctgttgcggcggaagagaggtgctgatgtgtggaaataacaactgctgccggtgcttctgcgtggaatgcgtggacctgctggtgggccccggcgccgcccaggccgctattaaggaagatccttggaactgctacatgtgcggccacaagggcacatacggcctgctgagacggagagaggactggcctagcagactgcagatgttcttcgccaataaccacgaccaggagttcgacccccctaaggtgtaccctcccgtccccgccgagaagagaaagcccatccgggtcctgagcctgttcgatggcatcgccaccggtctgctggtgctgaaggacctgggcatccaggtggataggtacattgcctccgaggtgtgcgaggactccatcaccgtgggaatggtgcgtcatcagggcaagatcatgtacgtgggcgacgtgcggagcgtgacacagaagcatatccaggagtggggccctttcgacctggtgatcggcggcagcccttgcaatgacctgagcatcgtgaacccagcccggaagggcctgtacgagggaaccggcagactgttcttcgagttttacagactgctgcacgacgcccggcctaaggaaggcgacgaccggcccttcttttggctgttcgagaatgtggtggccatgggagtcagcgacaagcgggatattagccggttcctggagagcaaccccgtgatgatcgatgccaaggaagtgagcgccgcccaccgggccagatacttctggggcaatctgcctggcatgaacagacccctggccagcaccgtgaacgacaagctggagctgcaggagtgcctggagcacggccggatcgccaagttcagcaaggtgagaaccatcaccacccgaagcaacagcatcaaacaaggcaaggaccagcactttcctgtgttcatgaacgagaaggaggacatcctgtggtgtaccgagatggagagagtgttcgggttcccagtccactacacagatgtcagcaacatgtctagactggccagacagagactgctgggaagaagctggtccgtccctgtgatcagacacctgttcgcccctctgaaggagtacttcgcctgcgtgagcagcggcaacagcaacgccaacagccggggccccagcttctctagcggcctggtgccactgtccctgagagggagccacatgggccccatggagatctacaaaaccgtgagcgcctggaagcggcagcctgtgcgcgtgctgagcctgtttcggaatatcgataaagtcctgaaaagcctgggattcctggagagcggctctggctccggcggtggcaccctgaagtacgtggaggatgtgacaaacgtggtcagacgggatgtggagaagtggggccccttcgatctggtgtacggcagcacccaacccctgggcagctcttgtgaccggtgccctggctggtacatgtttcagttccaccggatcctgcagtacgccctgccgagacaggagtcccagcggccattcttttggattttcatggacaacttgctgctgaccgaggatgaccaggaaactaccactcggttcctgcagaccgaagccgtgaccctgcaggacgtgagaggccgggactaccagaacgccatgcgggtgtggtccaacatccctggactgaaaagcaagcacgcacctctgacccctaaagaagaggagtacctgcaggcccaggtgcggagcagaagcaagctggacgcccctaaggtggatctgctggtgaagaattgcctcctgcccctgagagagtacttcaagtatttcagccagaatagtctgcccctgggaggcagcggcggcggcgcccacggcagcgtgatgttcagcgacgtgagcatcgacttcagccaggaggagtgggactacctggacctggagcagagggacctgtacagggacgtgatgctggagaactacagcaacctggtgagcctgggctgcttcgtgagcaagcccgacgtgatcttcctgctggagcagggcaaggagccctggaaggtggtgaggaagggcaggaggaggtaccccgacctggagaccaactacggcggcccaagcagcggcgcccctcctcccagcggcggcagcccagccggctccccaacctctaccgaggagggcacctctgagtccgccacccccgagagcggccctggcacctccaccgagcccagcgagggcagcgcacccggcagccctgccggcagccccacctccacagaggagggaaccagcaccgagcccagcgaaggcagcgccccaggcaccagcaccgagcctagtgagcaggagattaaacggatcaacaagatcagaagaagacttgtgaaagacagcaacaccaagaaggccggcaagacaggccccatgaaaaccctgctggttagagtgatgacacccgatctgagagagcggctggaaaacctgagaaagaagcctgaaaatatcccccagcccatcagcaatacatctagagccaacctgaataagctgctgaccgattacaccgaaatgaagaaggcgatcctgcatgtgtactgggaagagttccagaaggaccctgtgggcctgatgagccgggtggcccagcctgccagcaagaagatcgatcagaacaagctgaaacctgagatggacgagaagggcaacctgaccaccgccggctttgcctgctctcagtgtggccagcccctgttcgtgtacaagctggagcaggtgtctgagaagggcaaggcttacaccaactacttcggacggtgcaatgtggccgagcacgaaaagctgatcctgctggcccagctgaagcccgagaaggatagcgacgaagccgtgacatatagcctgggaaagtttgggcagagggccctggatttctacagcattcatgtgaccaaggagtccacccaccccgtgaagcccctggcccagatcgccggaaacagatacgcctccggacctgtgggaaaggccctgagcgacgcatgtatgggcacaatcgcctccttcctgtctaagtaccaggacatcatcatcgaacaccagaaggtggtgaagggcaaccagaagagactggagagcctgcgggagctggccggcaaggaaaacctggaataccctagcgtgaccctgccacctcagcctcacaccaaggagggcgttgatgcctacaacgaagtgatcgcccgggtgcgaatgtgggtgaacctgaacctgtggcagaagctgaagctaagcagagatgatgccaagcctctgctgagactgaagggattcccttcctttcctctggtcgagagacaggccaacgaagtggactggtgggacatggtgtgtaacgtgaagaagctgatcaacgagaaaaaggaggatggcaaggtgttttggcagaatctggctggctacaagagacaggaagccctgagaccatacctgagcagcgaggaagatcggaagaagggaaagaaattcgctcggtaccagctgggcgacctgctgctgcacctggaaaagaagcacggcgaggactggggaaaggtgtacgacgaggcctgggagcggattgacaagaaagtggaaggcctgagcaagcacatcaagctggaagaggaacggagaagcgaggacgcccagagcaaggccgccctgaccgactggctgcgggctaaggccagcttcgtgatcgagggcctgaaggaggccgacaaggacgagttctgcagatgcgagctgaagctgcagaagtggtacggggacctgcggggaaagcccttcgccatcgaagccgagaacagcatcctggacatcagcggcttcagcaagcagtacaactgtgccttcatctggcagaaggacggcgtgaagaagctgaacctgtacctgatcatcaactacttcaagggcggcaagctgcggttcaagaagatcaaacctgaagccttcgaagccaacagattctacaccgtgatcaacaaaaagagcggcgagatcgtgcccatggaggtgaacttcaacttcgacgaccccaacctgatcatcctgcctctggcctttggcaagagacagggcagagaattcatctggaacgacctgctgtccctggaaaccggcagcctgaagctggccaacggaagagtgatcgagaagacactgtacaacagaagaacccggcaggatgagcctgccctgttcgtggccctgaccttcgagcggcgggaggtcctggactcctccaatatcaaaccaatgaacctgatcggcgtggcaagaggcgaaaacatccccgccgtgatcgccctgaccgaccccgagggctgcccactgagccggtttaaggatagcctgggaaacccaacccacatcctgagaatcggcgagagctataaggagaagcagcggaccatccaggccaagaaggaggtggagcagcggagagccggcggctacagccggaagtacgccagcaaagccaagaatctggcagacgatatggtgagaaacaccgctagagatctgctgtactacgccgtgacccaggatgccatgctgatcttcgccaacctgagccggggcttcggccggcagggcaagcggaccttcatggccgagagacagtacacacggatggaggactggctgaccgccaagctggcctacgagggcctgagcaagacctacctgtccaagacactggcccagtacacctccaagacatgcagcaactgtgggtttaccatcaccagcgccgactacgacagggtgctggagaagctgaagaagacagcaacaggctggatgaccacaattaacggcaaggagctgaaggtggagggccagattacctactacaacagatacaagagacagaacgtagtcaaggacctgtccgtcgagctggatagactgagcgaagaatctgtgaacaacgacatctcctcctggacaaagggcagaagcggagaagctctgagcctcctgaagaaaagattctcccatagacccgtgcaggagaagttcgtgtgcctgaactgcggcttcgagacacacgcagccgagcaagccgccctgaacatcgccagatcctggctgttcctgcggagccaggagtacaagaaataccagacaaacaagacaaccggcaacaccgataagagagccttcgtcgagacctggcagtccttttaccggaagaagcttaaggaggtgtggaaacctgccgtgcggtctggcggatctggcggaggctccaccagccccaagaaaaagagaaaagtctaagctgccttctgcggggcttgccttctggccatgcccttcttctctcccttgcacctgtacctcttggtctttgaataaagcctgagtaggaaggctagcaaaaaaaaaaaaaaaaaaaaaaaaaaaaaaaaaaaaaaaaaaaaaaaaaaaaaaaaaaaaaaaaaaaaaaaaaaaaaaaa

SEQ ID NO: 12224 - RNA, 5785 nt, synthetic construct
  source 1..5785: mol_type = other RNA
aggaaataagagagaaaagaagagtaagaagaaatataagagccaccatggcccctaagaagaagcgtaaagtgagccggatggaacgcctcgtctacgaggtgcggcagaagtgcagaaacatcgaggacatctgcatctcctgcggatctctgaacgtgaccctggagcacccactgttcatcggcggcatgtgccagaactgtaaaaactgttttctggagtgtgcctatcaatacgacgatgacggctaccagagctactgcaccatctgttgcggcggaagagaggtgctgatgtgtggaaataacaactgctgccggtgcttctgcgtggaatgcgtggacctgctggtgggccccggcgccgcccaggccgctattaaggaagatccttggaactgctacatgtgcggccacaagggcacatacggcctgctgagacggagagaggactggcctagcagactgcagatgttcttcgccaataaccacgaccaggagttcgacccccctaaggtgtaccctcccgtccccgccgagaagagaaagcccatccgggtcctgagcctgttcgatggcatcgccaccggtctgctggtgctgaaggacctgggcatccaggtggataggtacattgcctccgaggtgtgcgaggactccatcaccgtgggaatggtgcgtcatcagggcaagatcatgtacgtgggcgacgtgcggagcgtgacacagaagcatatccaggagtggggccctttcgacctggtgatcggcggcagcccttgcaatgacctgagcatcgtgaacccagcccggaagggcctgtacgagggaaccggcagactgttcttcgagttttacagactgctgcacgacgcccggcctaaggaaggcgacgaccggcccttcttttggctgttcgagaatgtggtggccatgggagtcagcgacaagcgggatattagccggttcctggagagcaaccccgtgatgatcgatgccaaggaagtgagcgccgcccaccgggccagatacttctggggcaatctgcctggcatgaacagacccctggccagcaccgtgaacgacaagctggagctgcaggagtgcctggagcacggccggatcgccaagttcagcaaggtgagaaccatcaccacccgaagcaacagcatcaaacaaggcaaggaccagcactttcctgtgttcatgaacgagaaggaggacatcctgtggtgtaccgagatggagagagtgttcgggttcccagtccactacacagatgtcagcaacatgtctagactggccagacagagactgctgggaagaagctggtccgtccctgtgatcagacacctgttcgcccctctgaaggagtacttcgcctgcgtgagcagcggcaacagcaacgccaacagccggggccccagcttctctagcggcctggtgccactgtccctgagagggagccacatgggccccatggagatctacaaaaccgtgagcgcctggaagcggcagcctgtgcgcgtgctgagcctgtttcggaatatcgataaagtcctgaaaagcctgggattcctggagagcggctctggctccggcggtggcaccctgaagtacgtggaggatgtgacaaacgtggtcagacgggatgtggagaagtggggccccttcgatctggtgtacggcagcacccaacccctgggcagctcttgtgaccggtgccctggctggtacatgtttcagttccaccggatcctgcagtacgccctgccgagacaggagtcccagcggccattcttttggattttcatggacaacttgctgctgaccgaggatgaccaggaaactaccactcggttcctgcagaccgaagccgtgaccctgcaggacgtgagaggccgggactaccagaacgccatgcgggtgtggtccaacatccctggactgaaaagcaagcacgcacctctgacccctaaagaagaggagtacctgcaggcccaggtgcggagcagaagcaagctggacgcccctaaggtggatctgctggtgaagaattgcctcctgcccctgagagagtacttcaagtatttcagccagaatagtctgcccctgggaggcagcggcggcggcgtgcaggagcccgtgaccttcaaggacgtggccgtggacttcacccaggaggagtggggccagctggacctggtgcagaggaccctgtacagggacgtgatgctggagacctacggccacctgctgagcgtgggcaaccagatcgccaagcccgaggtgatcagcctgctggagcagggcgaggagccctggagcctggagcagacctgcccccagagggcctgccccgagtggatgaggaacggcggcccaagcagcggcgcccctcctcccagcggcggcagcccagccggctccccaacctctaccgaggagggcacctctgagtccgccacccccgagagcggccctggcacctccaccgagcccagcgagggcagcgcacccggcagccctgccggcagccccacctccacagaggagggaaccagcaccgagcccagcgaaggcagcgccccaggcaccagcaccgagcctagtgagcaggagattaaacggatcaacaagatcagaagaagacttgtgaaagacagcaacaccaagaaggccggcaagacaggccccatgaaaaccctgctggttagagtgatgacacccgatctgagagagcggctggaaaacctgagaaagaagcctgaaaatatcccccagcccatcagcaatacatctagagccaacctgaataagctgctgaccgattacaccgaaatgaagaaggcgatcctgcatgtgtactgggaagagttccagaaggaccctgtgggcctgatgagccgggtggcccagcctgccagcaagaagatcgatcagaacaagctgaaacctgagatggacgagaagggcaacctgaccaccgccggctttgcctgctctcagtgtggccagcccctgttcgtgtacaagctggagcaggtgtctgagaagggcaaggcttacaccaactacttcggacggtgcaatgtggccgagcacgaaaagctgatcctgctggcccagctgaagcccgagaaggatagcgacgaagccgtgacatatagcctgggaaagtttgggcagagggccctggatttctacagcattcatgtgaccaaggagtccacccaccccgtgaagcccctggcccagatcgccggaaacagatacgcctccggacctgtgggaaaggccctgagcgacgcatgtatgggcacaatcgcctccttcctgtctaagtaccaggacatcatcatcgaacaccagaaggtggtgaagggcaaccagaagagactggagagcctgcgggagctggccggcaaggaaaacctggaataccctagcgtgaccctgccacctcagcctcacaccaaggagggcgttgatgcctacaacgaagtgatcgcccgggtgcgaatgtgggtgaacctgaacctgtggcagaagctgaagctaagcagagatgatgccaagcctctgctgagactgaagggattcccttcctttcctctggtcgagagacaggccaacgaagtggactggtgggacatggtgtgtaacgtgaagaagctgatcaacgagaaaaaggaggatggcaaggtgttttggcagaatctggctggctacaagagacaggaagccctgagaccatacctgagcagcgaggaagatcggaagaagggaaagaaattcgctcggtaccagctgggcgacctgctgctgcacctggaaaagaagcacggcgaggactggggaaaggtgtacgacgaggcctgggagcggattgacaagaaagtggaaggcctgagcaagcacatcaagctggaagaggaacggagaagcgaggacgcccagagcaaggccgccctgaccgactggctgcgggctaaggccagcttcgtgatcgagggcctgaaggaggccgacaaggacgagttctgcagatgcgagctgaagctgcagaagtggtacggggacctgcggggaaagcccttcgccatcgaagccgagaacagcatcctggacatcagcggcttcagcaagcagtacaactgtgccttcatctggcagaaggacggcgtgaagaagctgaacctgtacctgatcatcaactacttcaagggcggcaagctgcggttcaagaagatcaaacctgaagccttcgaagccaacagattctacaccgtgatcaacaaaaagagcggcgagatcgtgcccatggaggtgaacttcaacttcgacgaccccaacctgatcatcctgcctctggcctttggcaagagacagggcagagaattcatctggaacgacctgctgtccctggaaaccggcagcctgaagctggccaacggaagagtgatcgagaagacactgtacaacagaagaacccggcaggatgagcctgccctgttcgtggccctgaccttcgagcggcgggaggtcctggactcctccaatatcaaaccaatgaacctgatcggcgtggcaagaggcgaaaacatccccgccgtgatcgccctgaccgaccccgagggctgcccactgagccggtttaaggatagcctgggaaacccaacccacatcctgagaatcggcgagagctataaggagaagcagcggaccatccaggccaagaaggaggtggagcagcggagagccggcggctacagccggaagtacgccagcaaagccaagaatctggcagacgatatggtgagaaacaccgctagagatctgctgtactacgccgtgacccaggatgccatgctgatcttcgccaacctgagccggggcttcggccggcagggcaagcggaccttcatggccgagagacagtacacacggatggaggactggctgaccgccaagctggcctacgagggcctgagcaagacctacctgtccaagacactggcccagtacacctccaagacatgcagcaactgtgggtttaccatcaccagcgccgactacgacagggtgctggagaagctgaagaagacagcaacaggctggatgaccacaattaacggcaaggagctgaaggtggagggccagattacctactacaacagatacaagagacagaacgtagtcaaggacctgtccgtcgagctggatagactgagcgaagaatctgtgaacaacgacatctcctcctggacaaagggcagaagcggagaagctctgagcctcctgaagaaaagattctcccatagacccgtgcaggagaagttcgtgtgcctgaactgcggcttcgagacacacgcagccgagcaagccgccctgaacatcgccagatcctggctgttcctgcggagccaggagtacaagaaataccagacaaacaagacaaccggcaacaccgataagagagccttcgtcgagacctggcagtccttttaccggaagaagcttaaggaggtgtggaaacctgccgtgcggtctggcggatctggcggaggctccaccagccccaagaaaaagagaaaagtctaagctgccttctgcggggcttgccttctggccatgcccttcttctctcccttgcacctgtacctcttggtctttgaataaagcctgagtaggaaggctagcaaaaaaaaaaaaaaaaaaaaaaaaaaaaaaaaaaaaaaaaaaaaaaaaaaaaaaaaaaaaaaaaaaaaaaaaaaaaaaaa

SEQ ID NO: 12225 - RNA, 5785 nt, synthetic construct
  source 1..5785: mol_type = other RNA
aggaaataagagagaaaagaagagtaagaagaaatataagagccaccatggcccctaagaagaagcgtaaagtgagccggatggaacgcctcgtctacgaggtgcggcagaagtgcagaaacatcgaggacatctgcatctcctgcggatctctgaacgtgaccctggagcacccactgttcatcggcggcatgtgccagaactgtaaaaactgttttctggagtgtgcctatcaatacgacgatgacggctaccagagctactgcaccatctgttgcggcggaagagaggtgctgatgtgtggaaataacaactgctgccggtgcttctgcgtggaatgcgtggacctgctggtgggccccggcgccgcccaggccgctattaaggaagatccttggaactgctacatgtgcggccacaagggcacatacggcctgctgagacggagagaggactggcctagcagactgcagatgttcttcgccaataaccacgaccaggagttcgacccccctaaggtgtaccctcccgtccccgccgagaagagaaagcccatccgggtcctgagcctgttcgatggcatcgccaccggtctgctggtgctgaaggacctgggcatccaggtggataggtacattgcctccgaggtgtgcgaggactccatcaccgtgggaatggtgcgtcatcagggcaagatcatgtacgtgggcgacgtgcggagcgtgacacagaagcatatccaggagtggggccctttcgacctggtgatcggcggcagcccttgcaatgacctgagcatcgtgaacccagcccggaagggcctgtacgagggaaccggcagactgttcttcgagttttacagactgctgcacgacgcccggcctaaggaaggcgacgaccggcccttcttttggctgttcgagaatgtggtggccatgggagtcagcgacaagcgggatattagccggttcctggagagcaaccccgtgatgatcgatgccaaggaagtgagcgccgcccaccgggccagatacttctggggcaatctgcctggcatgaacagacccctggccagcaccgtgaacgacaagctggagctgcaggagtgcctggagcacggccggatcgccaagttcagcaaggtgagaaccatcaccacccgaagcaacagcatcaaacaaggcaaggaccagcactttcctgtgttcatgaacgagaaggaggacatcctgtggtgtaccgagatggagagagtgttcgggttcccagtccactacacagatgtcagcaacatgtctagactggccagacagagactgctgggaagaagctggtccgtccctgtgatcagacacctgttcgcccctctgaaggagtacttcgcctgcgtgagcagcggcaacagcaacgccaacagccggggccccagcttctctagcggcctggtgccactgtccctgagagggagccacatgggccccatggagatctacaaaaccgtgagcgcctggaagcggcagcctgtgcgcgtgctgagcctgtttcggaatatcgataaagtcctgaaaagcctgggattcctggagagcggctctggctccggcggtggcaccctgaagtacgtggaggatgtgacaaacgtggtcagacgggatgtggagaagtggggccccttcgatctggtgtacggcagcacccaacccctgggcagctcttgtgaccggtgccctggctggtacatgtttcagttccaccggatcctgcagtacgccctgccgagacaggagtcccagcggccattcttttggattttcatggacaacttgctgctgaccgaggatgaccaggaaactaccactcggttcctgcagaccgaagccgtgaccctgcaggacgtgagaggccgggactaccagaacgccatgcgggtgtggtccaacatccctggactgaaaagcaagcacgcacctctgacccctaaagaagaggagtacctgcaggcccaggtgcggagcagaagcaagctggacgcccctaaggtggatctgctggtgaagaattgcctcctgcccctgagagagtacttcaagtatttcagccagaatagtctgcccctgggaggcagcggcggcggcttccaggagcccgtgaccttcgaggacgtggccgtgtacttcacccagaacgagtgggccagcctgcaccccatgcagagggccctgtacagggaggtgatgctggagaactacgccaacgtgaccagcctgagcgccttccccttcagcaagcccgacctgatcttccagctggagcagggcgaggccgcctggggccccgacccctggaccctggccggcggcgaggccctgaggggcatgggcggcccaagcagcggcgcccctcctcccagcggcggcagcccagccggctccccaacctctaccgaggagggcacctctgagtccgccacccccgagagcggccctggcacctccaccgagcccagcgagggcagcgcacccggcagccctgccggcagccccacctccacagaggagggaaccagcaccgagcccagcgaaggcagcgccccaggcaccagcaccgagcctagtgagcaggagattaaacggatcaacaagatcagaagaagacttgtgaaagacagcaacaccaagaaggccggcaagacaggccccatgaaaaccctgctggttagagtgatgacacccgatctgagagagcggctggaaaacctgagaaagaagcctgaaaatatcccccagcccatcagcaatacatctagagccaacctgaataagctgctgaccgattacaccgaaatgaagaaggcgatcctgcatgtgtactgggaagagttccagaaggaccctgtgggcctgatgagccgggtggcccagcctgccagcaagaagatcgatcagaacaagctgaaacctgagatggacgagaagggcaacctgaccaccgccggctttgcctgctctcagtgtggccagcccctgttcgtgtacaagctggagcaggtgtctgagaagggcaaggcttacaccaactacttcggacggtgcaatgtggccgagcacgaaaagctgatcctgctggcccagctgaagcccgagaaggatagcgacgaagccgtgacatatagcctgggaaagtttgggcagagggccctggatttctacagcattcatgtgaccaaggagtccacccaccccgtgaagcccctggcccagatcgccggaaacagatacgcctccggacctgtgggaaaggccctgagcgacgcatgtatgggcacaatcgcctccttcctgtctaagtaccaggacatcatcatcgaacaccagaaggtggtgaagggcaaccagaagagactggagagcctgcgggagctggccggcaaggaaaacctggaataccctagcgtgaccctgccacctcagcctcacaccaaggagggcgttgatgcctacaacgaagtgatcgcccgggtgcgaatgtgggtgaacctgaacctgtggcagaagctgaagctaagcagagatgatgccaagcctctgctgagactgaagggattcccttcctttcctctggtcgagagacaggccaacgaagtggactggtgggacatggtgtgtaacgtgaagaagctgatcaacgagaaaaaggaggatggcaaggtgttttggcagaatctggctggctacaagagacaggaagccctgagaccatacctgagcagcgaggaagatcggaagaagggaaagaaattcgctcggtaccagctgggcgacctgctgctgcacctggaaaagaagcacggcgaggactggggaaaggtgtacgacgaggcctgggagcggattgacaagaaagtggaaggcctgagcaagcacatcaagctggaagaggaacggagaagcgaggacgcccagagcaaggccgccctgaccgactggctgcgggctaaggccagcttcgtgatcgagggcctgaaggaggccgacaaggacgagttctgcagatgcgagctgaagctgcagaagtggtacggggacctgcggggaaagcccttcgccatcgaagccgagaacagcatcctggacatcagcggcttcagcaagcagtacaactgtgccttcatctggcagaaggacggcgtgaagaagctgaacctgtacctgatcatcaactacttcaagggcggcaagctgcggttcaagaagatcaaacctgaagccttcgaagccaacagattctacaccgtgatcaacaaaaagagcggcgagatcgtgcccatggaggtgaacttcaacttcgacgaccccaacctgatcatcctgcctctggcctttggcaagagacagggcagagaattcatctggaacgacctgctgtccctggaaaccggcagcctgaagctggccaacggaagagtgatcgagaagacactgtacaacagaagaacccggcaggatgagcctgccctgttcgtggccctgaccttcgagcggcgggaggtcctggactcctccaatatcaaaccaatgaacctgatcggcgtggcaagaggcgaaaacatccccgccgtgatcgccctgaccgaccccgagggctgcccactgagccggtttaaggatagcctgggaaacccaacccacatcctgagaatcggcgagagctataaggagaagcagcggaccatccaggccaagaaggaggtggagcagcggagagccggcggctacagccggaagtacgccagcaaagccaagaatctggcagacgatatggtgagaaacaccgctagagatctgctgtactacgccgtgacccaggatgccatgctgatcttcgccaacctgagccggggcttcggccggcagggcaagcggaccttcatggccgagagacagtacacacggatggaggactggctgaccgccaagctggcctacgagggcctgagcaagacctacctgtccaagacactggcccagtacacctccaagacatgcagcaactgtgggtttaccatcaccagcgccgactacgacagggtgctggagaagctgaagaagacagcaacaggctggatgaccacaattaacggcaaggagctgaaggtggagggccagattacctactacaacagatacaagagacagaacgtagtcaaggacctgtccgtcgagctggatagactgagcgaagaatctgtgaacaacgacatctcctcctggacaaagggcagaagcggagaagctctgagcctcctgaagaaaagattctcccatagacccgtgcaggagaagttcgtgtgcctgaactgcggcttcgagacacacgcagccgagcaagccgccctgaacatcgccagatcctggctgttcctgcggagccaggagtacaagaaataccagacaaacaagacaaccggcaacaccgataagagagccttcgtcgagacctggcagtccttttaccggaagaagcttaaggaggtgtggaaacctgccgtgcggtctggcggatctggcggaggctccaccagccccaagaaaaagagaaaagtctaagctgccttctgcggggcttgccttctggccatgcccttcttctctcccttgcacctgtacctcttggtctttgaataaagcctgagtaggaaggctagcaaaaaaaaaaaaaaaaaaaaaaaaaaaaaaaaaaaaaaaaaaaaaaaaaaaaaaaaaaaaaaaaaaaaaaaaaaaaaaaa

SEQ ID NO: 12226 - RNA, 5785 nt, synthetic construct
  source 1..5785: mol_type = other RNA
aggaaataagagagaaaagaagagtaagaagaaatataagagccaccatggcccctaagaagaagcgtaaagtgagccggatggaacgcctcgtctacgaggtgcggcagaagtgcagaaacatcgaggacatctgcatctcctgcggatctctgaacgtgaccctggagcacccactgttcatcggcggcatgtgccagaactgtaaaaactgttttctggagtgtgcctatcaatacgacgatgacggctaccagagctactgcaccatctgttgcggcggaagagaggtgctgatgtgtggaaataacaactgctgccggtgcttctgcgtggaatgcgtggacctgctggtgggccccggcgccgcccaggccgctattaaggaagatccttggaactgctacatgtgcggccacaagggcacatacggcctgctgagacggagagaggactggcctagcagactgcagatgttcttcgccaataaccacgaccaggagttcgacccccctaaggtgtaccctcccgtccccgccgagaagagaaagcccatccgggtcctgagcctgttcgatggcatcgccaccggtctgctggtgctgaaggacctgggcatccaggtggataggtacattgcctccgaggtgtgcgaggactccatcaccgtgggaatggtgcgtcatcagggcaagatcatgtacgtgggcgacgtgcggagcgtgacacagaagcatatccaggagtggggccctttcgacctggtgatcggcggcagcccttgcaatgacctgagcatcgtgaacccagcccggaagggcctgtacgagggaaccggcagactgttcttcgagttttacagactgctgcacgacgcccggcctaaggaaggcgacgaccggcccttcttttggctgttcgagaatgtggtggccatgggagtcagcgacaagcgggatattagccggttcctggagagcaaccccgtgatgatcgatgccaaggaagtgagcgccgcccaccgggccagatacttctggggcaatctgcctggcatgaacagacccctggccagcaccgtgaacgacaagctggagctgcaggagtgcctggagcacggccggatcgccaagttcagcaaggtgagaaccatcaccacccgaagcaacagcatcaaacaaggcaaggaccagcactttcctgtgttcatgaacgagaaggaggacatcctgtggtgtaccgagatggagagagtgttcgggttcccagtccactacacagatgtcagcaacatgtctagactggccagacagagactgctgggaagaagctggtccgtccctgtgatcagacacctgttcgcccctctgaaggagtacttcgcctgcgtgagcagcggcaacagcaacgccaacagccggggccccagcttctctagcggcctggtgccactgtccctgagagggagccacatgggccccatggagatctacaaaaccgtgagcgcctggaagcggcagcctgtgcgcgtgctgagcctgtttcggaatatcgataaagtcctgaaaagcctgggattcctggagagcggctctggctccggcggtggcaccctgaagtacgtggaggatgtgacaaacgtggtcagacgggatgtggagaagtggggccccttcgatctggtgtacggcagcacccaacccctgggcagctcttgtgaccggtgccctggctggtacatgtttcagttccaccggatcctgcagtacgccctgccgagacaggagtcccagcggccattcttttggattttcatggacaacttgctgctgaccgaggatgaccaggaaactaccactcggttcctgcagaccgaagccgtgaccctgcaggacgtgagaggccgggactaccagaacgccatgcgggtgtggtccaacatccctggactgaaaagcaagcacgcacctctgacccctaaagaagaggagtacctgcaggcccaggtgcggagcagaagcaagctggacgcccctaaggtggatctgctggtgaagaattgcctcctgcccctgagagagtacttcaagtatttcagccagaatagtctgcccctgggaggcagcggcggcggccagccccagggcaccatgaccttcaaggacgtggaggtgaccttcagccaggacgagtggggcctgctggacgccagccagaggaacctgtacagggacgtgatgctggagaactacggcaacatggccagcgtggtgggccccttcaccaagcccgccctgatcagctggctggaggccagggagccctggggcctgaacgtgcagggcgtgcagctgaagggcaaccccggcgccgcccccggcggcccaagcagcggcgcccctcctcccagcggcggcagcccagccggctccccaacctctaccgaggagggcacctctgagtccgccacccccgagagcggccctggcacctccaccgagcccagcgagggcagcgcacccggcagccctgccggcagccccacctccacagaggagggaaccagcaccgagcccagcgaaggcagcgccccaggcaccagcaccgagcctagtgagcaggagattaaacggatcaacaagatcagaagaagacttgtgaaagacagcaacaccaagaaggccggcaagacaggccccatgaaaaccctgctggttagagtgatgacacccgatctgagagagcggctggaaaacctgagaaagaagcctgaaaatatcccccagcccatcagcaatacatctagagccaacctgaataagctgctgaccgattacaccgaaatgaagaaggcgatcctgcatgtgtactgggaagagttccagaaggaccctgtgggcctgatgagccgggtggcccagcctgccagcaagaagatcgatcagaacaagctgaaacctgagatggacgagaagggcaacctgaccaccgccggctttgcctgctctcagtgtggccagcccctgttcgtgtacaagctggagcaggtgtctgagaagggcaaggcttacaccaactacttcggacggtgcaatgtggccgagcacgaaaagctgatcctgctggcccagctgaagcccgagaaggatagcgacgaagccgtgacatatagcctgggaaagtttgggcagagggccctggatttctacagcattcatgtgaccaaggagtccacccaccccgtgaagcccctggcccagatcgccggaaacagatacgcctccggacctgtgggaaaggccctgagcgacgcatgtatgggcacaatcgcctccttcctgtctaagtaccaggacatcatcatcgaacaccagaaggtggtgaagggcaaccagaagagactggagagcctgcgggagctggccggcaaggaaaacctggaataccctagcgtgaccctgccacctcagcctcacaccaaggagggcgttgatgcctacaacgaagtgatcgcccgggtgcgaatgtgggtgaacctgaacctgtggcagaagctgaagctaagcagagatgatgccaagcctctgctgagactgaagggattcccttcctttcctctggtcgagagacaggccaacgaagtggactggtgggacatggtgtgtaacgtgaagaagctgatcaacgagaaaaaggaggatggcaaggtgttttggcagaatctggctggctacaagagacaggaagccctgagaccatacctgagcagcgaggaagatcggaagaagggaaagaaattcgctcggtaccagctgggcgacctgctgctgcacctggaaaagaagcacggcgaggactggggaaaggtgtacgacgaggcctgggagcggattgacaagaaagtggaaggcctgagcaagcacatcaagctggaagaggaacggagaagcgaggacgcccagagcaaggccgccctgaccgactggctgcgggctaaggccagcttcgtgatcgagggcctgaaggaggccgacaaggacgagttctgcagatgcgagctgaagctgcagaagtggtacggggacctgcggggaaagcccttcgccatcgaagccgagaacagcatcctggacatcagcggcttcagcaagcagtacaactgtgccttcatctggcagaaggacggcgtgaagaagctgaacctgtacctgatcatcaactacttcaagggcggcaagctgcggttcaagaagatcaaacctgaagccttcgaagccaacagattctacaccgtgatcaacaaaaagagcggcgagatcgtgcccatggaggtgaacttcaacttcgacgaccccaacctgatcatcctgcctctggcctttggcaagagacagggcagagaattcatctggaacgacctgctgtccctggaaaccggcagcctgaagctggccaacggaagagtgatcgagaagacactgtacaacagaagaacccggcaggatgagcctgccctgttcgtggccctgaccttcgagcggcgggaggtcctggactcctccaatatcaaaccaatgaacctgatcggcgtggcaagaggcgaaaacatccccgccgtgatcgccctgaccgaccccgagggctgcccactgagccggtttaaggatagcctgggaaacccaacccacatcctgagaatcggcgagagctataaggagaagcagcggaccatccaggccaagaaggaggtggagcagcggagagccggcggctacagccggaagtacgccagcaaagccaagaatctggcagacgatatggtgagaaacaccgctagagatctgctgtactacgccgtgacccaggatgccatgctgatcttcgccaacctgagccggggcttcggccggcagggcaagcggaccttcatggccgagagacagtacacacggatggaggactggctgaccgccaagctggcctacgagggcctgagcaagacctacctgtccaagacactggcccagtacacctccaagacatgcagcaactgtgggtttaccatcaccagcgccgactacgacagggtgctggagaagctgaagaagacagcaacaggctggatgaccacaattaacggcaaggagctgaaggtggagggccagattacctactacaacagatacaagagacagaacgtagtcaaggacctgtccgtcgagctggatagactgagcgaagaatctgtgaacaacgacatctcctcctggacaaagggcagaagcggagaagctctgagcctcctgaagaaaagattctcccatagacccgtgcaggagaagttcgtgtgcctgaactgcggcttcgagacacacgcagccgagcaagccgccctgaacatcgccagatcctggctgttcctgcggagccaggagtacaagaaataccagacaaacaagacaaccggcaacaccgataagagagccttcgtcgagacctggcagtccttttaccggaagaagcttaaggaggtgtggaaacctgccgtgcggtctggcggatctggcggaggctccaccagccccaagaaaaagagaaaagtctaagctgccttctgcggggcttgccttctggccatgcccttcttctctcccttgcacctgtacctcttggtctttgaataaagcctgagtaggaaggctagcaaaaaaaaaaaaaaaaaaaaaaaaaaaaaaaaaaaaaaaaaaaaaaaaaaaaaaaaaaaaaaaaaaaaaaaaaaaaaaaa

SEQ ID NO: 12227 - RNA, 5785 nt, synthetic construct
  source 1..5785: mol_type = other RNA
aggaaataagagagaaaagaagagtaagaagaaatataagagccaccatggcccctaagaagaagcgtaaagtgagccggatggaacgcctcgtctacgaggtgcggcagaagtgcagaaacatcgaggacatctgcatctcctgcggatctctgaacgtgaccctggagcacccactgttcatcggcggcatgtgccagaactgtaaaaactgttttctggagtgtgcctatcaatacgacgatgacggctaccagagctactgcaccatctgttgcggcggaagagaggtgctgatgtgtggaaataacaactgctgccggtgcttctgcgtggaatgcgtggacctgctggtgggccccggcgccgcccaggccgctattaaggaagatccttggaactgctacatgtgcggccacaagggcacatacggcctgctgagacggagagaggactggcctagcagactgcagatgttcttcgccaataaccacgaccaggagttcgacccccctaaggtgtaccctcccgtccccgccgagaagagaaagcccatccgggtcctgagcctgttcgatggcatcgccaccggtctgctggtgctgaaggacctgggcatccaggtggataggtacattgcctccgaggtgtgcgaggactccatcaccgtgggaatggtgcgtcatcagggcaagatcatgtacgtgggcgacgtgcggagcgtgacacagaagcatatccaggagtggggccctttcgacctggtgatcggcggcagcccttgcaatgacctgagcatcgtgaacccagcccggaagggcctgtacgagggaaccggcagactgttcttcgagttttacagactgctgcacgacgcccggcctaaggaaggcgacgaccggcccttcttttggctgttcgagaatgtggtggccatgggagtcagcgacaagcgggatattagccggttcctggagagcaaccccgtgatgatcgatgccaaggaagtgagcgccgcccaccgggccagatacttctggggcaatctgcctggcatgaacagacccctggccagcaccgtgaacgacaagctggagctgcaggagtgcctggagcacggccggatcgccaagttcagcaaggtgagaaccatcaccacccgaagcaacagcatcaaacaaggcaaggaccagcactttcctgtgttcatgaacgagaaggaggacatcctgtggtgtaccgagatggagagagtgttcgggttcccagtccactacacagatgtcagcaacatgtctagactggccagacagagactgctgggaagaagctggtccgtccctgtgatcagacacctgttcgcccctctgaaggagtacttcgcctgcgtgagcagcggcaacagcaacgccaacagccggggccccagcttctctagcggcctggtgccactgtccctgagagggagccacatgggccccatggagatctacaaaaccgtgagcgcctggaagcggcagcctgtgcgcgtgctgagcctgtttcggaatatcgataaagtcctgaaaagcctgggattcctggagagcggctctggctccggcggtggcaccctgaagtacgtggaggatgtgacaaacgtggtcagacgggatgtggagaagtggggccccttcgatctggtgtacggcagcacccaacccctgggcagctcttgtgaccggtgccctggctggtacatgtttcagttccaccggatcctgcagtacgccctgccgagacaggagtcccagcggccattcttttggattttcatggacaacttgctgctgaccgaggatgaccaggaaactaccactcggttcctgcagaccgaagccgtgaccctgcaggacgtgagaggccgggactaccagaacgccatgcgggtgtggtccaacatccctggactgaaaagcaagcacgcacctctgacccctaaagaagaggagtacctgcaggcccaggtgcggagcagaagcaagctggacgcccctaaggtggatctgctggtgaagaattgcctcctgcccctgagagagtacttcaagtatttcagccagaatagtctgcccctgggaggcagcggcggcggcagccagggcaggctgaggttccaggacgtggccatcgacttcaccctggaggagtgggagtgcctggacctgggccagagggagctgtacagggacgtgatgctggagaactacggcaacctggccagcctgggcctgatcgtgtgcaagcccgacctggtgaccttcctggagaagatgagggacccccaggacgtgaggggcatcgagaccaccgccatccaccccgacctggccagcttcggcggcccaagcagcggcgcccctcctcccagcggcggcagcccagccggctccccaacctctaccgaggagggcacctctgagtccgccacccccgagagcggccctggcacctccaccgagcccagcgagggcagcgcacccggcagccctgccggcagccccacctccacagaggagggaaccagcaccgagcccagcgaaggcagcgccccaggcaccagcaccgagcctagtgagcaggagattaaacggatcaacaagatcagaagaagacttgtgaaagacagcaacaccaagaaggccggcaagacaggccccatgaaaaccctgctggttagagtgatgacacccgatctgagagagcggctggaaaacctgagaaagaagcctgaaaatatcccccagcccatcagcaatacatctagagccaacctgaataagctgctgaccgattacaccgaaatgaagaaggcgatcctgcatgtgtactgggaagagttccagaaggaccctgtgggcctgatgagccgggtggcccagcctgccagcaagaagatcgatcagaacaagctgaaacctgagatggacgagaagggcaacctgaccaccgccggctttgcctgctctcagtgtggccagcccctgttcgtgtacaagctggagcaggtgtctgagaagggcaaggcttacaccaactacttcggacggtgcaatgtggccgagcacgaaaagctgatcctgctggcccagctgaagcccgagaaggatagcgacgaagccgtgacatatagcctgggaaagtttgggcagagggccctggatttctacagcattcatgtgaccaaggagtccacccaccccgtgaagcccctggcccagatcgccggaaacagatacgcctccggacctgtgggaaaggccctgagcgacgcatgtatgggcacaatcgcctccttcctgtctaagtaccaggacatcatcatcgaacaccagaaggtggtgaagggcaaccagaagagactggagagcctgcgggagctggccggcaaggaaaacctggaataccctagcgtgaccctgccacctcagcctcacaccaaggagggcgttgatgcctacaacgaagtgatcgcccgggtgcgaatgtgggtgaacctgaacctgtggcagaagctgaagctaagcagagatgatgccaagcctctgctgagactgaagggattcccttcctttcctctggtcgagagacaggccaacgaagtggactggtgggacatggtgtgtaacgtgaagaagctgatcaacgagaaaaaggaggatggcaaggtgttttggcagaatctggctggctacaagagacaggaagccctgagaccatacctgagcagcgaggaagatcggaagaagggaaagaaattcgctcggtaccagctgggcgacctgctgctgcacctggaaaagaagcacggcgaggactggggaaaggtgtacgacgaggcctgggagcggattgacaagaaagtggaaggcctgagcaagcacatcaagctggaagaggaacggagaagcgaggacgcccagagcaaggccgccctgaccgactggctgcgggctaaggccagcttcgtgatcgagggcctgaaggaggccgacaaggacgagttctgcagatgcgagctgaagctgcagaagtggtacggggacctgcggggaaagcccttcgccatcgaagccgagaacagcatcctggacatcagcggcttcagcaagcagtacaactgtgccttcatctggcagaaggacggcgtgaagaagctgaacctgtacctgatcatcaactacttcaagggcggcaagctgcggttcaagaagatcaaacctgaagccttcgaagccaacagattctacaccgtgatcaacaaaaagagcggcgagatcgtgcccatggaggtgaacttcaacttcgacgaccccaacctgatcatcctgcctctggcctttggcaagagacagggcagagaattcatctggaacgacctgctgtccctggaaaccggcagcctgaagctggccaacggaagagtgatcgagaagacactgtacaacagaagaacccggcaggatgagcctgccctgttcgtggccctgaccttcgagcggcgggaggtcctggactcctccaatatcaaaccaatgaacctgatcggcgtggcaagaggcgaaaacatccccgccgtgatcgccctgaccgaccccgagggctgcccactgagccggtttaaggatagcctgggaaacccaacccacatcctgagaatcggcgagagctataaggagaagcagcggaccatccaggccaagaaggaggtggagcagcggagagccggcggctacagccggaagtacgccagcaaagccaagaatctggcagacgatatggtgagaaacaccgctagagatctgctgtactacgccgtgacccaggatgccatgctgatcttcgccaacctgagccggggcttcggccggcagggcaagcggaccttcatggccgagagacagtacacacggatggaggactggctgaccgccaagctggcctacgagggcctgagcaagacctacctgtccaagacactggcccagtacacctccaagacatgcagcaactgtgggtttaccatcaccagcgccgactacgacagggtgctggagaagctgaagaagacagcaacaggctggatgaccacaattaacggcaaggagctgaaggtggagggccagattacctactacaacagatacaagagacagaacgtagtcaaggacctgtccgtcgagctggatagactgagcgaagaatctgtgaacaacgacatctcctcctggacaaagggcagaagcggagaagctctgagcctcctgaagaaaagattctcccatagacccgtgcaggagaagttcgtgtgcctgaactgcggcttcgagacacacgcagccgagcaagccgccctgaacatcgccagatcctggctgttcctgcggagccaggagtacaagaaataccagacaaacaagacaaccggcaacaccgataagagagccttcgtcgagacctggcagtccttttaccggaagaagcttaaggaggtgtggaaacctgccgtgcggtctggcggatctggcggaggctccaccagccccaagaaaaagagaaaagtctaagctgccttctgcggggcttgccttctggccatgcccttcttctctcccttgcacctgtacctcttggtctttgaataaagcctgagtaggaaggctagcaaaaaaaaaaaaaaaaaaaaaaaaaaaaaaaaaaaaaaaaaaaaaaaaaaaaaaaaaaaaaaaaaaaaaaaaaaaaaaaa

SEQ ID NO: 12228 - RNA, 5785 nt, synthetic construct
  source 1..5785: mol_type = other RNA
aggaaataagagagaaaagaagagtaagaagaaatataagagccaccatggcccctaagaagaagcgtaaagtgagccggatggaacgcctcgtctacgaggtgcggcagaagtgcagaaacatcgaggacatctgcatctcctgcggatctctgaacgtgaccctggagcacccactgttcatcggcggcatgtgccagaactgtaaaaactgttttctggagtgtgcctatcaatacgacgatgacggctaccagagctactgcaccatctgttgcggcggaagagaggtgctgatgtgtggaaataacaactgctgccggtgcttctgcgtggaatgcgtggacctgctggtgggccccggcgccgcccaggccgctattaaggaagatccttggaactgctacatgtgcggccacaagggcacatacggcctgctgagacggagagaggactggcctagcagactgcagatgttcttcgccaataaccacgaccaggagttcgacccccctaaggtgtaccctcccgtccccgccgagaagagaaagcccatccgggtcctgagcctgttcgatggcatcgccaccggtctgctggtgctgaaggacctgggcatccaggtggataggtacattgcctccgaggtgtgcgaggactccatcaccgtgggaatggtgcgtcatcagggcaagatcatgtacgtgggcgacgtgcggagcgtgacacagaagcatatccaggagtggggccctttcgacctggtgatcggcggcagcccttgcaatgacctgagcatcgtgaacccagcccggaagggcctgtacgagggaaccggcagactgttcttcgagttttacagactgctgcacgacgcccggcctaaggaaggcgacgaccggcccttcttttggctgttcgagaatgtggtggccatgggagtcagcgacaagcgggatattagccggttcctggagagcaaccccgtgatgatcgatgccaaggaagtgagcgccgcccaccgggccagatacttctggggcaatctgcctggcatgaacagacccctggccagcaccgtgaacgacaagctggagctgcaggagtgcctggagcacggccggatcgccaagttcagcaaggtgagaaccatcaccacccgaagcaacagcatcaaacaaggcaaggaccagcactttcctgtgttcatgaacgagaaggaggacatcctgtggtgtaccgagatggagagagtgttcgggttcccagtccactacacagatgtcagcaacatgtctagactggccagacagagactgctgggaagaagctggtccgtccctgtgatcagacacctgttcgcccctctgaaggagtacttcgcctgcgtgagcagcggcaacagcaacgccaacagccggggccccagcttctctagcggcctggtgccactgtccctgagagggagccacatgggccccatggagatctacaaaaccgtgagcgcctggaagcggcagcctgtgcgcgtgctgagcctgtttcggaatatcgataaagtcctgaaaagcctgggattcctggagagcggctctggctccggcggtggcaccctgaagtacgtggaggatgtgacaaacgtggtcagacgggatgtggagaagtggggccccttcgatctggtgtacggcagcacccaacccctgggcagctcttgtgaccggtgccctggctggtacatgtttcagttccaccggatcctgcagtacgccctgccgagacaggagtcccagcggccattcttttggattttcatggacaacttgctgctgaccgaggatgaccaggaaactaccactcggttcctgcagaccgaagccgtgaccctgcaggacgtgagaggccgggactaccagaacgccatgcgggtgtggtccaacatccctggactgaaaagcaagcacgcacctctgacccctaaagaagaggagtacctgcaggcccaggtgcggagcagaagcaagctggacgcccctaaggtggatctgctggtgaagaattgcctcctgcccctgagagagtacttcaagtatttcagccagaatagtctgcccctgggaggcagcggcggcggcgcccaggaccccgtgaccttcgacgacatcagcgtgtacttcagcagggacgagtgggccctgctggacgccggccagaagcagctgtacagggaggtgatggccgagaactacagggccctggtgagcgtgggctacgtgatggaggagcccggcctggtgagccacatcgagcacgagcagcagggcagccccatcaggagcaggagcagcctgcacgccggcaggcactgcggcttcatcggcggcccaagcagcggcgcccctcctcccagcggcggcagcccagccggctccccaacctctaccgaggagggcacctctgagtccgccacccccgagagcggccctggcacctccaccgagcccagcgagggcagcgcacccggcagccctgccggcagccccacctccacagaggagggaaccagcaccgagcccagcgaaggcagcgccccaggcaccagcaccgagcctagtgagcaggagattaaacggatcaacaagatcagaagaagacttgtgaaagacagcaacaccaagaaggccggcaagacaggccccatgaaaaccctgctggttagagtgatgacacccgatctgagagagcggctggaaaacctgagaaagaagcctgaaaatatcccccagcccatcagcaatacatctagagccaacctgaataagctgctgaccgattacaccgaaatgaagaaggcgatcctgcatgtgtactgggaagagttccagaaggaccctgtgggcctgatgagccgggtggcccagcctgccagcaagaagatcgatcagaacaagctgaaacctgagatggacgagaagggcaacctgaccaccgccggctttgcctgctctcagtgtggccagcccctgttcgtgtacaagctggagcaggtgtctgagaagggcaaggcttacaccaactacttcggacggtgcaatgtggccgagcacgaaaagctgatcctgctggcccagctgaagcccgagaaggatagcgacgaagccgtgacatatagcctgggaaagtttgggcagagggccctggatttctacagcattcatgtgaccaaggagtccacccaccccgtgaagcccctggcccagatcgccggaaacagatacgcctccggacctgtgggaaaggccctgagcgacgcatgtatgggcacaatcgcctccttcctgtctaagtaccaggacatcatcatcgaacaccagaaggtggtgaagggcaaccagaagagactggagagcctgcgggagctggccggcaaggaaaacctggaataccctagcgtgaccctgccacctcagcctcacaccaaggagggcgttgatgcctacaacgaagtgatcgcccgggtgcgaatgtgggtgaacctgaacctgtggcagaagctgaagctaagcagagatgatgccaagcctctgctgagactgaagggattcccttcctttcctctggtcgagagacaggccaacgaagtggactggtgggacatggtgtgtaacgtgaagaagctgatcaacgagaaaaaggaggatggcaaggtgttttggcagaatctggctggctacaagagacaggaagccctgagaccatacctgagcagcgaggaagatcggaagaagggaaagaaattcgctcggtaccagctgggcgacctgctgctgcacctggaaaagaagcacggcgaggactggggaaaggtgtacgacgaggcctgggagcggattgacaagaaagtggaaggcctgagcaagcacatcaagctggaagaggaacggagaagcgaggacgcccagagcaaggccgccctgaccgactggctgcgggctaaggccagcttcgtgatcgagggcctgaaggaggccgacaaggacgagttctgcagatgcgagctgaagctgcagaagtggtacggggacctgcggggaaagcccttcgccatcgaagccgagaacagcatcctggacatcagcggcttcagcaagcagtacaactgtgccttcatctggcagaaggacggcgtgaagaagctgaacctgtacctgatcatcaactacttcaagggcggcaagctgcggttcaagaagatcaaacctgaagccttcgaagccaacagattctacaccgtgatcaacaaaaagagcggcgagatcgtgcccatggaggtgaacttcaacttcgacgaccccaacctgatcatcctgcctctggcctttggcaagagacagggcagagaattcatctggaacgacctgctgtccctggaaaccggcagcctgaagctggccaacggaagagtgatcgagaagacactgtacaacagaagaacccggcaggatgagcctgccctgttcgtggccctgaccttcgagcggcgggaggtcctggactcctccaatatcaaaccaatgaacctgatcggcgtggcaagaggcgaaaacatccccgccgtgatcgccctgaccgaccccgagggctgcccactgagccggtttaaggatagcctgggaaacccaacccacatcctgagaatcggcgagagctataaggagaagcagcggaccatccaggccaagaaggaggtggagcagcggagagccggcggctacagccggaagtacgccagcaaagccaagaatctggcagacgatatggtgagaaacaccgctagagatctgctgtactacgccgtgacccaggatgccatgctgatcttcgccaacctgagccggggcttcggccggcagggcaagcggaccttcatggccgagagacagtacacacggatggaggactggctgaccgccaagctggcctacgagggcctgagcaagacctacctgtccaagacactggcccagtacacctccaagacatgcagcaactgtgggtttaccatcaccagcgccgactacgacagggtgctggagaagctgaagaagacagcaacaggctggatgaccacaattaacggcaaggagctgaaggtggagggccagattacctactacaacagatacaagagacagaacgtagtcaaggacctgtccgtcgagctggatagactgagcgaagaatctgtgaacaacgacatctcctcctggacaaagggcagaagcggagaagctctgagcctcctgaagaaaagattctcccatagacccgtgcaggagaagttcgtgtgcctgaactgcggcttcgagacacacgcagccgagcaagccgccctgaacatcgccagatcctggctgttcctgcggagccaggagtacaagaaataccagacaaacaagacaaccggcaacaccgataagagagccttcgtcgagacctggcagtccttttaccggaagaagcttaaggaggtgtggaaacctgccgtgcggtctggcggatctggcggaggctccaccagccccaagaaaaagagaaaagtctaagctgccttctgcggggcttgccttctggccatgcccttcttctctcccttgcacctgtacctcttggtctttgaataaagcctgagtaggaaggctagcaaaaaaaaaaaaaaaaaaaaaaaaaaaaaaaaaaaaaaaaaaaaaaaaaaaaaaaaaaaaaaaaaaaaaaaaaaaaaaaa

SEQ ID NO: 12229 - RNA, 5785 nt, synthetic construct
  source 1..5785: mol_type = other RNA
aggaaataagagagaaaagaagagtaagaagaaatataagagccaccatggcccctaagaagaagcgtaaagtgagccggatggaacgcctcgtctacgaggtgcggcagaagtgcagaaacatcgaggacatctgcatctcctgcggatctctgaacgtgaccctggagcacccactgttcatcggcggcatgtgccagaactgtaaaaactgttttctggagtgtgcctatcaatacgacgatgacggctaccagagctactgcaccatctgttgcggcggaagagaggtgctgatgtgtggaaataacaactgctgccggtgcttctgcgtggaatgcgtggacctgctggtgggccccggcgccgcccaggccgctattaaggaagatccttggaactgctacatgtgcggccacaagggcacatacggcctgctgagacggagagaggactggcctagcagactgcagatgttcttcgccaataaccacgaccaggagttcgacccccctaaggtgtaccctcccgtccccgccgagaagagaaagcccatccgggtcctgagcctgttcgatggcatcgccaccggtctgctggtgctgaaggacctgggcatccaggtggataggtacattgcctccgaggtgtgcgaggactccatcaccgtgggaatggtgcgtcatcagggcaagatcatgtacgtgggcgacgtgcggagcgtgacacagaagcatatccaggagtggggccctttcgacctggtgatcggcggcagcccttgcaatgacctgagcatcgtgaacccagcccggaagggcctgtacgagggaaccggcagactgttcttcgagttttacagactgctgcacgacgcccggcctaaggaaggcgacgaccggcccttcttttggctgttcgagaatgtggtggccatgggagtcagcgacaagcgggatattagccggttcctggagagcaaccccgtgatgatcgatgccaaggaagtgagcgccgcccaccgggccagatacttctggggcaatctgcctggcatgaacagacccctggccagcaccgtgaacgacaagctggagctgcaggagtgcctggagcacggccggatcgccaagttcagcaaggtgagaaccatcaccacccgaagcaacagcatcaaacaaggcaaggaccagcactttcctgtgttcatgaacgagaaggaggacatcctgtggtgtaccgagatggagagagtgttcgggttcccagtccactacacagatgtcagcaacatgtctagactggccagacagagactgctgggaagaagctggtccgtccctgtgatcagacacctgttcgcccctctgaaggagtacttcgcctgcgtgagcagcggcaacagcaacgccaacagccggggccccagcttctctagcggcctggtgccactgtccctgagagggagccacatgggccccatggagatctacaaaaccgtgagcgcctggaagcggcagcctgtgcgcgtgctgagcctgtttcggaatatcgataaagtcctgaaaagcctgggattcctggagagcggctctggctccggcggtggcaccctgaagtacgtggaggatgtgacaaacgtggtcagacgggatgtggagaagtggggccccttcgatctggtgtacggcagcacccaacccctgggcagctcttgtgaccggtgccctggctggtacatgtttcagttccaccggatcctgcagtacgccctgccgagacaggagtcccagcggccattcttttggattttcatggacaacttgctgctgaccgaggatgaccaggaaactaccactcggttcctgcagaccgaagccgtgaccctgcaggacgtgagaggccgggactaccagaacgccatgcgggtgtggtccaacatccctggactgaaaagcaagcacgcacctctgacccctaaagaagaggagtacctgcaggcccaggtgcggagcagaagcaagctggacgcccctaaggtggatctgctggtgaagaattgcctcctgcccctgagagagtacttcaagtatttcagccagaatagtctgcccctgggaggcagcggcggcggcatggccttcgaggacgtggccgtgtacttcagccaggaggagtggggcctgctggacaccgcccagagggccctgtacaggcacgtgatgctggagaacttcaccctggtgaccagcctgggcctgagcaccagcaggccccacgtggtgatccagctggagaggggcgaggagccctgggtgcccagcggcaaggacatgaccctggccaggaacacctacaggaggctgaacgccggcgagggcggcccaagcagcggcgcccctcctcccagcggcggcagcccagccggctccccaacctctaccgaggagggcacctctgagtccgccacccccgagagcggccctggcacctccaccgagcccagcgagggcagcgcacccggcagccctgccggcagccccacctccacagaggagggaaccagcaccgagcccagcgaaggcagcgccccaggcaccagcaccgagcctagtgagcaggagattaaacggatcaacaagatcagaagaagacttgtgaaagacagcaacaccaagaaggccggcaagacaggccccatgaaaaccctgctggttagagtgatgacacccgatctgagagagcggctggaaaacctgagaaagaagcctgaaaatatcccccagcccatcagcaatacatctagagccaacctgaataagctgctgaccgattacaccgaaatgaagaaggcgatcctgcatgtgtactgggaagagttccagaaggaccctgtgggcctgatgagccgggtggcccagcctgccagcaagaagatcgatcagaacaagctgaaacctgagatggacgagaagggcaacctgaccaccgccggctttgcctgctctcagtgtggccagcccctgttcgtgtacaagctggagcaggtgtctgagaagggcaaggcttacaccaactacttcggacggtgcaatgtggccgagcacgaaaagctgatcctgctggcccagctgaagcccgagaaggatagcgacgaagccgtgacatatagcctgggaaagtttgggcagagggccctggatttctacagcattcatgtgaccaaggagtccacccaccccgtgaagcccctggcccagatcgccggaaacagatacgcctccggacctgtgggaaaggccctgagcgacgcatgtatgggcacaatcgcctccttcctgtctaagtaccaggacatcatcatcgaacaccagaaggtggtgaagggcaaccagaagagactggagagcctgcgggagctggccggcaaggaaaacctggaataccctagcgtgaccctgccacctcagcctcacaccaaggagggcgttgatgcctacaacgaagtgatcgcccgggtgcgaatgtgggtgaacctgaacctgtggcagaagctgaagctaagcagagatgatgccaagcctctgctgagactgaagggattcccttcctttcctctggtcgagagacaggccaacgaagtggactggtgggacatggtgtgtaacgtgaagaagctgatcaacgagaaaaaggaggatggcaaggtgttttggcagaatctggctggctacaagagacaggaagccctgagaccatacctgagcagcgaggaagatcggaagaagggaaagaaattcgctcggtaccagctgggcgacctgctgctgcacctggaaaagaagcacggcgaggactggggaaaggtgtacgacgaggcctgggagcggattgacaagaaagtggaaggcctgagcaagcacatcaagctggaagaggaacggagaagcgaggacgcccagagcaaggccgccctgaccgactggctgcgggctaaggccagcttcgtgatcgagggcctgaaggaggccgacaaggacgagttctgcagatgcgagctgaagctgcagaagtggtacggggacctgcggggaaagcccttcgccatcgaagccgagaacagcatcctggacatcagcggcttcagcaagcagtacaactgtgccttcatctggcagaaggacggcgtgaagaagctgaacctgtacctgatcatcaactacttcaagggcggcaagctgcggttcaagaagatcaaacctgaagccttcgaagccaacagattctacaccgtgatcaacaaaaagagcggcgagatcgtgcccatggaggtgaacttcaacttcgacgaccccaacctgatcatcctgcctctggcctttggcaagagacagggcagagaattcatctggaacgacctgctgtccctggaaaccggcagcctgaagctggccaacggaagagtgatcgagaagacactgtacaacagaagaacccggcaggatgagcctgccctgttcgtggccctgaccttcgagcggcgggaggtcctggactcctccaatatcaaaccaatgaacctgatcggcgtggcaagaggcgaaaacatccccgccgtgatcgccctgaccgaccccgagggctgcccactgagccggtttaaggatagcctgggaaacccaacccacatcctgagaatcggcgagagctataaggagaagcagcggaccatccaggccaagaaggaggtggagcagcggagagccggcggctacagccggaagtacgccagcaaagccaagaatctggcagacgatatggtgagaaacaccgctagagatctgctgtactacgccgtgacccaggatgccatgctgatcttcgccaacctgagccggggcttcggccggcagggcaagcggaccttcatggccgagagacagtacacacggatggaggactggctgaccgccaagctggcctacgagggcctgagcaagacctacctgtccaagacactggcccagtacacctccaagacatgcagcaactgtgggtttaccatcaccagcgccgactacgacagggtgctggagaagctgaagaagacagcaacaggctggatgaccacaattaacggcaaggagctgaaggtggagggccagattacctactacaacagatacaagagacagaacgtagtcaaggacctgtccgtcgagctggatagactgagcgaagaatctgtgaacaacgacatctcctcctggacaaagggcagaagcggagaagctctgagcctcctgaagaaaagattctcccatagacccgtgcaggagaagttcgtgtgcctgaactgcggcttcgagacacacgcagccgagcaagccgccctgaacatcgccagatcctggctgttcctgcggagccaggagtacaagaaataccagacaaacaagacaaccggcaacaccgataagagagccttcgtcgagacctggcagtccttttaccggaagaagcttaaggaggtgtggaaacctgccgtgcggtctggcggatctggcggaggctccaccagccccaagaaaaagagaaaagtctaagctgccttctgcggggcttgccttctggccatgcccttcttctctcccttgcacctgtacctcttggtctttgaataaagcctgagtaggaaggctagcaaaaaaaaaaaaaaaaaaaaaaaaaaaaaaaaaaaaaaaaaaaaaaaaaaaaaaaaaaaaaaaaaaaaaaaaaaaaaaaa

SEQ ID NO: 12230 - RNA, 5785 nt, synthetic construct
  source 1..5785: mol_type = other RNA
aggaaataagagagaaaagaagagtaagaagaaatataagagccaccatggcccctaagaagaagcgtaaagtgagccggatggaacgcctcgtctacgaggtgcggcagaagtgcagaaacatcgaggacatctgcatctcctgcggatctctgaacgtgaccctggagcacccactgttcatcggcggcatgtgccagaactgtaaaaactgttttctggagtgtgcctatcaatacgacgatgacggctaccagagctactgcaccatctgttgcggcggaagagaggtgctgatgtgtggaaataacaactgctgccggtgcttctgcgtggaatgcgtggacctgctggtgggccccggcgccgcccaggccgctattaaggaagatccttggaactgctacatgtgcggccacaagggcacatacggcctgctgagacggagagaggactggcctagcagactgcagatgttcttcgccaataaccacgaccaggagttcgacccccctaaggtgtaccctcccgtccccgccgagaagagaaagcccatccgggtcctgagcctgttcgatggcatcgccaccggtctgctggtgctgaaggacctgggcatccaggtggataggtacattgcctccgaggtgtgcgaggactccatcaccgtgggaatggtgcgtcatcagggcaagatcatgtacgtgggcgacgtgcggagcgtgacacagaagcatatccaggagtggggccctttcgacctggtgatcggcggcagcccttgcaatgacctgagcatcgtgaacccagcccggaagggcctgtacgagggaaccggcagactgttcttcgagttttacagactgctgcacgacgcccggcctaaggaaggcgacgaccggcccttcttttggctgttcgagaatgtggtggccatgggagtcagcgacaagcgggatattagccggttcctggagagcaaccccgtgatgatcgatgccaaggaagtgagcgccgcccaccgggccagatacttctggggcaatctgcctggcatgaacagacccctggccagcaccgtgaacgacaagctggagctgcaggagtgcctggagcacggccggatcgccaagttcagcaaggtgagaaccatcaccacccgaagcaacagcatcaaacaaggcaaggaccagcactttcctgtgttcatgaacgagaaggaggacatcctgtggtgtaccgagatggagagagtgttcgggttcccagtccactacacagatgtcagcaacatgtctagactggccagacagagactgctgggaagaagctggtccgtccctgtgatcagacacctgttcgcccctctgaaggagtacttcgcctgcgtgagcagcggcaacagcaacgccaacagccggggccccagcttctctagcggcctggtgccactgtccctgagagggagccacatgggccccatggagatctacaaaaccgtgagcgcctggaagcggcagcctgtgcgcgtgctgagcctgtttcggaatatcgataaagtcctgaaaagcctgggattcctggagagcggctctggctccggcggtggcaccctgaagtacgtggaggatgtgacaaacgtggtcagacgggatgtggagaagtggggccccttcgatctggtgtacggcagcacccaacccctgggcagctcttgtgaccggtgccctggctggtacatgtttcagttccaccggatcctgcagtacgccctgccgagacaggagtcccagcggccattcttttggattttcatggacaacttgctgctgaccgaggatgaccaggaaactaccactcggttcctgcagaccgaagccgtgaccctgcaggacgtgagaggccgggactaccagaacgccatgcgggtgtggtccaacatccctggactgaaaagcaagcacgcacctctgacccctaaagaagaggagtacctgcaggcccaggtgcggagcagaagcaagctggacgcccctaaggtggatctgctggtgaagaattgcctcctgcccctgagagagtacttcaagtatttcagccagaatagtctgcccctgggaggcagcggcggcggcatggtgaccttcgaggacgtggccgtgcacttcaccaagaccgagtggaccggcctgagccccgcccagagggccctgtacaggagcgtgatgctggagaacttcggcaacctgaccgccctgggctaccccgtgcccaagcccgccctgatcagcctgctggagggcggcgacatggactggggcctggaggcccaggacgacccccccgccgagaggaccaagaacgtgtgcaaggtgatcggcggcccaagcagcggcgcccctcctcccagcggcggcagcccagccggctccccaacctctaccgaggagggcacctctgagtccgccacccccgagagcggccctggcacctccaccgagcccagcgagggcagcgcacccggcagccctgccggcagccccacctccacagaggagggaaccagcaccgagcccagcgaaggcagcgccccaggcaccagcaccgagcctagtgagcaggagattaaacggatcaacaagatcagaagaagacttgtgaaagacagcaacaccaagaaggccggcaagacaggccccatgaaaaccctgctggttagagtgatgacacccgatctgagagagcggctggaaaacctgagaaagaagcctgaaaatatcccccagcccatcagcaatacatctagagccaacctgaataagctgctgaccgattacaccgaaatgaagaaggcgatcctgcatgtgtactgggaagagttccagaaggaccctgtgggcctgatgagccgggtggcccagcctgccagcaagaagatcgatcagaacaagctgaaacctgagatggacgagaagggcaacctgaccaccgccggctttgcctgctctcagtgtggccagcccctgttcgtgtacaagctggagcaggtgtctgagaagggcaaggcttacaccaactacttcggacggtgcaatgtggccgagcacgaaaagctgatcctgctggcccagctgaagcccgagaaggatagcgacgaagccgtgacatatagcctgggaaagtttgggcagagggccctggatttctacagcattcatgtgaccaaggagtccacccaccccgtgaagcccctggcccagatcgccggaaacagatacgcctccggacctgtgggaaaggccctgagcgacgcatgtatgggcacaatcgcctccttcctgtctaagtaccaggacatcatcatcgaacaccagaaggtggtgaagggcaaccagaagagactggagagcctgcgggagctggccggcaaggaaaacctggaataccctagcgtgaccctgccacctcagcctcacaccaaggagggcgttgatgcctacaacgaagtgatcgcccgggtgcgaatgtgggtgaacctgaacctgtggcagaagctgaagctaagcagagatgatgccaagcctctgctgagactgaagggattcccttcctttcctctggtcgagagacaggccaacgaagtggactggtgggacatggtgtgtaacgtgaagaagctgatcaacgagaaaaaggaggatggcaaggtgttttggcagaatctggctggctacaagagacaggaagccctgagaccatacctgagcagcgaggaagatcggaagaagggaaagaaattcgctcggtaccagctgggcgacctgctgctgcacctggaaaagaagcacggcgaggactggggaaaggtgtacgacgaggcctgggagcggattgacaagaaagtggaaggcctgagcaagcacatcaagctggaagaggaacggagaagcgaggacgcccagagcaaggccgccctgaccgactggctgcgggctaaggccagcttcgtgatcgagggcctgaaggaggccgacaaggacgagttctgcagatgcgagctgaagctgcagaagtggtacggggacctgcggggaaagcccttcgccatcgaagccgagaacagcatcctggacatcagcggcttcagcaagcagtacaactgtgccttcatctggcagaaggacggcgtgaagaagctgaacctgtacctgatcatcaactacttcaagggcggcaagctgcggttcaagaagatcaaacctgaagccttcgaagccaacagattctacaccgtgatcaacaaaaagagcggcgagatcgtgcccatggaggtgaacttcaacttcgacgaccccaacctgatcatcctgcctctggcctttggcaagagacagggcagagaattcatctggaacgacctgctgtccctggaaaccggcagcctgaagctggccaacggaagagtgatcgagaagacactgtacaacagaagaacccggcaggatgagcctgccctgttcgtggccctgaccttcgagcggcgggaggtcctggactcctccaatatcaaaccaatgaacctgatcggcgtggcaagaggcgaaaacatccccgccgtgatcgccctgaccgaccccgagggctgcccactgagccggtttaaggatagcctgggaaacccaacccacatcctgagaatcggcgagagctataaggagaagcagcggaccatccaggccaagaaggaggtggagcagcggagagccggcggctacagccggaagtacgccagcaaagccaagaatctggcagacgatatggtgagaaacaccgctagagatctgctgtactacgccgtgacccaggatgccatgctgatcttcgccaacctgagccggggcttcggccggcagggcaagcggaccttcatggccgagagacagtacacacggatggaggactggctgaccgccaagctggcctacgagggcctgagcaagacctacctgtccaagacactggcccagtacacctccaagacatgcagcaactgtgggtttaccatcaccagcgccgactacgacagggtgctggagaagctgaagaagacagcaacaggctggatgaccacaattaacggcaaggagctgaaggtggagggccagattacctactacaacagatacaagagacagaacgtagtcaaggacctgtccgtcgagctggatagactgagcgaagaatctgtgaacaacgacatctcctcctggacaaagggcagaagcggagaagctctgagcctcctgaagaaaagattctcccatagacccgtgcaggagaagttcgtgtgcctgaactgcggcttcgagacacacgcagccgagcaagccgccctgaacatcgccagatcctggctgttcctgcggagccaggagtacaagaaataccagacaaacaagacaaccggcaacaccgataagagagccttcgtcgagacctggcagtccttttaccggaagaagcttaaggaggtgtggaaacctgccgtgcggtctggcggatctggcggaggctccaccagccccaagaaaaagagaaaagtctaagctgccttctgcggggcttgccttctggccatgcccttcttctctcccttgcacctgtacctcttggtctttgaataaagcctgagtaggaaggctagcaaaaaaaaaaaaaaaaaaaaaaaaaaaaaaaaaaaaaaaaaaaaaaaaaaaaaaaaaaaaaaaaaaaaaaaaaaaaaaaa

SEQ ID NO: 12231 - RNA, 5785 nt, synthetic construct
  source 1..5785: mol_type = other RNA
aggaaataagagagaaaagaagagtaagaagaaatataagagccaccatggcccctaagaagaagcgtaaagtgagccggatggaacgcctcgtctacgaggtgcggcagaagtgcagaaacatcgaggacatctgcatctcctgcggatctctgaacgtgaccctggagcacccactgttcatcggcggcatgtgccagaactgtaaaaactgttttctggagtgtgcctatcaatacgacgatgacggctaccagagctactgcaccatctgttgcggcggaagagaggtgctgatgtgtggaaataacaactgctgccggtgcttctgcgtggaatgcgtggacctgctggtgggccccggcgccgcccaggccgctattaaggaagatccttggaactgctacatgtgcggccacaagggcacatacggcctgctgagacggagagaggactggcctagcagactgcagatgttcttcgccaataaccacgaccaggagttcgacccccctaaggtgtaccctcccgtccccgccgagaagagaaagcccatccgggtcctgagcctgttcgatggcatcgccaccggtctgctggtgctgaaggacctgggcatccaggtggataggtacattgcctccgaggtgtgcgaggactccatcaccgtgggaatggtgcgtcatcagggcaagatcatgtacgtgggcgacgtgcggagcgtgacacagaagcatatccaggagtggggccctttcgacctggtgatcggcggcagcccttgcaatgacctgagcatcgtgaacccagcccggaagggcctgtacgagggaaccggcagactgttcttcgagttttacagactgctgcacgacgcccggcctaaggaaggcgacgaccggcccttcttttggctgttcgagaatgtggtggccatgggagtcagcgacaagcgggatattagccggttcctggagagcaaccccgtgatgatcgatgccaaggaagtgagcgccgcccaccgggccagatacttctggggcaatctgcctggcatgaacagacccctggccagcaccgtgaacgacaagctggagctgcaggagtgcctggagcacggccggatcgccaagttcagcaaggtgagaaccatcaccacccgaagcaacagcatcaaacaaggcaaggaccagcactttcctgtgttcatgaacgagaaggaggacatcctgtggtgtaccgagatggagagagtgttcgggttcccagtccactacacagatgtcagcaacatgtctagactggccagacagagactgctgggaagaagctggtccgtccctgtgatcagacacctgttcgcccctctgaaggagtacttcgcctgcgtgagcagcggcaacagcaacgccaacagccggggccccagcttctctagcggcctggtgccactgtccctgagagggagccacatgggccccatggagatctacaaaaccgtgagcgcctggaagcggcagcctgtgcgcgtgctgagcctgtttcggaatatcgataaagtcctgaaaagcctgggattcctggagagcggctctggctccggcggtggcaccctgaagtacgtggaggatgtgacaaacgtggtcagacgggatgtggagaagtggggccccttcgatctggtgtacggcagcacccaacccctgggcagctcttgtgaccggtgccctggctggtacatgtttcagttccaccggatcctgcagtacgccctgccgagacaggagtcccagcggccattcttttggattttcatggacaacttgctgctgaccgaggatgaccaggaaactaccactcggttcctgcagaccgaagccgtgaccctgcaggacgtgagaggccgggactaccagaacgccatgcgggtgtggtccaacatccctggactgaaaagcaagcacgcacctctgacccctaaagaagaggagtacctgcaggcccaggtgcggagcagaagcaagctggacgcccctaaggtggatctgctggtgaagaattgcctcctgcccctgagagagtacttcaagtatttcagccagaatagtctgcccctgggaggcagcggcggcggcatggccttcgaggacgtggccgtgtacttcagccaggaggagtggggcctgctggacaccgcccagagggccctgtacaggcacgtgatgctggacaacttcaccctggtgaccagcctgggcctgagcaccagcaggccccacgtggtgatccagctggagaggggcgaggagccctgggtgcccagcggcaaggacatgaccctggccaggaacacctacaggaggctgaacgccggcgagggcggcccaagcagcggcgcccctcctcccagcggcggcagcccagccggctccccaacctctaccgaggagggcacctctgagtccgccacccccgagagcggccctggcacctccaccgagcccagcgagggcagcgcacccggcagccctgccggcagccccacctccacagaggagggaaccagcaccgagcccagcgaaggcagcgccccaggcaccagcaccgagcctagtgagcaggagattaaacggatcaacaagatcagaagaagacttgtgaaagacagcaacaccaagaaggccggcaagacaggccccatgaaaaccctgctggttagagtgatgacacccgatctgagagagcggctggaaaacctgagaaagaagcctgaaaatatcccccagcccatcagcaatacatctagagccaacctgaataagctgctgaccgattacaccgaaatgaagaaggcgatcctgcatgtgtactgggaagagttccagaaggaccctgtgggcctgatgagccgggtggcccagcctgccagcaagaagatcgatcagaacaagctgaaacctgagatggacgagaagggcaacctgaccaccgccggctttgcctgctctcagtgtggccagcccctgttcgtgtacaagctggagcaggtgtctgagaagggcaaggcttacaccaactacttcggacggtgcaatgtggccgagcacgaaaagctgatcctgctggcccagctgaagcccgagaaggatagcgacgaagccgtgacatatagcctgggaaagtttgggcagagggccctggatttctacagcattcatgtgaccaaggagtccacccaccccgtgaagcccctggcccagatcgccggaaacagatacgcctccggacctgtgggaaaggccctgagcgacgcatgtatgggcacaatcgcctccttcctgtctaagtaccaggacatcatcatcgaacaccagaaggtggtgaagggcaaccagaagagactggagagcctgcgggagctggccggcaaggaaaacctggaataccctagcgtgaccctgccacctcagcctcacaccaaggagggcgttgatgcctacaacgaagtgatcgcccgggtgcgaatgtgggtgaacctgaacctgtggcagaagctgaagctaagcagagatgatgccaagcctctgctgagactgaagggattcccttcctttcctctggtcgagagacaggccaacgaagtggactggtgggacatggtgtgtaacgtgaagaagctgatcaacgagaaaaaggaggatggcaaggtgttttggcagaatctggctggctacaagagacaggaagccctgagaccatacctgagcagcgaggaagatcggaagaagggaaagaaattcgctcggtaccagctgggcgacctgctgctgcacctggaaaagaagcacggcgaggactggggaaaggtgtacgacgaggcctgggagcggattgacaagaaagtggaaggcctgagcaagcacatcaagctggaagaggaacggagaagcgaggacgcccagagcaaggccgccctgaccgactggctgcgggctaaggccagcttcgtgatcgagggcctgaaggaggccgacaaggacgagttctgcagatgcgagctgaagctgcagaagtggtacggggacctgcggggaaagcccttcgccatcgaagccgagaacagcatcctggacatcagcggcttcagcaagcagtacaactgtgccttcatctggcagaaggacggcgtgaagaagctgaacctgtacctgatcatcaactacttcaagggcggcaagctgcggttcaagaagatcaaacctgaagccttcgaagccaacagattctacaccgtgatcaacaaaaagagcggcgagatcgtgcccatggaggtgaacttcaacttcgacgaccccaacctgatcatcctgcctctggcctttggcaagagacagggcagagaattcatctggaacgacctgctgtccctggaaaccggcagcctgaagctggccaacggaagagtgatcgagaagacactgtacaacagaagaacccggcaggatgagcctgccctgttcgtggccctgaccttcgagcggcgggaggtcctggactcctccaatatcaaaccaatgaacctgatcggcgtggcaagaggcgaaaacatccccgccgtgatcgccctgaccgaccccgagggctgcccactgagccggtttaaggatagcctgggaaacccaacccacatcctgagaatcggcgagagctataaggagaagcagcggaccatccaggccaagaaggaggtggagcagcggagagccggcggctacagccggaagtacgccagcaaagccaagaatctggcagacgatatggtgagaaacaccgctagagatctgctgtactacgccgtgacccaggatgccatgctgatcttcgccaacctgagccggggcttcggccggcagggcaagcggaccttcatggccgagagacagtacacacggatggaggactggctgaccgccaagctggcctacgagggcctgagcaagacctacctgtccaagacactggcccagtacacctccaagacatgcagcaactgtgggtttaccatcaccagcgccgactacgacagggtgctggagaagctgaagaagacagcaacaggctggatgaccacaattaacggcaaggagctgaaggtggagggccagattacctactacaacagatacaagagacagaacgtagtcaaggacctgtccgtcgagctggatagactgagcgaagaatctgtgaacaacgacatctcctcctggacaaagggcagaagcggagaagctctgagcctcctgaagaaaagattctcccatagacccgtgcaggagaagttcgtgtgcctgaactgcggcttcgagacacacgcagccgagcaagccgccctgaacatcgccagatcctggctgttcctgcggagccaggagtacaagaaataccagacaaacaagacaaccggcaacaccgataagagagccttcgtcgagacctggcagtccttttaccggaagaagcttaaggaggtgtggaaacctgccgtgcggtctggcggatctggcggaggctccaccagccccaagaaaaagagaaaagtctaagctgccttctgcggggcttgccttctggccatgcccttcttctctcccttgcacctgtacctcttggtctttgaataaagcctgagtaggaaggctagcaaaaaaaaaaaaaaaaaaaaaaaaaaaaaaaaaaaaaaaaaaaaaaaaaaaaaaaaaaaaaaaaaaaaaaaaaaaaaaaa

SEQ ID NO: 12232 - RNA, 5785 nt, synthetic construct
  source 1..5785: mol_type = other RNA
aggaaataagagagaaaagaagagtaagaagaaatataagagccaccatggcccctaagaagaagcgtaaagtgagccggatggaacgcctcgtctacgaggtgcggcagaagtgcagaaacatcgaggacatctgcatctcctgcggatctctgaacgtgaccctggagcacccactgttcatcggcggcatgtgccagaactgtaaaaactgttttctggagtgtgcctatcaatacgacgatgacggctaccagagctactgcaccatctgttgcggcggaagagaggtgctgatgtgtggaaataacaactgctgccggtgcttctgcgtggaatgcgtggacctgctggtgggccccggcgccgcccaggccgctattaaggaagatccttggaactgctacatgtgcggccacaagggcacatacggcctgctgagacggagagaggactggcctagcagactgcagatgttcttcgccaataaccacgaccaggagttcgacccccctaaggtgtaccctcccgtccccgccgagaagagaaagcccatccgggtcctgagcctgttcgatggcatcgccaccggtctgctggtgctgaaggacctgggcatccaggtggataggtacattgcctccgaggtgtgcgaggactccatcaccgtgggaatggtgcgtcatcagggcaagatcatgtacgtgggcgacgtgcggagcgtgacacagaagcatatccaggagtggggccctttcgacctggtgatcggcggcagcccttgcaatgacctgagcatcgtgaacccagcccggaagggcctgtacgagggaaccggcagactgttcttcgagttttacagactgctgcacgacgcccggcctaaggaaggcgacgaccggcccttcttttggctgttcgagaatgtggtggccatgggagtcagcgacaagcgggatattagccggttcctggagagcaaccccgtgatgatcgatgccaaggaagtgagcgccgcccaccgggccagatacttctggggcaatctgcctggcatgaacagacccctggccagcaccgtgaacgacaagctggagctgcaggagtgcctggagcacggccggatcgccaagttcagcaaggtgagaaccatcaccacccgaagcaacagcatcaaacaaggcaaggaccagcactttcctgtgttcatgaacgagaaggaggacatcctgtggtgtaccgagatggagagagtgttcgggttcccagtccactacacagatgtcagcaacatgtctagactggccagacagagactgctgggaagaagctggtccgtccctgtgatcagacacctgttcgcccctctgaaggagtacttcgcctgcgtgagcagcggcaacagcaacgccaacagccggggccccagcttctctagcggcctggtgccactgtccctgagagggagccacatgggccccatggagatctacaaaaccgtgagcgcctggaagcggcagcctgtgcgcgtgctgagcctgtttcggaatatcgataaagtcctgaaaagcctgggattcctggagagcggctctggctccggcggtggcaccctgaagtacgtggaggatgtgacaaacgtggtcagacgggatgtggagaagtggggccccttcgatctggtgtacggcagcacccaacccctgggcagctcttgtgaccggtgccctggctggtacatgtttcagttccaccggatcctgcagtacgccctgccgagacaggagtcccagcggccattcttttggattttcatggacaacttgctgctgaccgaggatgaccaggaaactaccactcggttcctgcagaccgaagccgtgaccctgcaggacgtgagaggccgggactaccagaacgccatgcgggtgtggtccaacatccctggactgaaaagcaagcacgcacctctgacccctaaagaagaggagtacctgcaggcccaggtgcggagcagaagcaagctggacgcccctaaggtggatctgctggtgaagaattgcctcctgcccctgagagagtacttcaagtatttcagccagaatagtctgcccctgggaggcagcggcggcggcgtgcaggagcccgtgaccttcaaggacgtggccgtggacttcacccaggaggagtggggccagctggacctggtgcagaggaccctgtacagggacgtgatgctggagacctacggccacctgctgagcgtgggcaaccagatcaccaagcccgaggtgatcagcctgctggagcagggcgaggagccctggagcgtggagcaggcctacccccagagcacctgccccgagtggatgaggaacggcggcccaagcagcggcgcccctcctcccagcggcggcagcccagccggctccccaacctctaccgaggagggcacctctgagtccgccacccccgagagcggccctggcacctccaccgagcccagcgagggcagcgcacccggcagccctgccggcagccccacctccacagaggagggaaccagcaccgagcccagcgaaggcagcgccccaggcaccagcaccgagcctagtgagcaggagattaaacggatcaacaagatcagaagaagacttgtgaaagacagcaacaccaagaaggccggcaagacaggccccatgaaaaccctgctggttagagtgatgacacccgatctgagagagcggctggaaaacctgagaaagaagcctgaaaatatcccccagcccatcagcaatacatctagagccaacctgaataagctgctgaccgattacaccgaaatgaagaaggcgatcctgcatgtgtactgggaagagttccagaaggaccctgtgggcctgatgagccgggtggcccagcctgccagcaagaagatcgatcagaacaagctgaaacctgagatggacgagaagggcaacctgaccaccgccggctttgcctgctctcagtgtggccagcccctgttcgtgtacaagctggagcaggtgtctgagaagggcaaggcttacaccaactacttcggacggtgcaatgtggccgagcacgaaaagctgatcctgctggcccagctgaagcccgagaaggatagcgacgaagccgtgacatatagcctgggaaagtttgggcagagggccctggatttctacagcattcatgtgaccaaggagtccacccaccccgtgaagcccctggcccagatcgccggaaacagatacgcctccggacctgtgggaaaggccctgagcgacgcatgtatgggcacaatcgcctccttcctgtctaagtaccaggacatcatcatcgaacaccagaaggtggtgaagggcaaccagaagagactggagagcctgcgggagctggccggcaaggaaaacctggaataccctagcgtgaccctgccacctcagcctcacaccaaggagggcgttgatgcctacaacgaagtgatcgcccgggtgcgaatgtgggtgaacctgaacctgtggcagaagctgaagctaagcagagatgatgccaagcctctgctgagactgaagggattcccttcctttcctctggtcgagagacaggccaacgaagtggactggtgggacatggtgtgtaacgtgaagaagctgatcaacgagaaaaaggaggatggcaaggtgttttggcagaatctggctggctacaagagacaggaagccctgagaccatacctgagcagcgaggaagatcggaagaagggaaagaaattcgctcggtaccagctgggcgacctgctgctgcacctggaaaagaagcacggcgaggactggggaaaggtgtacgacgaggcctgggagcggattgacaagaaagtggaaggcctgagcaagcacatcaagctggaagaggaacggagaagcgaggacgcccagagcaaggccgccctgaccgactggctgcgggctaaggccagcttcgtgatcgagggcctgaaggaggccgacaaggacgagttctgcagatgcgagctgaagctgcagaagtggtacggggacctgcggggaaagcccttcgccatcgaagccgagaacagcatcctggacatcagcggcttcagcaagcagtacaactgtgccttcatctggcagaaggacggcgtgaagaagctgaacctgtacctgatcatcaactacttcaagggcggcaagctgcggttcaagaagatcaaacctgaagccttcgaagccaacagattctacaccgtgatcaacaaaaagagcggcgagatcgtgcccatggaggtgaacttcaacttcgacgaccccaacctgatcatcctgcctctggcctttggcaagagacagggcagagaattcatctggaacgacctgctgtccctggaaaccggcagcctgaagctggccaacggaagagtgatcgagaagacactgtacaacagaagaacccggcaggatgagcctgccctgttcgtggccctgaccttcgagcggcgggaggtcctggactcctccaatatcaaaccaatgaacctgatcggcgtggcaagaggcgaaaacatccccgccgtgatcgccctgaccgaccccgagggctgcccactgagccggtttaaggatagcctgggaaacccaacccacatcctgagaatcggcgagagctataaggagaagcagcggaccatccaggccaagaaggaggtggagcagcggagagccggcggctacagccggaagtacgccagcaaagccaagaatctggcagacgatatggtgagaaacaccgctagagatctgctgtactacgccgtgacccaggatgccatgctgatcttcgccaacctgagccggggcttcggccggcagggcaagcggaccttcatggccgagagacagtacacacggatggaggactggctgaccgccaagctggcctacgagggcctgagcaagacctacctgtccaagacactggcccagtacacctccaagacatgcagcaactgtgggtttaccatcaccagcgccgactacgacagggtgctggagaagctgaagaagacagcaacaggctggatgaccacaattaacggcaaggagctgaaggtggagggccagattacctactacaacagatacaagagacagaacgtagtcaaggacctgtccgtcgagctggatagactgagcgaagaatctgtgaacaacgacatctcctcctggacaaagggcagaagcggagaagctctgagcctcctgaagaaaagattctcccatagacccgtgcaggagaagttcgtgtgcctgaactgcggcttcgagacacacgcagccgagcaagccgccctgaacatcgccagatcctggctgttcctgcggagccaggagtacaagaaataccagacaaacaagacaaccggcaacaccgataagagagccttcgtcgagacctggcagtccttttaccggaagaagcttaaggaggtgtggaaacctgccgtgcggtctggcggatctggcggaggctccaccagccccaagaaaaagagaaaagtctaagctgccttctgcggggcttgccttctggccatgcccttcttctctcccttgcacctgtacctcttggtctttgaataaagcctgagtaggaaggctagcaaaaaaaaaaaaaaaaaaaaaaaaaaaaaaaaaaaaaaaaaaaaaaaaaaaaaaaaaaaaaaaaaaaaaaaaaaaaaaaa

SEQ ID NO: 12233 - RNA, 5785 nt, synthetic construct
  source 1..5785: mol_type = other RNA
aggaaataagagagaaaagaagagtaagaagaaatataagagccaccatggcccctaagaagaagcgtaaagtgagccggatggaacgcctcgtctacgaggtgcggcagaagtgcagaaacatcgaggacatctgcatctcctgcggatctctgaacgtgaccctggagcacccactgttcatcggcggcatgtgccagaactgtaaaaactgttttctggagtgtgcctatcaatacgacgatgacggctaccagagctactgcaccatctgttgcggcggaagagaggtgctgatgtgtggaaataacaactgctgccggtgcttctgcgtggaatgcgtggacctgctggtgggccccggcgccgcccaggccgctattaaggaagatccttggaactgctacatgtgcggccacaagggcacatacggcctgctgagacggagagaggactggcctagcagactgcagatgttcttcgccaataaccacgaccaggagttcgacccccctaaggtgtaccctcccgtccccgccgagaagagaaagcccatccgggtcctgagcctgttcgatggcatcgccaccggtctgctggtgctgaaggacctgggcatccaggtggataggtacattgcctccgaggtgtgcgaggactccatcaccgtgggaatggtgcgtcatcagggcaagatcatgtacgtgggcgacgtgcggagcgtgacacagaagcatatccaggagtggggccctttcgacctggtgatcggcggcagcccttgcaatgacctgagcatcgtgaacccagcccggaagggcctgtacgagggaaccggcagactgttcttcgagttttacagactgctgcacgacgcccggcctaaggaaggcgacgaccggcccttcttttggctgttcgagaatgtggtggccatgggagtcagcgacaagcgggatattagccggttcctggagagcaaccccgtgatgatcgatgccaaggaagtgagcgccgcccaccgggccagatacttctggggcaatctgcctggcatgaacagacccctggccagcaccgtgaacgacaagctggagctgcaggagtgcctggagcacggccggatcgccaagttcagcaaggtgagaaccatcaccacccgaagcaacagcatcaaacaaggcaaggaccagcactttcctgtgttcatgaacgagaaggaggacatcctgtggtgtaccgagatggagagagtgttcgggttcccagtccactacacagatgtcagcaacatgtctagactggccagacagagactgctgggaagaagctggtccgtccctgtgatcagacacctgttcgcccctctgaaggagtacttcgcctgcgtgagcagcggcaacagcaacgccaacagccggggccccagcttctctagcggcctggtgccactgtccctgagagggagccacatgggccccatggagatctacaaaaccgtgagcgcctggaagcggcagcctgtgcgcgtgctgagcctgtttcggaatatcgataaagtcctgaaaagcctgggattcctggagagcggctctggctccggcggtggcaccctgaagtacgtggaggatgtgacaaacgtggtcagacgggatgtggagaagtggggccccttcgatctggtgtacggcagcacccaacccctgggcagctcttgtgaccggtgccctggctggtacatgtttcagttccaccggatcctgcagtacgccctgccgagacaggagtcccagcggccattcttttggattttcatggacaacttgctgctgaccgaggatgaccaggaaactaccactcggttcctgcagaccgaagccgtgaccctgcaggacgtgagaggccgggactaccagaacgccatgcgggtgtggtccaacatccctggactgaaaagcaagcacgcacctctgacccctaaagaagaggagtacctgcaggcccaggtgcggagcagaagcaagctggacgcccctaaggtggatctgctggtgaagaattgcctcctgcccctgagagagtacttcaagtatttcagccagaatagtctgcccctgggaggcagcggcggcggcagcaaggtgcccgtgaccttcggcgacctggccatctacttcagccaggaggagtgggagtggctgagccccatccagaaggacctgtacgaggacgtgatgctggagaactaccagaacctggtgagcctgggcctgagcttcaggaggcccaacgtgatcaccctgctggagaagggcaaggccccctggatggtggagcccgtgaggaagaggaggggcgtggacagcggcagcaagtgcggcggcccaagcagcggcgcccctcctcccagcggcggcagcccagccggctccccaacctctaccgaggagggcacctctgagtccgccacccccgagagcggccctggcacctccaccgagcccagcgagggcagcgcacccggcagccctgccggcagccccacctccacagaggagggaaccagcaccgagcccagcgaaggcagcgccccaggcaccagcaccgagcctagtgagcaggagattaaacggatcaacaagatcagaagaagacttgtgaaagacagcaacaccaagaaggccggcaagacaggccccatgaaaaccctgctggttagagtgatgacacccgatctgagagagcggctggaaaacctgagaaagaagcctgaaaatatcccccagcccatcagcaatacatctagagccaacctgaataagctgctgaccgattacaccgaaatgaagaaggcgatcctgcatgtgtactgggaagagttccagaaggaccctgtgggcctgatgagccgggtggcccagcctgccagcaagaagatcgatcagaacaagctgaaacctgagatggacgagaagggcaacctgaccaccgccggctttgcctgctctcagtgtggccagcccctgttcgtgtacaagctggagcaggtgtctgagaagggcaaggcttacaccaactacttcggacggtgcaatgtggccgagcacgaaaagctgatcctgctggcccagctgaagcccgagaaggatagcgacgaagccgtgacatatagcctgggaaagtttgggcagagggccctggatttctacagcattcatgtgaccaaggagtccacccaccccgtgaagcccctggcccagatcgccggaaacagatacgcctccggacctgtgggaaaggccctgagcgacgcatgtatgggcacaatcgcctccttcctgtctaagtaccaggacatcatcatcgaacaccagaaggtggtgaagggcaaccagaagagactggagagcctgcgggagctggccggcaaggaaaacctggaataccctagcgtgaccctgccacctcagcctcacaccaaggagggcgttgatgcctacaacgaagtgatcgcccgggtgcgaatgtgggtgaacctgaacctgtggcagaagctgaagctaagcagagatgatgccaagcctctgctgagactgaagggattcccttcctttcctctggtcgagagacaggccaacgaagtggactggtgggacatggtgtgtaacgtgaagaagctgatcaacgagaaaaaggaggatggcaaggtgttttggcagaatctggctggctacaagagacaggaagccctgagaccatacctgagcagcgaggaagatcggaagaagggaaagaaattcgctcggtaccagctgggcgacctgctgctgcacctggaaaagaagcacggcgaggactggggaaaggtgtacgacgaggcctgggagcggattgacaagaaagtggaaggcctgagcaagcacatcaagctggaagaggaacggagaagcgaggacgcccagagcaaggccgccctgaccgactggctgcgggctaaggccagcttcgtgatcgagggcctgaaggaggccgacaaggacgagttctgcagatgcgagctgaagctgcagaagtggtacggggacctgcggggaaagcccttcgccatcgaagccgagaacagcatcctggacatcagcggcttcagcaagcagtacaactgtgccttcatctggcagaaggacggcgtgaagaagctgaacctgtacctgatcatcaactacttcaagggcggcaagctgcggttcaagaagatcaaacctgaagccttcgaagccaacagattctacaccgtgatcaacaaaaagagcggcgagatcgtgcccatggaggtgaacttcaacttcgacgaccccaacctgatcatcctgcctctggcctttggcaagagacagggcagagaattcatctggaacgacctgctgtccctggaaaccggcagcctgaagctggccaacggaagagtgatcgagaagacactgtacaacagaagaacccggcaggatgagcctgccctgttcgtggccctgaccttcgagcggcgggaggtcctggactcctccaatatcaaaccaatgaacctgatcggcgtggcaagaggcgaaaacatccccgccgtgatcgccctgaccgaccccgagggctgcccactgagccggtttaaggatagcctgggaaacccaacccacatcctgagaatcggcgagagctataaggagaagcagcggaccatccaggccaagaaggaggtggagcagcggagagccggcggctacagccggaagtacgccagcaaagccaagaatctggcagacgatatggtgagaaacaccgctagagatctgctgtactacgccgtgacccaggatgccatgctgatcttcgccaacctgagccggggcttcggccggcagggcaagcggaccttcatggccgagagacagtacacacggatggaggactggctgaccgccaagctggcctacgagggcctgagcaagacctacctgtccaagacactggcccagtacacctccaagacatgcagcaactgtgggtttaccatcaccagcgccgactacgacagggtgctggagaagctgaagaagacagcaacaggctggatgaccacaattaacggcaaggagctgaaggtggagggccagattacctactacaacagatacaagagacagaacgtagtcaaggacctgtccgtcgagctggatagactgagcgaagaatctgtgaacaacgacatctcctcctggacaaagggcagaagcggagaagctctgagcctcctgaagaaaagattctcccatagacccgtgcaggagaagttcgtgtgcctgaactgcggcttcgagacacacgcagccgagcaagccgccctgaacatcgccagatcctggctgttcctgcggagccaggagtacaagaaataccagacaaacaagacaaccggcaacaccgataagagagccttcgtcgagacctggcagtccttttaccggaagaagcttaaggaggtgtggaaacctgccgtgcggtctggcggatctggcggaggctccaccagccccaagaaaaagagaaaagtctaagctgccttctgcggggcttgccttctggccatgcccttcttctctcccttgcacctgtacctcttggtctttgaataaagcctgagtaggaaggctagcaaaaaaaaaaaaaaaaaaaaaaaaaaaaaaaaaaaaaaaaaaaaaaaaaaaaaaaaaaaaaaaaaaaaaaaaaaaaaaaa

SEQ ID NO: 12234 - RNA, 5785 nt, synthetic construct
  source 1..5785: mol_type = other RNA
aggaaataagagagaaaagaagagtaagaagaaatataagagccaccatggcccctaagaagaagcgtaaagtgagccggatggaacgcctcgtctacgaggtgcggcagaagtgcagaaacatcgaggacatctgcatctcctgcggatctctgaacgtgaccctggagcacccactgttcatcggcggcatgtgccagaactgtaaaaactgttttctggagtgtgcctatcaatacgacgatgacggctaccagagctactgcaccatctgttgcggcggaagagaggtgctgatgtgtggaaataacaactgctgccggtgcttctgcgtggaatgcgtggacctgctggtgggccccggcgccgcccaggccgctattaaggaagatccttggaactgctacatgtgcggccacaagggcacatacggcctgctgagacggagagaggactggcctagcagactgcagatgttcttcgccaataaccacgaccaggagttcgacccccctaaggtgtaccctcccgtccccgccgagaagagaaagcccatccgggtcctgagcctgttcgatggcatcgccaccggtctgctggtgctgaaggacctgggcatccaggtggataggtacattgcctccgaggtgtgcgaggactccatcaccgtgggaatggtgcgtcatcagggcaagatcatgtacgtgggcgacgtgcggagcgtgacacagaagcatatccaggagtggggccctttcgacctggtgatcggcggcagcccttgcaatgacctgagcatcgtgaacccagcccggaagggcctgtacgagggaaccggcagactgttcttcgagttttacagactgctgcacgacgcccggcctaaggaaggcgacgaccggcccttcttttggctgttcgagaatgtggtggccatgggagtcagcgacaagcgggatattagccggttcctggagagcaaccccgtgatgatcgatgccaaggaagtgagcgccgcccaccgggccagatacttctggggcaatctgcctggcatgaacagacccctggccagcaccgtgaacgacaagctggagctgcaggagtgcctggagcacggccggatcgccaagttcagcaaggtgagaaccatcaccacccgaagcaacagcatcaaacaaggcaaggaccagcactttcctgtgttcatgaacgagaaggaggacatcctgtggtgtaccgagatggagagagtgttcgggttcccagtccactacacagatgtcagcaacatgtctagactggccagacagagactgctgggaagaagctggtccgtccctgtgatcagacacctgttcgcccctctgaaggagtacttcgcctgcgtgagcagcggcaacagcaacgccaacagccggggccccagcttctctagcggcctggtgccactgtccctgagagggagccacatgggccccatggagatctacaaaaccgtgagcgcctggaagcggcagcctgtgcgcgtgctgagcctgtttcggaatatcgataaagtcctgaaaagcctgggattcctggagagcggctctggctccggcggtggcaccctgaagtacgtggaggatgtgacaaacgtggtcagacgggatgtggagaagtggggccccttcgatctggtgtacggcagcacccaacccctgggcagctcttgtgaccggtgccctggctggtacatgtttcagttccaccggatcctgcagtacgccctgccgagacaggagtcccagcggccattcttttggattttcatggacaacttgctgctgaccgaggatgaccaggaaactaccactcggttcctgcagaccgaagccgtgaccctgcaggacgtgagaggccgggactaccagaacgccatgcgggtgtggtccaacatccctggactgaaaagcaagcacgcacctctgacccctaaagaagaggagtacctgcaggcccaggtgcggagcagaagcaagctggacgcccctaaggtggatctgctggtgaagaattgcctcctgcccctgagagagtacttcaagtatttcagccagaatagtctgcccctgggaggcagcggcggcggcatggccgccatgcccctgaaggccaggtaccaggagatggtgaccttcgaggacgtggccgtgcacttcaccaagaccgagtggaccggcctgagccccgcccagagggccctgtacaggagcgtgatgctggagaacttcggcaacctgaccgccctgggctaccccgtgcccaagcccgccctgatcagcctgctggagggcggcgacatggactggggcctggaggcccaggacgaccccggcggcccaagcagcggcgcccctcctcccagcggcggcagcccagccggctccccaacctctaccgaggagggcacctctgagtccgccacccccgagagcggccctggcacctccaccgagcccagcgagggcagcgcacccggcagccctgccggcagccccacctccacagaggagggaaccagcaccgagcccagcgaaggcagcgccccaggcaccagcaccgagcctagtgagcaggagattaaacggatcaacaagatcagaagaagacttgtgaaagacagcaacaccaagaaggccggcaagacaggccccatgaaaaccctgctggttagagtgatgacacccgatctgagagagcggctggaaaacctgagaaagaagcctgaaaatatcccccagcccatcagcaatacatctagagccaacctgaataagctgctgaccgattacaccgaaatgaagaaggcgatcctgcatgtgtactgggaagagttccagaaggaccctgtgggcctgatgagccgggtggcccagcctgccagcaagaagatcgatcagaacaagctgaaacctgagatggacgagaagggcaacctgaccaccgccggctttgcctgctctcagtgtggccagcccctgttcgtgtacaagctggagcaggtgtctgagaagggcaaggcttacaccaactacttcggacggtgcaatgtggccgagcacgaaaagctgatcctgctggcccagctgaagcccgagaaggatagcgacgaagccgtgacatatagcctgggaaagtttgggcagagggccctggatttctacagcattcatgtgaccaaggagtccacccaccccgtgaagcccctggcccagatcgccggaaacagatacgcctccggacctgtgggaaaggccctgagcgacgcatgtatgggcacaatcgcctccttcctgtctaagtaccaggacatcatcatcgaacaccagaaggtggtgaagggcaaccagaagagactggagagcctgcgggagctggccggcaaggaaaacctggaataccctagcgtgaccctgccacctcagcctcacaccaaggagggcgttgatgcctacaacgaagtgatcgcccgggtgcgaatgtgggtgaacctgaacctgtggcagaagctgaagctaagcagagatgatgccaagcctctgctgagactgaagggattcccttcctttcctctggtcgagagacaggccaacgaagtggactggtgggacatggtgtgtaacgtgaagaagctgatcaacgagaaaaaggaggatggcaaggtgttttggcagaatctggctggctacaagagacaggaagccctgagaccatacctgagcagcgaggaagatcggaagaagggaaagaaattcgctcggtaccagctgggcgacctgctgctgcacctggaaaagaagcacggcgaggactggggaaaggtgtacgacgaggcctgggagcggattgacaagaaagtggaaggcctgagcaagcacatcaagctggaagaggaacggagaagcgaggacgcccagagcaaggccgccctgaccgactggctgcgggctaaggccagcttcgtgatcgagggcctgaaggaggccgacaaggacgagttctgcagatgcgagctgaagctgcagaagtggtacggggacctgcggggaaagcccttcgccatcgaagccgagaacagcatcctggacatcagcggcttcagcaagcagtacaactgtgccttcatctggcagaaggacggcgtgaagaagctgaacctgtacctgatcatcaactacttcaagggcggcaagctgcggttcaagaagatcaaacctgaagccttcgaagccaacagattctacaccgtgatcaacaaaaagagcggcgagatcgtgcccatggaggtgaacttcaacttcgacgaccccaacctgatcatcctgcctctggcctttggcaagagacagggcagagaattcatctggaacgacctgctgtccctggaaaccggcagcctgaagctggccaacggaagagtgatcgagaagacactgtacaacagaagaacccggcaggatgagcctgccctgttcgtggccctgaccttcgagcggcgggaggtcctggactcctccaatatcaaaccaatgaacctgatcggcgtggcaagaggcgaaaacatccccgccgtgatcgccctgaccgaccccgagggctgcccactgagccggtttaaggatagcctgggaaacccaacccacatcctgagaatcggcgagagctataaggagaagcagcggaccatccaggccaagaaggaggtggagcagcggagagccggcggctacagccggaagtacgccagcaaagccaagaatctggcagacgatatggtgagaaacaccgctagagatctgctgtactacgccgtgacccaggatgccatgctgatcttcgccaacctgagccggggcttcggccggcagggcaagcggaccttcatggccgagagacagtacacacggatggaggactggctgaccgccaagctggcctacgagggcctgagcaagacctacctgtccaagacactggcccagtacacctccaagacatgcagcaactgtgggtttaccatcaccagcgccgactacgacagggtgctggagaagctgaagaagacagcaacaggctggatgaccacaattaacggcaaggagctgaaggtggagggccagattacctactacaacagatacaagagacagaacgtagtcaaggacctgtccgtcgagctggatagactgagcgaagaatctgtgaacaacgacatctcctcctggacaaagggcagaagcggagaagctctgagcctcctgaagaaaagattctcccatagacccgtgcaggagaagttcgtgtgcctgaactgcggcttcgagacacacgcagccgagcaagccgccctgaacatcgccagatcctggctgttcctgcggagccaggagtacaagaaataccagacaaacaagacaaccggcaacaccgataagagagccttcgtcgagacctggcagtccttttaccggaagaagcttaaggaggtgtggaaacctgccgtgcggtctggcggatctggcggaggctccaccagccccaagaaaaagagaaaagtctaagctgccttctgcggggcttgccttctggccatgcccttcttctctcccttgcacctgtacctcttggtctttgaataaagcctgagtaggaaggctagcaaaaaaaaaaaaaaaaaaaaaaaaaaaaaaaaaaaaaaaaaaaaaaaaaaaaaaaaaaaaaaaaaaaaaaaaaaaaaaaa

SEQ ID NO: 12235 - RNA, 5785 nt, synthetic construct
  source 1..5785: mol_type = other RNA
aggaaataagagagaaaagaagagtaagaagaaatataagagccaccatggcccctaagaagaagcgtaaagtgagccggatggaacgcctcgtctacgaggtgcggcagaagtgcagaaacatcgaggacatctgcatctcctgcggatctctgaacgtgaccctggagcacccactgttcatcggcggcatgtgccagaactgtaaaaactgttttctggagtgtgcctatcaatacgacgatgacggctaccagagctactgcaccatctgttgcggcggaagagaggtgctgatgtgtggaaataacaactgctgccggtgcttctgcgtggaatgcgtggacctgctggtgggccccggcgccgcccaggccgctattaaggaagatccttggaactgctacatgtgcggccacaagggcacatacggcctgctgagacggagagaggactggcctagcagactgcagatgttcttcgccaataaccacgaccaggagttcgacccccctaaggtgtaccctcccgtccccgccgagaagagaaagcccatccgggtcctgagcctgttcgatggcatcgccaccggtctgctggtgctgaaggacctgggcatccaggtggataggtacattgcctccgaggtgtgcgaggactccatcaccgtgggaatggtgcgtcatcagggcaagatcatgtacgtgggcgacgtgcggagcgtgacacagaagcatatccaggagtggggccctttcgacctggtgatcggcggcagcccttgcaatgacctgagcatcgtgaacccagcccggaagggcctgtacgagggaaccggcagactgttcttcgagttttacagactgctgcacgacgcccggcctaaggaaggcgacgaccggcccttcttttggctgttcgagaatgtggtggccatgggagtcagcgacaagcgggatattagccggttcctggagagcaaccccgtgatgatcgatgccaaggaagtgagcgccgcccaccgggccagatacttctggggcaatctgcctggcatgaacagacccctggccagcaccgtgaacgacaagctggagctgcaggagtgcctggagcacggccggatcgccaagttcagcaaggtgagaaccatcaccacccgaagcaacagcatcaaacaaggcaaggaccagcactttcctgtgttcatgaacgagaaggaggacatcctgtggtgtaccgagatggagagagtgttcgggttcccagtccactacacagatgtcagcaacatgtctagactggccagacagagactgctgggaagaagctggtccgtccctgtgatcagacacctgttcgcccctctgaaggagtacttcgcctgcgtgagcagcggcaacagcaacgccaacagccggggccccagcttctctagcggcctggtgccactgtccctgagagggagccacatgggccccatggagatctacaaaaccgtgagcgcctggaagcggcagcctgtgcgcgtgctgagcctgtttcggaatatcgataaagtcctgaaaagcctgggattcctggagagcggctctggctccggcggtggcaccctgaagtacgtggaggatgtgacaaacgtggtcagacgggatgtggagaagtggggccccttcgatctggtgtacggcagcacccaacccctgggcagctcttgtgaccggtgccctggctggtacatgtttcagttccaccggatcctgcagtacgccctgccgagacaggagtcccagcggccattcttttggattttcatggacaacttgctgctgaccgaggatgaccaggaaactaccactcggttcctgcagaccgaagccgtgaccctgcaggacgtgagaggccgggactaccagaacgccatgcgggtgtggtccaacatccctggactgaaaagcaagcacgcacctctgacccctaaagaagaggagtacctgcaggcccaggtgcggagcagaagcaagctggacgcccctaaggtggatctgctggtgaagaattgcctcctgcccctgagagagtacttcaagtatttcagccagaatagtctgcccctgggaggcagcggcggcggccaggccgaggtgaccttcgaggacgtggccgtgctgctgagcagggaggagtggggcaggctgggccccgtgcagaagggcctgtacagggacgtgatgctggagacctacaggaacctggtgagcctgggcgccggccccgccggccccaagcccgaggtgatcacccagctggagaggggcgacgagccctgggtgcccgacgtgcagggcagggagcagcccaccatcgacggcagcgccggcggcccaagcagcggcgcccctcctcccagcggcggcagcccagccggctccccaacctctaccgaggagggcacctctgagtccgccacccccgagagcggccctggcacctccaccgagcccagcgagggcagcgcacccggcagccctgccggcagccccacctccacagaggagggaaccagcaccgagcccagcgaaggcagcgccccaggcaccagcaccgagcctagtgagcaggagattaaacggatcaacaagatcagaagaagacttgtgaaagacagcaacaccaagaaggccggcaagacaggccccatgaaaaccctgctggttagagtgatgacacccgatctgagagagcggctggaaaacctgagaaagaagcctgaaaatatcccccagcccatcagcaatacatctagagccaacctgaataagctgctgaccgattacaccgaaatgaagaaggcgatcctgcatgtgtactgggaagagttccagaaggaccctgtgggcctgatgagccgggtggcccagcctgccagcaagaagatcgatcagaacaagctgaaacctgagatggacgagaagggcaacctgaccaccgccggctttgcctgctctcagtgtggccagcccctgttcgtgtacaagctggagcaggtgtctgagaagggcaaggcttacaccaactacttcggacggtgcaatgtggccgagcacgaaaagctgatcctgctggcccagctgaagcccgagaaggatagcgacgaagccgtgacatatagcctgggaaagtttgggcagagggccctggatttctacagcattcatgtgaccaaggagtccacccaccccgtgaagcccctggcccagatcgccggaaacagatacgcctccggacctgtgggaaaggccctgagcgacgcatgtatgggcacaatcgcctccttcctgtctaagtaccaggacatcatcatcgaacaccagaaggtggtgaagggcaaccagaagagactggagagcctgcgggagctggccggcaaggaaaacctggaataccctagcgtgaccctgccacctcagcctcacaccaaggagggcgttgatgcctacaacgaagtgatcgcccgggtgcgaatgtgggtgaacctgaacctgtggcagaagctgaagctaagcagagatgatgccaagcctctgctgagactgaagggattcccttcctttcctctggtcgagagacaggccaacgaagtggactggtgggacatggtgtgtaacgtgaagaagctgatcaacgagaaaaaggaggatggcaaggtgttttggcagaatctggctggctacaagagacaggaagccctgagaccatacctgagcagcgaggaagatcggaagaagggaaagaaattcgctcggtaccagctgggcgacctgctgctgcacctggaaaagaagcacggcgaggactggggaaaggtgtacgacgaggcctgggagcggattgacaagaaagtggaaggcctgagcaagcacatcaagctggaagaggaacggagaagcgaggacgcccagagcaaggccgccctgaccgactggctgcgggctaaggccagcttcgtgatcgagggcctgaaggaggccgacaaggacgagttctgcagatgcgagctgaagctgcagaagtggtacggggacctgcggggaaagcccttcgccatcgaagccgagaacagcatcctggacatcagcggcttcagcaagcagtacaactgtgccttcatctggcagaaggacggcgtgaagaagctgaacctgtacctgatcatcaactacttcaagggcggcaagctgcggttcaagaagatcaaacctgaagccttcgaagccaacagattctacaccgtgatcaacaaaaagagcggcgagatcgtgcccatggaggtgaacttcaacttcgacgaccccaacctgatcatcctgcctctggcctttggcaagagacagggcagagaattcatctggaacgacctgctgtccctggaaaccggcagcctgaagctggccaacggaagagtgatcgagaagacactgtacaacagaagaacccggcaggatgagcctgccctgttcgtggccctgaccttcgagcggcgggaggtcctggactcctccaatatcaaaccaatgaacctgatcggcgtggcaagaggcgaaaacatccccgccgtgatcgccctgaccgaccccgagggctgcccactgagccggtttaaggatagcctgggaaacccaacccacatcctgagaatcggcgagagctataaggagaagcagcggaccatccaggccaagaaggaggtggagcagcggagagccggcggctacagccggaagtacgccagcaaagccaagaatctggcagacgatatggtgagaaacaccgctagagatctgctgtactacgccgtgacccaggatgccatgctgatcttcgccaacctgagccggggcttcggccggcagggcaagcggaccttcatggccgagagacagtacacacggatggaggactggctgaccgccaagctggcctacgagggcctgagcaagacctacctgtccaagacactggcccagtacacctccaagacatgcagcaactgtgggtttaccatcaccagcgccgactacgacagggtgctggagaagctgaagaagacagcaacaggctggatgaccacaattaacggcaaggagctgaaggtggagggccagattacctactacaacagatacaagagacagaacgtagtcaaggacctgtccgtcgagctggatagactgagcgaagaatctgtgaacaacgacatctcctcctggacaaagggcagaagcggagaagctctgagcctcctgaagaaaagattctcccatagacccgtgcaggagaagttcgtgtgcctgaactgcggcttcgagacacacgcagccgagcaagccgccctgaacatcgccagatcctggctgttcctgcggagccaggagtacaagaaataccagacaaacaagacaaccggcaacaccgataagagagccttcgtcgagacctggcagtccttttaccggaagaagcttaaggaggtgtggaaacctgccgtgcggtctggcggatctggcggaggctccaccagccccaagaaaaagagaaaagtctaagctgccttctgcggggcttgccttctggccatgcccttcttctctcccttgcacctgtacctcttggtctttgaataaagcctgagtaggaaggctagcaaaaaaaaaaaaaaaaaaaaaaaaaaaaaaaaaaaaaaaaaaaaaaaaaaaaaaaaaaaaaaaaaaaaaaaaaaaaaaaa

SEQ ID NO: 12236 - RNA, 5785 nt, synthetic construct
  source 1..5785: mol_type = other RNA
aggaaataagagagaaaagaagagtaagaagaaatataagagccaccatggcccctaagaagaagcgtaaagtgagccggatggaacgcctcgtctacgaggtgcggcagaagtgcagaaacatcgaggacatctgcatctcctgcggatctctgaacgtgaccctggagcacccactgttcatcggcggcatgtgccagaactgtaaaaactgttttctggagtgtgcctatcaatacgacgatgacggctaccagagctactgcaccatctgttgcggcggaagagaggtgctgatgtgtggaaataacaactgctgccggtgcttctgcgtggaatgcgtggacctgctggtgggccccggcgccgcccaggccgctattaaggaagatccttggaactgctacatgtgcggccacaagggcacatacggcctgctgagacggagagaggactggcctagcagactgcagatgttcttcgccaataaccacgaccaggagttcgacccccctaaggtgtaccctcccgtccccgccgagaagagaaagcccatccgggtcctgagcctgttcgatggcatcgccaccggtctgctggtgctgaaggacctgggcatccaggtggataggtacattgcctccgaggtgtgcgaggactccatcaccgtgggaatggtgcgtcatcagggcaagatcatgtacgtgggcgacgtgcggagcgtgacacagaagcatatccaggagtggggccctttcgacctggtgatcggcggcagcccttgcaatgacctgagcatcgtgaacccagcccggaagggcctgtacgagggaaccggcagactgttcttcgagttttacagactgctgcacgacgcccggcctaaggaaggcgacgaccggcccttcttttggctgttcgagaatgtggtggccatgggagtcagcgacaagcgggatattagccggttcctggagagcaaccccgtgatgatcgatgccaaggaagtgagcgccgcccaccgggccagatacttctggggcaatctgcctggcatgaacagacccctggccagcaccgtgaacgacaagctggagctgcaggagtgcctggagcacggccggatcgccaagttcagcaaggtgagaaccatcaccacccgaagcaacagcatcaaacaaggcaaggaccagcactttcctgtgttcatgaacgagaaggaggacatcctgtggtgtaccgagatggagagagtgttcgggttcccagtccactacacagatgtcagcaacatgtctagactggccagacagagactgctgggaagaagctggtccgtccctgtgatcagacacctgttcgcccctctgaaggagtacttcgcctgcgtgagcagcggcaacagcaacgccaacagccggggccccagcttctctagcggcctggtgccactgtccctgagagggagccacatgggccccatggagatctacaaaaccgtgagcgcctggaagcggcagcctgtgcgcgtgctgagcctgtttcggaatatcgataaagtcctgaaaagcctgggattcctggagagcggctctggctccggcggtggcaccctgaagtacgtggaggatgtgacaaacgtggtcagacgggatgtggagaagtggggccccttcgatctggtgtacggcagcacccaacccctgggcagctcttgtgaccggtgccctggctggtacatgtttcagttccaccggatcctgcagtacgccctgccgagacaggagtcccagcggccattcttttggattttcatggacaacttgctgctgaccgaggatgaccaggaaactaccactcggttcctgcagaccgaagccgtgaccctgcaggacgtgagaggccgggactaccagaacgccatgcgggtgtggtccaacatccctggactgaaaagcaagcacgcacctctgacccctaaagaagaggagtacctgcaggcccaggtgcggagcagaagcaagctggacgcccctaaggtggatctgctggtgaagaattgcctcctgcccctgagagagtacttcaagtatttcagccagaatagtctgcccctgggaggcagcggcggcggcgcccacggcagcgtgatcttcagcgacgtgagcatcgccttcagccaggaggagtgggagtacctggacctggagcagagggacctgtacagggacgtgatgctggagaactacagcaacctggtgagcctgggctgcttcatcagcaagcccaacgtgatcagcctgctggagcagggcaaggagccctggaaggtggtgaggaaggagaggaggtaccccgacatgggcatcaggtacgagggcggcccaagcagcggcgcccctcctcccagcggcggcagcccagccggctccccaacctctaccgaggagggcacctctgagtccgccacccccgagagcggccctggcacctccaccgagcccagcgagggcagcgcacccggcagccctgccggcagccccacctccacagaggagggaaccagcaccgagcccagcgaaggcagcgccccaggcaccagcaccgagcctagtgagcaggagattaaacggatcaacaagatcagaagaagacttgtgaaagacagcaacaccaagaaggccggcaagacaggccccatgaaaaccctgctggttagagtgatgacacccgatctgagagagcggctggaaaacctgagaaagaagcctgaaaatatcccccagcccatcagcaatacatctagagccaacctgaataagctgctgaccgattacaccgaaatgaagaaggcgatcctgcatgtgtactgggaagagttccagaaggaccctgtgggcctgatgagccgggtggcccagcctgccagcaagaagatcgatcagaacaagctgaaacctgagatggacgagaagggcaacctgaccaccgccggctttgcctgctctcagtgtggccagcccctgttcgtgtacaagctggagcaggtgtctgagaagggcaaggcttacaccaactacttcggacggtgcaatgtggccgagcacgaaaagctgatcctgctggcccagctgaagcccgagaaggatagcgacgaagccgtgacatatagcctgggaaagtttgggcagagggccctggatttctacagcattcatgtgaccaaggagtccacccaccccgtgaagcccctggcccagatcgccggaaacagatacgcctccggacctgtgggaaaggccctgagcgacgcatgtatgggcacaatcgcctccttcctgtctaagtaccaggacatcatcatcgaacaccagaaggtggtgaagggcaaccagaagagactggagagcctgcgggagctggccggcaaggaaaacctggaataccctagcgtgaccctgccacctcagcctcacaccaaggagggcgttgatgcctacaacgaagtgatcgcccgggtgcgaatgtgggtgaacctgaacctgtggcagaagctgaagctaagcagagatgatgccaagcctctgctgagactgaagggattcccttcctttcctctggtcgagagacaggccaacgaagtggactggtgggacatggtgtgtaacgtgaagaagctgatcaacgagaaaaaggaggatggcaaggtgttttggcagaatctggctggctacaagagacaggaagccctgagaccatacctgagcagcgaggaagatcggaagaagggaaagaaattcgctcggtaccagctgggcgacctgctgctgcacctggaaaagaagcacggcgaggactggggaaaggtgtacgacgaggcctgggagcggattgacaagaaagtggaaggcctgagcaagcacatcaagctggaagaggaacggagaagcgaggacgcccagagcaaggccgccctgaccgactggctgcgggctaaggccagcttcgtgatcgagggcctgaaggaggccgacaaggacgagttctgcagatgcgagctgaagctgcagaagtggtacggggacctgcggggaaagcccttcgccatcgaagccgagaacagcatcctggacatcagcggcttcagcaagcagtacaactgtgccttcatctggcagaaggacggcgtgaagaagctgaacctgtacctgatcatcaactacttcaagggcggcaagctgcggttcaagaagatcaaacctgaagccttcgaagccaacagattctacaccgtgatcaacaaaaagagcggcgagatcgtgcccatggaggtgaacttcaacttcgacgaccccaacctgatcatcctgcctctggcctttggcaagagacagggcagagaattcatctggaacgacctgctgtccctggaaaccggcagcctgaagctggccaacggaagagtgatcgagaagacactgtacaacagaagaacccggcaggatgagcctgccctgttcgtggccctgaccttcgagcggcgggaggtcctggactcctccaatatcaaaccaatgaacctgatcggcgtggcaagaggcgaaaacatccccgccgtgatcgccctgaccgaccccgagggctgcccactgagccggtttaaggatagcctgggaaacccaacccacatcctgagaatcggcgagagctataaggagaagcagcggaccatccaggccaagaaggaggtggagcagcggagagccggcggctacagccggaagtacgccagcaaagccaagaatctggcagacgatatggtgagaaacaccgctagagatctgctgtactacgccgtgacccaggatgccatgctgatcttcgccaacctgagccggggcttcggccggcagggcaagcggaccttcatggccgagagacagtacacacggatggaggactggctgaccgccaagctggcctacgagggcctgagcaagacctacctgtccaagacactggcccagtacacctccaagacatgcagcaactgtgggtttaccatcaccagcgccgactacgacagggtgctggagaagctgaagaagacagcaacaggctggatgaccacaattaacggcaaggagctgaaggtggagggccagattacctactacaacagatacaagagacagaacgtagtcaaggacctgtccgtcgagctggatagactgagcgaagaatctgtgaacaacgacatctcctcctggacaaagggcagaagcggagaagctctgagcctcctgaagaaaagattctcccatagacccgtgcaggagaagttcgtgtgcctgaactgcggcttcgagacacacgcagccgagcaagccgccctgaacatcgccagatcctggctgttcctgcggagccaggagtacaagaaataccagacaaacaagacaaccggcaacaccgataagagagccttcgtcgagacctggcagtccttttaccggaagaagcttaaggaggtgtggaaacctgccgtgcggtctggcggatctggcggaggctccaccagccccaagaaaaagagaaaagtctaagctgccttctgcggggcttgccttctggccatgcccttcttctctcccttgcacctgtacctcttggtctttgaataaagcctgagtaggaaggctagcaaaaaaaaaaaaaaaaaaaaaaaaaaaaaaaaaaaaaaaaaaaaaaaaaaaaaaaaaaaaaaaaaaaaaaaaaaaaaaaa

SEQ ID NO: 12237 - RNA, 5785 nt, synthetic construct
  source 1..5785: mol_type = other RNA
aggaaataagagagaaaagaagagtaagaagaaatataagagccaccatggcccctaagaagaagcgtaaagtgagccggatggaacgcctcgtctacgaggtgcggcagaagtgcagaaacatcgaggacatctgcatctcctgcggatctctgaacgtgaccctggagcacccactgttcatcggcggcatgtgccagaactgtaaaaactgttttctggagtgtgcctatcaatacgacgatgacggctaccagagctactgcaccatctgttgcggcggaagagaggtgctgatgtgtggaaataacaactgctgccggtgcttctgcgtggaatgcgtggacctgctggtgggccccggcgccgcccaggccgctattaaggaagatccttggaactgctacatgtgcggccacaagggcacatacggcctgctgagacggagagaggactggcctagcagactgcagatgttcttcgccaataaccacgaccaggagttcgacccccctaaggtgtaccctcccgtccccgccgagaagagaaagcccatccgggtcctgagcctgttcgatggcatcgccaccggtctgctggtgctgaaggacctgggcatccaggtggataggtacattgcctccgaggtgtgcgaggactccatcaccgtgggaatggtgcgtcatcagggcaagatcatgtacgtgggcgacgtgcggagcgtgacacagaagcatatccaggagtggggccctttcgacctggtgatcggcggcagcccttgcaatgacctgagcatcgtgaacccagcccggaagggcctgtacgagggaaccggcagactgttcttcgagttttacagactgctgcacgacgcccggcctaaggaaggcgacgaccggcccttcttttggctgttcgagaatgtggtggccatgggagtcagcgacaagcgggatattagccggttcctggagagcaaccccgtgatgatcgatgccaaggaagtgagcgccgcccaccgggccagatacttctggggcaatctgcctggcatgaacagacccctggccagcaccgtgaacgacaagctggagctgcaggagtgcctggagcacggccggatcgccaagttcagcaaggtgagaaccatcaccacccgaagcaacagcatcaaacaaggcaaggaccagcactttcctgtgttcatgaacgagaaggaggacatcctgtggtgtaccgagatggagagagtgttcgggttcccagtccactacacagatgtcagcaacatgtctagactggccagacagagactgctgggaagaagctggtccgtccctgtgatcagacacctgttcgcccctctgaaggagtacttcgcctgcgtgagcagcggcaacagcaacgccaacagccggggccccagcttctctagcggcctggtgccactgtccctgagagggagccacatgggccccatggagatctacaaaaccgtgagcgcctggaagcggcagcctgtgcgcgtgctgagcctgtttcggaatatcgataaagtcctgaaaagcctgggattcctggagagcggctctggctccggcggtggcaccctgaagtacgtggaggatgtgacaaacgtggtcagacgggatgtggagaagtggggccccttcgatctggtgtacggcagcacccaacccctgggcagctcttgtgaccggtgccctggctggtacatgtttcagttccaccggatcctgcagtacgccctgccgagacaggagtcccagcggccattcttttggattttcatggacaacttgctgctgaccgaggatgaccaggaaactaccactcggttcctgcagaccgaagccgtgaccctgcaggacgtgagaggccgggactaccagaacgccatgcgggtgtggtccaacatccctggactgaaaagcaagcacgcacctctgacccctaaagaagaggagtacctgcaggcccaggtgcggagcagaagcaagctggacgcccctaaggtggatctgctggtgaagaattgcctcctgcccctgagagagtacttcaagtatttcagccagaatagtctgcccctgggaggcagcggcggcggcaggcccggcgccgtgagcttcgccgacgtggccgtgtacttcagccccgaggagtggggctgcctgaggcccgcccagagggccctgtacagggacgtgatgagggagacctacggccacctgggcgccctgggcttcgccggcagcaagcccgccctgatcagctggctggagaggaagaaggaggtgtggagccccgaggccgaggaccccgaggacggcgccaggcaccccggcagcggcggcggcccaagcagcggcgcccctcctcccagcggcggcagcccagccggctccccaacctctaccgaggagggcacctctgagtccgccacccccgagagcggccctggcacctccaccgagcccagcgagggcagcgcacccggcagccctgccggcagccccacctccacagaggagggaaccagcaccgagcccagcgaaggcagcgccccaggcaccagcaccgagcctagtgagcaggagattaaacggatcaacaagatcagaagaagacttgtgaaagacagcaacaccaagaaggccggcaagacaggccccatgaaaaccctgctggttagagtgatgacacccgatctgagagagcggctggaaaacctgagaaagaagcctgaaaatatcccccagcccatcagcaatacatctagagccaacctgaataagctgctgaccgattacaccgaaatgaagaaggcgatcctgcatgtgtactgggaagagttccagaaggaccctgtgggcctgatgagccgggtggcccagcctgccagcaagaagatcgatcagaacaagctgaaacctgagatggacgagaagggcaacctgaccaccgccggctttgcctgctctcagtgtggccagcccctgttcgtgtacaagctggagcaggtgtctgagaagggcaaggcttacaccaactacttcggacggtgcaatgtggccgagcacgaaaagctgatcctgctggcccagctgaagcccgagaaggatagcgacgaagccgtgacatatagcctgggaaagtttgggcagagggccctggatttctacagcattcatgtgaccaaggagtccacccaccccgtgaagcccctggcccagatcgccggaaacagatacgcctccggacctgtgggaaaggccctgagcgacgcatgtatgggcacaatcgcctccttcctgtctaagtaccaggacatcatcatcgaacaccagaaggtggtgaagggcaaccagaagagactggagagcctgcgggagctggccggcaaggaaaacctggaataccctagcgtgaccctgccacctcagcctcacaccaaggagggcgttgatgcctacaacgaagtgatcgcccgggtgcgaatgtgggtgaacctgaacctgtggcagaagctgaagctaagcagagatgatgccaagcctctgctgagactgaagggattcccttcctttcctctggtcgagagacaggccaacgaagtggactggtgggacatggtgtgtaacgtgaagaagctgatcaacgagaaaaaggaggatggcaaggtgttttggcagaatctggctggctacaagagacaggaagccctgagaccatacctgagcagcgaggaagatcggaagaagggaaagaaattcgctcggtaccagctgggcgacctgctgctgcacctggaaaagaagcacggcgaggactggggaaaggtgtacgacgaggcctgggagcggattgacaagaaagtggaaggcctgagcaagcacatcaagctggaagaggaacggagaagcgaggacgcccagagcaaggccgccctgaccgactggctgcgggctaaggccagcttcgtgatcgagggcctgaaggaggccgacaaggacgagttctgcagatgcgagctgaagctgcagaagtggtacggggacctgcggggaaagcccttcgccatcgaagccgagaacagcatcctggacatcagcggcttcagcaagcagtacaactgtgccttcatctggcagaaggacggcgtgaagaagctgaacctgtacctgatcatcaactacttcaagggcggcaagctgcggttcaagaagatcaaacctgaagccttcgaagccaacagattctacaccgtgatcaacaaaaagagcggcgagatcgtgcccatggaggtgaacttcaacttcgacgaccccaacctgatcatcctgcctctggcctttggcaagagacagggcagagaattcatctggaacgacctgctgtccctggaaaccggcagcctgaagctggccaacggaagagtgatcgagaagacactgtacaacagaagaacccggcaggatgagcctgccctgttcgtggccctgaccttcgagcggcgggaggtcctggactcctccaatatcaaaccaatgaacctgatcggcgtggcaagaggcgaaaacatccccgccgtgatcgccctgaccgaccccgagggctgcccactgagccggtttaaggatagcctgggaaacccaacccacatcctgagaatcggcgagagctataaggagaagcagcggaccatccaggccaagaaggaggtggagcagcggagagccggcggctacagccggaagtacgccagcaaagccaagaatctggcagacgatatggtgagaaacaccgctagagatctgctgtactacgccgtgacccaggatgccatgctgatcttcgccaacctgagccggggcttcggccggcagggcaagcggaccttcatggccgagagacagtacacacggatggaggactggctgaccgccaagctggcctacgagggcctgagcaagacctacctgtccaagacactggcccagtacacctccaagacatgcagcaactgtgggtttaccatcaccagcgccgactacgacagggtgctggagaagctgaagaagacagcaacaggctggatgaccacaattaacggcaaggagctgaaggtggagggccagattacctactacaacagatacaagagacagaacgtagtcaaggacctgtccgtcgagctggatagactgagcgaagaatctgtgaacaacgacatctcctcctggacaaagggcagaagcggagaagctctgagcctcctgaagaaaagattctcccatagacccgtgcaggagaagttcgtgtgcctgaactgcggcttcgagacacacgcagccgagcaagccgccctgaacatcgccagatcctggctgttcctgcggagccaggagtacaagaaataccagacaaacaagacaaccggcaacaccgataagagagccttcgtcgagacctggcagtccttttaccggaagaagcttaaggaggtgtggaaacctgccgtgcggtctggcggatctggcggaggctccaccagccccaagaaaaagagaaaagtctaagctgccttctgcggggcttgccttctggccatgcccttcttctctcccttgcacctgtacctcttggtctttgaataaagcctgagtaggaaggctagcaaaaaaaaaaaaaaaaaaaaaaaaaaaaaaaaaaaaaaaaaaaaaaaaaaaaaaaaaaaaaaaaaaaaaaaaaaaaaaaa

SEQ ID NO: 12238 - RNA, 5785 nt, synthetic construct
  source 1..5785: mol_type = other RNA
aggaaataagagagaaaagaagagtaagaagaaatataagagccaccatggcccctaagaagaagcgtaaagtgagccggatggaacgcctcgtctacgaggtgcggcagaagtgcagaaacatcgaggacatctgcatctcctgcggatctctgaacgtgaccctggagcacccactgttcatcggcggcatgtgccagaactgtaaaaactgttttctggagtgtgcctatcaatacgacgatgacggctaccagagctactgcaccatctgttgcggcggaagagaggtgctgatgtgtggaaataacaactgctgccggtgcttctgcgtggaatgcgtggacctgctggtgggccccggcgccgcccaggccgctattaaggaagatccttggaactgctacatgtgcggccacaagggcacatacggcctgctgagacggagagaggactggcctagcagactgcagatgttcttcgccaataaccacgaccaggagttcgacccccctaaggtgtaccctcccgtccccgccgagaagagaaagcccatccgggtcctgagcctgttcgatggcatcgccaccggtctgctggtgctgaaggacctgggcatccaggtggataggtacattgcctccgaggtgtgcgaggactccatcaccgtgggaatggtgcgtcatcagggcaagatcatgtacgtgggcgacgtgcggagcgtgacacagaagcatatccaggagtggggccctttcgacctggtgatcggcggcagcccttgcaatgacctgagcatcgtgaacccagcccggaagggcctgtacgagggaaccggcagactgttcttcgagttttacagactgctgcacgacgcccggcctaaggaaggcgacgaccggcccttcttttggctgttcgagaatgtggtggccatgggagtcagcgacaagcgggatattagccggttcctggagagcaaccccgtgatgatcgatgccaaggaagtgagcgccgcccaccgggccagatacttctggggcaatctgcctggcatgaacagacccctggccagcaccgtgaacgacaagctggagctgcaggagtgcctggagcacggccggatcgccaagttcagcaaggtgagaaccatcaccacccgaagcaacagcatcaaacaaggcaaggaccagcactttcctgtgttcatgaacgagaaggaggacatcctgtggtgtaccgagatggagagagtgttcgggttcccagtccactacacagatgtcagcaacatgtctagactggccagacagagactgctgggaagaagctggtccgtccctgtgatcagacacctgttcgcccctctgaaggagtacttcgcctgcgtgagcagcggcaacagcaacgccaacagccggggccccagcttctctagcggcctggtgccactgtccctgagagggagccacatgggccccatggagatctacaaaaccgtgagcgcctggaagcggcagcctgtgcgcgtgctgagcctgtttcggaatatcgataaagtcctgaaaagcctgggattcctggagagcggctctggctccggcggtggcaccctgaagtacgtggaggatgtgacaaacgtggtcagacgggatgtggagaagtggggccccttcgatctggtgtacggcagcacccaacccctgggcagctcttgtgaccggtgccctggctggtacatgtttcagttccaccggatcctgcagtacgccctgccgagacaggagtcccagcggccattcttttggattttcatggacaacttgctgctgaccgaggatgaccaggaaactaccactcggttcctgcagaccgaagccgtgaccctgcaggacgtgagaggccgggactaccagaacgccatgcgggtgtggtccaacatccctggactgaaaagcaagcacgcacctctgacccctaaagaagaggagtacctgcaggcccaggtgcggagcagaagcaagctggacgcccctaaggtggatctgctggtgaagaattgcctcctgcccctgagagagtacttcaagtatttcagccagaatagtctgcccctgggaggcagcggcggcggccaggccgaggtgaccttcgaggacgtggccgtgctgttcagcagggaggagtggggcaggctgggccccgcccagaggggcctgtacagggacgtgatgctggagacctacaggaacctggtgagcctgggcgccggccccgccggccccaagcccggcgtgatcacccagctggagaggggcgacgagccctgggtgctggacgcccagggcgccgagggcaaggagaggctgagggtgagcggcggcccaagcagcggcgcccctcctcccagcggcggcagcccagccggctccccaacctctaccgaggagggcacctctgagtccgccacccccgagagcggccctggcacctccaccgagcccagcgagggcagcgcacccggcagccctgccggcagccccacctccacagaggagggaaccagcaccgagcccagcgaaggcagcgccccaggcaccagcaccgagcctagtgagcaggagattaaacggatcaacaagatcagaagaagacttgtgaaagacagcaacaccaagaaggccggcaagacaggccccatgaaaaccctgctggttagagtgatgacacccgatctgagagagcggctggaaaacctgagaaagaagcctgaaaatatcccccagcccatcagcaatacatctagagccaacctgaataagctgctgaccgattacaccgaaatgaagaaggcgatcctgcatgtgtactgggaagagttccagaaggaccctgtgggcctgatgagccgggtggcccagcctgccagcaagaagatcgatcagaacaagctgaaacctgagatggacgagaagggcaacctgaccaccgccggctttgcctgctctcagtgtggccagcccctgttcgtgtacaagctggagcaggtgtctgagaagggcaaggcttacaccaactacttcggacggtgcaatgtggccgagcacgaaaagctgatcctgctggcccagctgaagcccgagaaggatagcgacgaagccgtgacatatagcctgggaaagtttgggcagagggccctggatttctacagcattcatgtgaccaaggagtccacccaccccgtgaagcccctggcccagatcgccggaaacagatacgcctccggacctgtgggaaaggccctgagcgacgcatgtatgggcacaatcgcctccttcctgtctaagtaccaggacatcatcatcgaacaccagaaggtggtgaagggcaaccagaagagactggagagcctgcgggagctggccggcaaggaaaacctggaataccctagcgtgaccctgccacctcagcctcacaccaaggagggcgttgatgcctacaacgaagtgatcgcccgggtgcgaatgtgggtgaacctgaacctgtggcagaagctgaagctaagcagagatgatgccaagcctctgctgagactgaagggattcccttcctttcctctggtcgagagacaggccaacgaagtggactggtgggacatggtgtgtaacgtgaagaagctgatcaacgagaaaaaggaggatggcaaggtgttttggcagaatctggctggctacaagagacaggaagccctgagaccatacctgagcagcgaggaagatcggaagaagggaaagaaattcgctcggtaccagctgggcgacctgctgctgcacctggaaaagaagcacggcgaggactggggaaaggtgtacgacgaggcctgggagcggattgacaagaaagtggaaggcctgagcaagcacatcaagctggaagaggaacggagaagcgaggacgcccagagcaaggccgccctgaccgactggctgcgggctaaggccagcttcgtgatcgagggcctgaaggaggccgacaaggacgagttctgcagatgcgagctgaagctgcagaagtggtacggggacctgcggggaaagcccttcgccatcgaagccgagaacagcatcctggacatcagcggcttcagcaagcagtacaactgtgccttcatctggcagaaggacggcgtgaagaagctgaacctgtacctgatcatcaactacttcaagggcggcaagctgcggttcaagaagatcaaacctgaagccttcgaagccaacagattctacaccgtgatcaacaaaaagagcggcgagatcgtgcccatggaggtgaacttcaacttcgacgaccccaacctgatcatcctgcctctggcctttggcaagagacagggcagagaattcatctggaacgacctgctgtccctggaaaccggcagcctgaagctggccaacggaagagtgatcgagaagacactgtacaacagaagaacccggcaggatgagcctgccctgttcgtggccctgaccttcgagcggcgggaggtcctggactcctccaatatcaaaccaatgaacctgatcggcgtggcaagaggcgaaaacatccccgccgtgatcgccctgaccgaccccgagggctgcccactgagccggtttaaggatagcctgggaaacccaacccacatcctgagaatcggcgagagctataaggagaagcagcggaccatccaggccaagaaggaggtggagcagcggagagccggcggctacagccggaagtacgccagcaaagccaagaatctggcagacgatatggtgagaaacaccgctagagatctgctgtactacgccgtgacccaggatgccatgctgatcttcgccaacctgagccggggcttcggccggcagggcaagcggaccttcatggccgagagacagtacacacggatggaggactggctgaccgccaagctggcctacgagggcctgagcaagacctacctgtccaagacactggcccagtacacctccaagacatgcagcaactgtgggtttaccatcaccagcgccgactacgacagggtgctggagaagctgaagaagacagcaacaggctggatgaccacaattaacggcaaggagctgaaggtggagggccagattacctactacaacagatacaagagacagaacgtagtcaaggacctgtccgtcgagctggatagactgagcgaagaatctgtgaacaacgacatctcctcctggacaaagggcagaagcggagaagctctgagcctcctgaagaaaagattctcccatagacccgtgcaggagaagttcgtgtgcctgaactgcggcttcgagacacacgcagccgagcaagccgccctgaacatcgccagatcctggctgttcctgcggagccaggagtacaagaaataccagacaaacaagacaaccggcaacaccgataagagagccttcgtcgagacctggcagtccttttaccggaagaagcttaaggaggtgtggaaacctgccgtgcggtctggcggatctggcggaggctccaccagccccaagaaaaagagaaaagtctaagctgccttctgcggggcttgccttctggccatgcccttcttctctcccttgcacctgtacctcttggtctttgaataaagcctgagtaggaaggctagcaaaaaaaaaaaaaaaaaaaaaaaaaaaaaaaaaaaaaaaaaaaaaaaaaaaaaaaaaaaaaaaaaaaaaaaaaaaaaaaa

SEQ ID NO: 12239 - RNA, 5785 nt, synthetic construct
  source 1..5785: mol_type = other RNA
aggaaataagagagaaaagaagagtaagaagaaatataagagccaccatggcccctaagaagaagcgtaaagtgagccggatggaacgcctcgtctacgaggtgcggcagaagtgcagaaacatcgaggacatctgcatctcctgcggatctctgaacgtgaccctggagcacccactgttcatcggcggcatgtgccagaactgtaaaaactgttttctggagtgtgcctatcaatacgacgatgacggctaccagagctactgcaccatctgttgcggcggaagagaggtgctgatgtgtggaaataacaactgctgccggtgcttctgcgtggaatgcgtggacctgctggtgggccccggcgccgcccaggccgctattaaggaagatccttggaactgctacatgtgcggccacaagggcacatacggcctgctgagacggagagaggactggcctagcagactgcagatgttcttcgccaataaccacgaccaggagttcgacccccctaaggtgtaccctcccgtccccgccgagaagagaaagcccatccgggtcctgagcctgttcgatggcatcgccaccggtctgctggtgctgaaggacctgggcatccaggtggataggtacattgcctccgaggtgtgcgaggactccatcaccgtgggaatggtgcgtcatcagggcaagatcatgtacgtgggcgacgtgcggagcgtgacacagaagcatatccaggagtggggccctttcgacctggtgatcggcggcagcccttgcaatgacctgagcatcgtgaacccagcccggaagggcctgtacgagggaaccggcagactgttcttcgagttttacagactgctgcacgacgcccggcctaaggaaggcgacgaccggcccttcttttggctgttcgagaatgtggtggccatgggagtcagcgacaagcgggatattagccggttcctggagagcaaccccgtgatgatcgatgccaaggaagtgagcgccgcccaccgggccagatacttctggggcaatctgcctggcatgaacagacccctggccagcaccgtgaacgacaagctggagctgcaggagtgcctggagcacggccggatcgccaagttcagcaaggtgagaaccatcaccacccgaagcaacagcatcaaacaaggcaaggaccagcactttcctgtgttcatgaacgagaaggaggacatcctgtggtgtaccgagatggagagagtgttcgggttcccagtccactacacagatgtcagcaacatgtctagactggccagacagagactgctgggaagaagctggtccgtccctgtgatcagacacctgttcgcccctctgaaggagtacttcgcctgcgtgagcagcggcaacagcaacgccaacagccggggccccagcttctctagcggcctggtgccactgtccctgagagggagccacatgggccccatggagatctacaaaaccgtgagcgcctggaagcggcagcctgtgcgcgtgctgagcctgtttcggaatatcgataaagtcctgaaaagcctgggattcctggagagcggctctggctccggcggtggcaccctgaagtacgtggaggatgtgacaaacgtggtcagacgggatgtggagaagtggggccccttcgatctggtgtacggcagcacccaacccctgggcagctcttgtgaccggtgccctggctggtacatgtttcagttccaccggatcctgcagtacgccctgccgagacaggagtcccagcggccattcttttggattttcatggacaacttgctgctgaccgaggatgaccaggaaactaccactcggttcctgcagaccgaagccgtgaccctgcaggacgtgagaggccgggactaccagaacgccatgcgggtgtggtccaacatccctggactgaaaagcaagcacgcacctctgacccctaaagaagaggagtacctgcaggcccaggtgcggagcagaagcaagctggacgcccctaaggtggatctgctggtgaagaattgcctcctgcccctgagagagtacttcaagtatttcagccagaatagtctgcccctgggaggcagcggcggcggcagccagggccccgtgagcttcgaggacgtggccgtggacttcacccaggaggagtggcagcagctggaccccgcccagaggaccctgtacagggacgtgatgctggagaactacagccacctggtgagcgtgggctaccccgtgagcaagcccggcgtgatcagcaagctggagcagggcgaggagccctggatcatgaagagggacatcagcaactggatctaccccgacagggagaccaggggcggcccaagcagcggcgcccctcctcccagcggcggcagcccagccggctccccaacctctaccgaggagggcacctctgagtccgccacccccgagagcggccctggcacctccaccgagcccagcgagggcagcgcacccggcagccctgccggcagccccacctccacagaggagggaaccagcaccgagcccagcgaaggcagcgccccaggcaccagcaccgagcctagtgagcaggagattaaacggatcaacaagatcagaagaagacttgtgaaagacagcaacaccaagaaggccggcaagacaggccccatgaaaaccctgctggttagagtgatgacacccgatctgagagagcggctggaaaacctgagaaagaagcctgaaaatatcccccagcccatcagcaatacatctagagccaacctgaataagctgctgaccgattacaccgaaatgaagaaggcgatcctgcatgtgtactgggaagagttccagaaggaccctgtgggcctgatgagccgggtggcccagcctgccagcaagaagatcgatcagaacaagctgaaacctgagatggacgagaagggcaacctgaccaccgccggctttgcctgctctcagtgtggccagcccctgttcgtgtacaagctggagcaggtgtctgagaagggcaaggcttacaccaactacttcggacggtgcaatgtggccgagcacgaaaagctgatcctgctggcccagctgaagcccgagaaggatagcgacgaagccgtgacatatagcctgggaaagtttgggcagagggccctggatttctacagcattcatgtgaccaaggagtccacccaccccgtgaagcccctggcccagatcgccggaaacagatacgcctccggacctgtgggaaaggccctgagcgacgcatgtatgggcacaatcgcctccttcctgtctaagtaccaggacatcatcatcgaacaccagaaggtggtgaagggcaaccagaagagactggagagcctgcgggagctggccggcaaggaaaacctggaataccctagcgtgaccctgccacctcagcctcacaccaaggagggcgttgatgcctacaacgaagtgatcgcccgggtgcgaatgtgggtgaacctgaacctgtggcagaagctgaagctaagcagagatgatgccaagcctctgctgagactgaagggattcccttcctttcctctggtcgagagacaggccaacgaagtggactggtgggacatggtgtgtaacgtgaagaagctgatcaacgagaaaaaggaggatggcaaggtgttttggcagaatctggctggctacaagagacaggaagccctgagaccatacctgagcagcgaggaagatcggaagaagggaaagaaattcgctcggtaccagctgggcgacctgctgctgcacctggaaaagaagcacggcgaggactggggaaaggtgtacgacgaggcctgggagcggattgacaagaaagtggaaggcctgagcaagcacatcaagctggaagaggaacggagaagcgaggacgcccagagcaaggccgccctgaccgactggctgcgggctaaggccagcttcgtgatcgagggcctgaaggaggccgacaaggacgagttctgcagatgcgagctgaagctgcagaagtggtacggggacctgcggggaaagcccttcgccatcgaagccgagaacagcatcctggacatcagcggcttcagcaagcagtacaactgtgccttcatctggcagaaggacggcgtgaagaagctgaacctgtacctgatcatcaactacttcaagggcggcaagctgcggttcaagaagatcaaacctgaagccttcgaagccaacagattctacaccgtgatcaacaaaaagagcggcgagatcgtgcccatggaggtgaacttcaacttcgacgaccccaacctgatcatcctgcctctggcctttggcaagagacagggcagagaattcatctggaacgacctgctgtccctggaaaccggcagcctgaagctggccaacggaagagtgatcgagaagacactgtacaacagaagaacccggcaggatgagcctgccctgttcgtggccctgaccttcgagcggcgggaggtcctggactcctccaatatcaaaccaatgaacctgatcggcgtggcaagaggcgaaaacatccccgccgtgatcgccctgaccgaccccgagggctgcccactgagccggtttaaggatagcctgggaaacccaacccacatcctgagaatcggcgagagctataaggagaagcagcggaccatccaggccaagaaggaggtggagcagcggagagccggcggctacagccggaagtacgccagcaaagccaagaatctggcagacgatatggtgagaaacaccgctagagatctgctgtactacgccgtgacccaggatgccatgctgatcttcgccaacctgagccggggcttcggccggcagggcaagcggaccttcatggccgagagacagtacacacggatggaggactggctgaccgccaagctggcctacgagggcctgagcaagacctacctgtccaagacactggcccagtacacctccaagacatgcagcaactgtgggtttaccatcaccagcgccgactacgacagggtgctggagaagctgaagaagacagcaacaggctggatgaccacaattaacggcaaggagctgaaggtggagggccagattacctactacaacagatacaagagacagaacgtagtcaaggacctgtccgtcgagctggatagactgagcgaagaatctgtgaacaacgacatctcctcctggacaaagggcagaagcggagaagctctgagcctcctgaagaaaagattctcccatagacccgtgcaggagaagttcgtgtgcctgaactgcggcttcgagacacacgcagccgagcaagccgccctgaacatcgccagatcctggctgttcctgcggagccaggagtacaagaaataccagacaaacaagacaaccggcaacaccgataagagagccttcgtcgagacctggcagtccttttaccggaagaagcttaaggaggtgtggaaacctgccgtgcggtctggcggatctggcggaggctccaccagccccaagaaaaagagaaaagtctaagctgccttctgcggggcttgccttctggccatgcccttcttctctcccttgcacctgtacctcttggtctttgaataaagcctgagtaggaaggctagcaaaaaaaaaaaaaaaaaaaaaaaaaaaaaaaaaaaaaaaaaaaaaaaaaaaaaaaaaaaaaaaaaaaaaaaaaaaaaaaa

SEQ ID NO: 12240 - RNA, 5785 nt, synthetic construct
  source 1..5785: mol_type = other RNA
aggaaataagagagaaaagaagagtaagaagaaatataagagccaccatggcccctaagaagaagcgtaaagtgagccggatggaacgcctcgtctacgaggtgcggcagaagtgcagaaacatcgaggacatctgcatctcctgcggatctctgaacgtgaccctggagcacccactgttcatcggcggcatgtgccagaactgtaaaaactgttttctggagtgtgcctatcaatacgacgatgacggctaccagagctactgcaccatctgttgcggcggaagagaggtgctgatgtgtggaaataacaactgctgccggtgcttctgcgtggaatgcgtggacctgctggtgggccccggcgccgcccaggccgctattaaggaagatccttggaactgctacatgtgcggccacaagggcacatacggcctgctgagacggagagaggactggcctagcagactgcagatgttcttcgccaataaccacgaccaggagttcgacccccctaaggtgtaccctcccgtccccgccgagaagagaaagcccatccgggtcctgagcctgttcgatggcatcgccaccggtctgctggtgctgaaggacctgggcatccaggtggataggtacattgcctccgaggtgtgcgaggactccatcaccgtgggaatggtgcgtcatcagggcaagatcatgtacgtgggcgacgtgcggagcgtgacacagaagcatatccaggagtggggccctttcgacctggtgatcggcggcagcccttgcaatgacctgagcatcgtgaacccagcccggaagggcctgtacgagggaaccggcagactgttcttcgagttttacagactgctgcacgacgcccggcctaaggaaggcgacgaccggcccttcttttggctgttcgagaatgtggtggccatgggagtcagcgacaagcgggatattagccggttcctggagagcaaccccgtgatgatcgatgccaaggaagtgagcgccgcccaccgggccagatacttctggggcaatctgcctggcatgaacagacccctggccagcaccgtgaacgacaagctggagctgcaggagtgcctggagcacggccggatcgccaagttcagcaaggtgagaaccatcaccacccgaagcaacagcatcaaacaaggcaaggaccagcactttcctgtgttcatgaacgagaaggaggacatcctgtggtgtaccgagatggagagagtgttcgggttcccagtccactacacagatgtcagcaacatgtctagactggccagacagagactgctgggaagaagctggtccgtccctgtgatcagacacctgttcgcccctctgaaggagtacttcgcctgcgtgagcagcggcaacagcaacgccaacagccggggccccagcttctctagcggcctggtgccactgtccctgagagggagccacatgggccccatggagatctacaaaaccgtgagcgcctggaagcggcagcctgtgcgcgtgctgagcctgtttcggaatatcgataaagtcctgaaaagcctgggattcctggagagcggctctggctccggcggtggcaccctgaagtacgtggaggatgtgacaaacgtggtcagacgggatgtggagaagtggggccccttcgatctggtgtacggcagcacccaacccctgggcagctcttgtgaccggtgccctggctggtacatgtttcagttccaccggatcctgcagtacgccctgccgagacaggagtcccagcggccattcttttggattttcatggacaacttgctgctgaccgaggatgaccaggaaactaccactcggttcctgcagaccgaagccgtgaccctgcaggacgtgagaggccgggactaccagaacgccatgcgggtgtggtccaacatccctggactgaaaagcaagcacgcacctctgacccctaaagaagaggagtacctgcaggcccaggtgcggagcagaagcaagctggacgcccctaaggtggatctgctggtgaagaattgcctcctgcccctgagagagtacttcaagtatttcagccagaatagtctgcccctgggaggcagcggcggcggcagccagggcctggtgaccttcggcgacgtggccatcgacttcagccaggaggagtgggagtggctgagccccatccagaggaacctgtacaggaaggtgatgctggagaactacaggaacctggccagcctgggcctgtgcgtgagcaagcccgacgtgatcagcctgctggagcagggcaaggagccctggaccgtgaagaggaagatgaccagggccggctgccccgacctgaaggccgtgggcggcccaagcagcggcgcccctcctcccagcggcggcagcccagccggctccccaacctctaccgaggagggcacctctgagtccgccacccccgagagcggccctggcacctccaccgagcccagcgagggcagcgcacccggcagccctgccggcagccccacctccacagaggagggaaccagcaccgagcccagcgaaggcagcgccccaggcaccagcaccgagcctagtgagcaggagattaaacggatcaacaagatcagaagaagacttgtgaaagacagcaacaccaagaaggccggcaagacaggccccatgaaaaccctgctggttagagtgatgacacccgatctgagagagcggctggaaaacctgagaaagaagcctgaaaatatcccccagcccatcagcaatacatctagagccaacctgaataagctgctgaccgattacaccgaaatgaagaaggcgatcctgcatgtgtactgggaagagttccagaaggaccctgtgggcctgatgagccgggtggcccagcctgccagcaagaagatcgatcagaacaagctgaaacctgagatggacgagaagggcaacctgaccaccgccggctttgcctgctctcagtgtggccagcccctgttcgtgtacaagctggagcaggtgtctgagaagggcaaggcttacaccaactacttcggacggtgcaatgtggccgagcacgaaaagctgatcctgctggcccagctgaagcccgagaaggatagcgacgaagccgtgacatatagcctgggaaagtttgggcagagggccctggatttctacagcattcatgtgaccaaggagtccacccaccccgtgaagcccctggcccagatcgccggaaacagatacgcctccggacctgtgggaaaggccctgagcgacgcatgtatgggcacaatcgcctccttcctgtctaagtaccaggacatcatcatcgaacaccagaaggtggtgaagggcaaccagaagagactggagagcctgcgggagctggccggcaaggaaaacctggaataccctagcgtgaccctgccacctcagcctcacaccaaggagggcgttgatgcctacaacgaagtgatcgcccgggtgcgaatgtgggtgaacctgaacctgtggcagaagctgaagctaagcagagatgatgccaagcctctgctgagactgaagggattcccttcctttcctctggtcgagagacaggccaacgaagtggactggtgggacatggtgtgtaacgtgaagaagctgatcaacgagaaaaaggaggatggcaaggtgttttggcagaatctggctggctacaagagacaggaagccctgagaccatacctgagcagcgaggaagatcggaagaagggaaagaaattcgctcggtaccagctgggcgacctgctgctgcacctggaaaagaagcacggcgaggactggggaaaggtgtacgacgaggcctgggagcggattgacaagaaagtggaaggcctgagcaagcacatcaagctggaagaggaacggagaagcgaggacgcccagagcaaggccgccctgaccgactggctgcgggctaaggccagcttcgtgatcgagggcctgaaggaggccgacaaggacgagttctgcagatgcgagctgaagctgcagaagtggtacggggacctgcggggaaagcccttcgccatcgaagccgagaacagcatcctggacatcagcggcttcagcaagcagtacaactgtgccttcatctggcagaaggacggcgtgaagaagctgaacctgtacctgatcatcaactacttcaagggcggcaagctgcggttcaagaagatcaaacctgaagccttcgaagccaacagattctacaccgtgatcaacaaaaagagcggcgagatcgtgcccatggaggtgaacttcaacttcgacgaccccaacctgatcatcctgcctctggcctttggcaagagacagggcagagaattcatctggaacgacctgctgtccctggaaaccggcagcctgaagctggccaacggaagagtgatcgagaagacactgtacaacagaagaacccggcaggatgagcctgccctgttcgtggccctgaccttcgagcggcgggaggtcctggactcctccaatatcaaaccaatgaacctgatcggcgtggcaagaggcgaaaacatccccgccgtgatcgccctgaccgaccccgagggctgcccactgagccggtttaaggatagcctgggaaacccaacccacatcctgagaatcggcgagagctataaggagaagcagcggaccatccaggccaagaaggaggtggagcagcggagagccggcggctacagccggaagtacgccagcaaagccaagaatctggcagacgatatggtgagaaacaccgctagagatctgctgtactacgccgtgacccaggatgccatgctgatcttcgccaacctgagccggggcttcggccggcagggcaagcggaccttcatggccgagagacagtacacacggatggaggactggctgaccgccaagctggcctacgagggcctgagcaagacctacctgtccaagacactggcccagtacacctccaagacatgcagcaactgtgggtttaccatcaccagcgccgactacgacagggtgctggagaagctgaagaagacagcaacaggctggatgaccacaattaacggcaaggagctgaaggtggagggccagattacctactacaacagatacaagagacagaacgtagtcaaggacctgtccgtcgagctggatagactgagcgaagaatctgtgaacaacgacatctcctcctggacaaagggcagaagcggagaagctctgagcctcctgaagaaaagattctcccatagacccgtgcaggagaagttcgtgtgcctgaactgcggcttcgagacacacgcagccgagcaagccgccctgaacatcgccagatcctggctgttcctgcggagccaggagtacaagaaataccagacaaacaagacaaccggcaacaccgataagagagccttcgtcgagacctggcagtccttttaccggaagaagcttaaggaggtgtggaaacctgccgtgcggtctggcggatctggcggaggctccaccagccccaagaaaaagagaaaagtctaagctgccttctgcggggcttgccttctggccatgcccttcttctctcccttgcacctgtacctcttggtctttgaataaagcctgagtaggaaggctagcaaaaaaaaaaaaaaaaaaaaaaaaaaaaaaaaaaaaaaaaaaaaaaaaaaaaaaaaaaaaaaaaaaaaaaaaaaaaaaaa

SEQ ID NO: 12241 - RNA, 5785 nt, synthetic construct
  source 1..5785: mol_type = other RNA
aggaaataagagagaaaagaagagtaagaagaaatataagagccaccatggcccctaagaagaagcgtaaagtgagccggatggaacgcctcgtctacgaggtgcggcagaagtgcagaaacatcgaggacatctgcatctcctgcggatctctgaacgtgaccctggagcacccactgttcatcggcggcatgtgccagaactgtaaaaactgttttctggagtgtgcctatcaatacgacgatgacggctaccagagctactgcaccatctgttgcggcggaagagaggtgctgatgtgtggaaataacaactgctgccggtgcttctgcgtggaatgcgtggacctgctggtgggccccggcgccgcccaggccgctattaaggaagatccttggaactgctacatgtgcggccacaagggcacatacggcctgctgagacggagagaggactggcctagcagactgcagatgttcttcgccaataaccacgaccaggagttcgacccccctaaggtgtaccctcccgtccccgccgagaagagaaagcccatccgggtcctgagcctgttcgatggcatcgccaccggtctgctggtgctgaaggacctgggcatccaggtggataggtacattgcctccgaggtgtgcgaggactccatcaccgtgggaatggtgcgtcatcagggcaagatcatgtacgtgggcgacgtgcggagcgtgacacagaagcatatccaggagtggggccctttcgacctggtgatcggcggcagcccttgcaatgacctgagcatcgtgaacccagcccggaagggcctgtacgagggaaccggcagactgttcttcgagttttacagactgctgcacgacgcccggcctaaggaaggcgacgaccggcccttcttttggctgttcgagaatgtggtggccatgggagtcagcgacaagcgggatattagccggttcctggagagcaaccccgtgatgatcgatgccaaggaagtgagcgccgcccaccgggccagatacttctggggcaatctgcctggcatgaacagacccctggccagcaccgtgaacgacaagctggagctgcaggagtgcctggagcacggccggatcgccaagttcagcaaggtgagaaccatcaccacccgaagcaacagcatcaaacaaggcaaggaccagcactttcctgtgttcatgaacgagaaggaggacatcctgtggtgtaccgagatggagagagtgttcgggttcccagtccactacacagatgtcagcaacatgtctagactggccagacagagactgctgggaagaagctggtccgtccctgtgatcagacacctgttcgcccctctgaaggagtacttcgcctgcgtgagcagcggcaacagcaacgccaacagccggggccccagcttctctagcggcctggtgccactgtccctgagagggagccacatgggccccatggagatctacaaaaccgtgagcgcctggaagcggcagcctgtgcgcgtgctgagcctgtttcggaatatcgataaagtcctgaaaagcctgggattcctggagagcggctctggctccggcggtggcaccctgaagtacgtggaggatgtgacaaacgtggtcagacgggatgtggagaagtggggccccttcgatctggtgtacggcagcacccaacccctgggcagctcttgtgaccggtgccctggctggtacatgtttcagttccaccggatcctgcagtacgccctgccgagacaggagtcccagcggccattcttttggattttcatggacaacttgctgctgaccgaggatgaccaggaaactaccactcggttcctgcagaccgaagccgtgaccctgcaggacgtgagaggccgggactaccagaacgccatgcgggtgtggtccaacatccctggactgaaaagcaagcacgcacctctgacccctaaagaagaggagtacctgcaggcccaggtgcggagcagaagcaagctggacgcccctaaggtggatctgctggtgaagaattgcctcctgcccctgagagagtacttcaagtatttcagccagaatagtctgcccctgggaggcagcggcggcggcagccaggagctgctgaccttcaaggacatcagcgtggacttcacccaggaggagtggggccagctggcccccgcccacaggaacctgtacagggaggtgatgctggagaactacggcaacctggtgagcgtggccggctgccagctgagcaagcccagcgtgatcagccagctggagaagggcgaggagccctggatgaccgagaaggagggccccggcgaccccagcagcgacctgaagagcggcggcccaagcagcggcgcccctcctcccagcggcggcagcccagccggctccccaacctctaccgaggagggcacctctgagtccgccacccccgagagcggccctggcacctccaccgagcccagcgagggcagcgcacccggcagccctgccggcagccccacctccacagaggagggaaccagcaccgagcccagcgaaggcagcgccccaggcaccagcaccgagcctagtgagcaggagattaaacggatcaacaagatcagaagaagacttgtgaaagacagcaacaccaagaaggccggcaagacaggccccatgaaaaccctgctggttagagtgatgacacccgatctgagagagcggctggaaaacctgagaaagaagcctgaaaatatcccccagcccatcagcaatacatctagagccaacctgaataagctgctgaccgattacaccgaaatgaagaaggcgatcctgcatgtgtactgggaagagttccagaaggaccctgtgggcctgatgagccgggtggcccagcctgccagcaagaagatcgatcagaacaagctgaaacctgagatggacgagaagggcaacctgaccaccgccggctttgcctgctctcagtgtggccagcccctgttcgtgtacaagctggagcaggtgtctgagaagggcaaggcttacaccaactacttcggacggtgcaatgtggccgagcacgaaaagctgatcctgctggcccagctgaagcccgagaaggatagcgacgaagccgtgacatatagcctgggaaagtttgggcagagggccctggatttctacagcattcatgtgaccaaggagtccacccaccccgtgaagcccctggcccagatcgccggaaacagatacgcctccggacctgtgggaaaggccctgagcgacgcatgtatgggcacaatcgcctccttcctgtctaagtaccaggacatcatcatcgaacaccagaaggtggtgaagggcaaccagaagagactggagagcctgcgggagctggccggcaaggaaaacctggaataccctagcgtgaccctgccacctcagcctcacaccaaggagggcgttgatgcctacaacgaagtgatcgcccgggtgcgaatgtgggtgaacctgaacctgtggcagaagctgaagctaagcagagatgatgccaagcctctgctgagactgaagggattcccttcctttcctctggtcgagagacaggccaacgaagtggactggtgggacatggtgtgtaacgtgaagaagctgatcaacgagaaaaaggaggatggcaaggtgttttggcagaatctggctggctacaagagacaggaagccctgagaccatacctgagcagcgaggaagatcggaagaagggaaagaaattcgctcggtaccagctgggcgacctgctgctgcacctggaaaagaagcacggcgaggactggggaaaggtgtacgacgaggcctgggagcggattgacaagaaagtggaaggcctgagcaagcacatcaagctggaagaggaacggagaagcgaggacgcccagagcaaggccgccctgaccgactggctgcgggctaaggccagcttcgtgatcgagggcctgaaggaggccgacaaggacgagttctgcagatgcgagctgaagctgcagaagtggtacggggacctgcggggaaagcccttcgccatcgaagccgagaacagcatcctggacatcagcggcttcagcaagcagtacaactgtgccttcatctggcagaaggacggcgtgaagaagctgaacctgtacctgatcatcaactacttcaagggcggcaagctgcggttcaagaagatcaaacctgaagccttcgaagccaacagattctacaccgtgatcaacaaaaagagcggcgagatcgtgcccatggaggtgaacttcaacttcgacgaccccaacctgatcatcctgcctctggcctttggcaagagacagggcagagaattcatctggaacgacctgctgtccctggaaaccggcagcctgaagctggccaacggaagagtgatcgagaagacactgtacaacagaagaacccggcaggatgagcctgccctgttcgtggccctgaccttcgagcggcgggaggtcctggactcctccaatatcaaaccaatgaacctgatcggcgtggcaagaggcgaaaacatccccgccgtgatcgccctgaccgaccccgagggctgcccactgagccggtttaaggatagcctgggaaacccaacccacatcctgagaatcggcgagagctataaggagaagcagcggaccatccaggccaagaaggaggtggagcagcggagagccggcggctacagccggaagtacgccagcaaagccaagaatctggcagacgatatggtgagaaacaccgctagagatctgctgtactacgccgtgacccaggatgccatgctgatcttcgccaacctgagccggggcttcggccggcagggcaagcggaccttcatggccgagagacagtacacacggatggaggactggctgaccgccaagctggcctacgagggcctgagcaagacctacctgtccaagacactggcccagtacacctccaagacatgcagcaactgtgggtttaccatcaccagcgccgactacgacagggtgctggagaagctgaagaagacagcaacaggctggatgaccacaattaacggcaaggagctgaaggtggagggccagattacctactacaacagatacaagagacagaacgtagtcaaggacctgtccgtcgagctggatagactgagcgaagaatctgtgaacaacgacatctcctcctggacaaagggcagaagcggagaagctctgagcctcctgaagaaaagattctcccatagacccgtgcaggagaagttcgtgtgcctgaactgcggcttcgagacacacgcagccgagcaagccgccctgaacatcgccagatcctggctgttcctgcggagccaggagtacaagaaataccagacaaacaagacaaccggcaacaccgataagagagccttcgtcgagacctggcagtccttttaccggaagaagcttaaggaggtgtggaaacctgccgtgcggtctggcggatctggcggaggctccaccagccccaagaaaaagagaaaagtctaagctgccttctgcggggcttgccttctggccatgcccttcttctctcccttgcacctgtacctcttggtctttgaataaagcctgagtaggaaggctagcaaaaaaaaaaaaaaaaaaaaaaaaaaaaaaaaaaaaaaaaaaaaaaaaaaaaaaaaaaaaaaaaaaaaaaaaaaaaaaaa

SEQ ID NO: 12242 - RNA, 5785 nt, synthetic construct
  source 1..5785: mol_type = other RNA
aggaaataagagagaaaagaagagtaagaagaaatataagagccaccatggcccctaagaagaagcgtaaagtgagccggatggaacgcctcgtctacgaggtgcggcagaagtgcagaaacatcgaggacatctgcatctcctgcggatctctgaacgtgaccctggagcacccactgttcatcggcggcatgtgccagaactgtaaaaactgttttctggagtgtgcctatcaatacgacgatgacggctaccagagctactgcaccatctgttgcggcggaagagaggtgctgatgtgtggaaataacaactgctgccggtgcttctgcgtggaatgcgtggacctgctggtgggccccggcgccgcccaggccgctattaaggaagatccttggaactgctacatgtgcggccacaagggcacatacggcctgctgagacggagagaggactggcctagcagactgcagatgttcttcgccaataaccacgaccaggagttcgacccccctaaggtgtaccctcccgtccccgccgagaagagaaagcccatccgggtcctgagcctgttcgatggcatcgccaccggtctgctggtgctgaaggacctgggcatccaggtggataggtacattgcctccgaggtgtgcgaggactccatcaccgtgggaatggtgcgtcatcagggcaagatcatgtacgtgggcgacgtgcggagcgtgacacagaagcatatccaggagtggggccctttcgacctggtgatcggcggcagcccttgcaatgacctgagcatcgtgaacccagcccggaagggcctgtacgagggaaccggcagactgttcttcgagttttacagactgctgcacgacgcccggcctaaggaaggcgacgaccggcccttcttttggctgttcgagaatgtggtggccatgggagtcagcgacaagcgggatattagccggttcctggagagcaaccccgtgatgatcgatgccaaggaagtgagcgccgcccaccgggccagatacttctggggcaatctgcctggcatgaacagacccctggccagcaccgtgaacgacaagctggagctgcaggagtgcctggagcacggccggatcgccaagttcagcaaggtgagaaccatcaccacccgaagcaacagcatcaaacaaggcaaggaccagcactttcctgtgttcatgaacgagaaggaggacatcctgtggtgtaccgagatggagagagtgttcgggttcccagtccactacacagatgtcagcaacatgtctagactggccagacagagactgctgggaagaagctggtccgtccctgtgatcagacacctgttcgcccctctgaaggagtacttcgcctgcgtgagcagcggcaacagcaacgccaacagccggggccccagcttctctagcggcctggtgccactgtccctgagagggagccacatgggccccatggagatctacaaaaccgtgagcgcctggaagcggcagcctgtgcgcgtgctgagcctgtttcggaatatcgataaagtcctgaaaagcctgggattcctggagagcggctctggctccggcggtggcaccctgaagtacgtggaggatgtgacaaacgtggtcagacgggatgtggagaagtggggccccttcgatctggtgtacggcagcacccaacccctgggcagctcttgtgaccggtgccctggctggtacatgtttcagttccaccggatcctgcagtacgccctgccgagacaggagtcccagcggccattcttttggattttcatggacaacttgctgctgaccgaggatgaccaggaaactaccactcggttcctgcagaccgaagccgtgaccctgcaggacgtgagaggccgggactaccagaacgccatgcgggtgtggtccaacatccctggactgaaaagcaagcacgcacctctgacccctaaagaagaggagtacctgcaggcccaggtgcggagcagaagcaagctggacgcccctaaggtggatctgctggtgaagaattgcctcctgcccctgagagagtacttcaagtatttcagccagaatagtctgcccctgggaggcagcggcggcggcatgcccggcccccccggcagcctggagatggaccccctgaccttcagggacgtggccatcgagttcagcctggaggagtggcagtgcctggacaccgcccagcagaacctgtacaggaacgtgatgctggagaactacaagaacctggccttcctgggcatcgccgtgagcaagcccgacctgatcaccaggctggagaaggagaaggagccctggaagatgaagaggcacaggatggtggacggcggcccaagcagcggcgcccctcctcccagcggcggcagcccagccggctccccaacctctaccgaggagggcacctctgagtccgccacccccgagagcggccctggcacctccaccgagcccagcgagggcagcgcacccggcagccctgccggcagccccacctccacagaggagggaaccagcaccgagcccagcgaaggcagcgccccaggcaccagcaccgagcctagtgagcaggagattaaacggatcaacaagatcagaagaagacttgtgaaagacagcaacaccaagaaggccggcaagacaggccccatgaaaaccctgctggttagagtgatgacacccgatctgagagagcggctggaaaacctgagaaagaagcctgaaaatatcccccagcccatcagcaatacatctagagccaacctgaataagctgctgaccgattacaccgaaatgaagaaggcgatcctgcatgtgtactgggaagagttccagaaggaccctgtgggcctgatgagccgggtggcccagcctgccagcaagaagatcgatcagaacaagctgaaacctgagatggacgagaagggcaacctgaccaccgccggctttgcctgctctcagtgtggccagcccctgttcgtgtacaagctggagcaggtgtctgagaagggcaaggcttacaccaactacttcggacggtgcaatgtggccgagcacgaaaagctgatcctgctggcccagctgaagcccgagaaggatagcgacgaagccgtgacatatagcctgggaaagtttgggcagagggccctggatttctacagcattcatgtgaccaaggagtccacccaccccgtgaagcccctggcccagatcgccggaaacagatacgcctccggacctgtgggaaaggccctgagcgacgcatgtatgggcacaatcgcctccttcctgtctaagtaccaggacatcatcatcgaacaccagaaggtggtgaagggcaaccagaagagactggagagcctgcgggagctggccggcaaggaaaacctggaataccctagcgtgaccctgccacctcagcctcacaccaaggagggcgttgatgcctacaacgaagtgatcgcccgggtgcgaatgtgggtgaacctgaacctgtggcagaagctgaagctaagcagagatgatgccaagcctctgctgagactgaagggattcccttcctttcctctggtcgagagacaggccaacgaagtggactggtgggacatggtgtgtaacgtgaagaagctgatcaacgagaaaaaggaggatggcaaggtgttttggcagaatctggctggctacaagagacaggaagccctgagaccatacctgagcagcgaggaagatcggaagaagggaaagaaattcgctcggtaccagctgggcgacctgctgctgcacctggaaaagaagcacggcgaggactggggaaaggtgtacgacgaggcctgggagcggattgacaagaaagtggaaggcctgagcaagcacatcaagctggaagaggaacggagaagcgaggacgcccagagcaaggccgccctgaccgactggctgcgggctaaggccagcttcgtgatcgagggcctgaaggaggccgacaaggacgagttctgcagatgcgagctgaagctgcagaagtggtacggggacctgcggggaaagcccttcgccatcgaagccgagaacagcatcctggacatcagcggcttcagcaagcagtacaactgtgccttcatctggcagaaggacggcgtgaagaagctgaacctgtacctgatcatcaactacttcaagggcggcaagctgcggttcaagaagatcaaacctgaagccttcgaagccaacagattctacaccgtgatcaacaaaaagagcggcgagatcgtgcccatggaggtgaacttcaacttcgacgaccccaacctgatcatcctgcctctggcctttggcaagagacagggcagagaattcatctggaacgacctgctgtccctggaaaccggcagcctgaagctggccaacggaagagtgatcgagaagacactgtacaacagaagaacccggcaggatgagcctgccctgttcgtggccctgaccttcgagcggcgggaggtcctggactcctccaatatcaaaccaatgaacctgatcggcgtggcaagaggcgaaaacatccccgccgtgatcgccctgaccgaccccgagggctgcccactgagccggtttaaggatagcctgggaaacccaacccacatcctgagaatcggcgagagctataaggagaagcagcggaccatccaggccaagaaggaggtggagcagcggagagccggcggctacagccggaagtacgccagcaaagccaagaatctggcagacgatatggtgagaaacaccgctagagatctgctgtactacgccgtgacccaggatgccatgctgatcttcgccaacctgagccggggcttcggccggcagggcaagcggaccttcatggccgagagacagtacacacggatggaggactggctgaccgccaagctggcctacgagggcctgagcaagacctacctgtccaagacactggcccagtacacctccaagacatgcagcaactgtgggtttaccatcaccagcgccgactacgacagggtgctggagaagctgaagaagacagcaacaggctggatgaccacaattaacggcaaggagctgaaggtggagggccagattacctactacaacagatacaagagacagaacgtagtcaaggacctgtccgtcgagctggatagactgagcgaagaatctgtgaacaacgacatctcctcctggacaaagggcagaagcggagaagctctgagcctcctgaagaaaagattctcccatagacccgtgcaggagaagttcgtgtgcctgaactgcggcttcgagacacacgcagccgagcaagccgccctgaacatcgccagatcctggctgttcctgcggagccaggagtacaagaaataccagacaaacaagacaaccggcaacaccgataagagagccttcgtcgagacctggcagtccttttaccggaagaagcttaaggaggtgtggaaacctgccgtgcggtctggcggatctggcggaggctccaccagccccaagaaaaagagaaaagtctaagctgccttctgcggggcttgccttctggccatgcccttcttctctcccttgcacctgtacctcttggtctttgaataaagcctgagtaggaaggctagcaaaaaaaaaaaaaaaaaaaaaaaaaaaaaaaaaaaaaaaaaaaaaaaaaaaaaaaaaaaaaaaaaaaaaaaaaaaaaaaa

SEQ ID NO: 12243 - RNA, 5785 nt, synthetic construct
  source 1..5785: mol_type = other RNA
aggaaataagagagaaaagaagagtaagaagaaatataagagccaccatggcccctaagaagaagcgtaaagtgagccggatggaacgcctcgtctacgaggtgcggcagaagtgcagaaacatcgaggacatctgcatctcctgcggatctctgaacgtgaccctggagcacccactgttcatcggcggcatgtgccagaactgtaaaaactgttttctggagtgtgcctatcaatacgacgatgacggctaccagagctactgcaccatctgttgcggcggaagagaggtgctgatgtgtggaaataacaactgctgccggtgcttctgcgtggaatgcgtggacctgctggtgggccccggcgccgcccaggccgctattaaggaagatccttggaactgctacatgtgcggccacaagggcacatacggcctgctgagacggagagaggactggcctagcagactgcagatgttcttcgccaataaccacgaccaggagttcgacccccctaaggtgtaccctcccgtccccgccgagaagagaaagcccatccgggtcctgagcctgttcgatggcatcgccaccggtctgctggtgctgaaggacctgggcatccaggtggataggtacattgcctccgaggtgtgcgaggactccatcaccgtgggaatggtgcgtcatcagggcaagatcatgtacgtgggcgacgtgcggagcgtgacacagaagcatatccaggagtggggccctttcgacctggtgatcggcggcagcccttgcaatgacctgagcatcgtgaacccagcccggaagggcctgtacgagggaaccggcagactgttcttcgagttttacagactgctgcacgacgcccggcctaaggaaggcgacgaccggcccttcttttggctgttcgagaatgtggtggccatgggagtcagcgacaagcgggatattagccggttcctggagagcaaccccgtgatgatcgatgccaaggaagtgagcgccgcccaccgggccagatacttctggggcaatctgcctggcatgaacagacccctggccagcaccgtgaacgacaagctggagctgcaggagtgcctggagcacggccggatcgccaagttcagcaaggtgagaaccatcaccacccgaagcaacagcatcaaacaaggcaaggaccagcactttcctgtgttcatgaacgagaaggaggacatcctgtggtgtaccgagatggagagagtgttcgggttcccagtccactacacagatgtcagcaacatgtctagactggccagacagagactgctgggaagaagctggtccgtccctgtgatcagacacctgttcgcccctctgaaggagtacttcgcctgcgtgagcagcggcaacagcaacgccaacagccggggccccagcttctctagcggcctggtgccactgtccctgagagggagccacatgggccccatggagatctacaaaaccgtgagcgcctggaagcggcagcctgtgcgcgtgctgagcctgtttcggaatatcgataaagtcctgaaaagcctgggattcctggagagcggctctggctccggcggtggcaccctgaagtacgtggaggatgtgacaaacgtggtcagacgggatgtggagaagtggggccccttcgatctggtgtacggcagcacccaacccctgggcagctcttgtgaccggtgccctggctggtacatgtttcagttccaccggatcctgcagtacgccctgccgagacaggagtcccagcggccattcttttggattttcatggacaacttgctgctgaccgaggatgaccaggaaactaccactcggttcctgcagaccgaagccgtgaccctgcaggacgtgagaggccgggactaccagaacgccatgcgggtgtggtccaacatccctggactgaaaagcaagcacgcacctctgacccctaaagaagaggagtacctgcaggcccaggtgcggagcagaagcaagctggacgcccctaaggtggatctgctggtgaagaattgcctcctgcccctgagagagtacttcaagtatttcagccagaatagtctgcccctgggaggcagcggcggcggcaacgccgtgacctacaacgacgtgcacgtggacttcacccaggaggagtgggccctgatggaccccagccagaggaacctgtacaaggacgtgatggtggagacctacatgaacctgaccgccatcggctacaactgggaggacctggaggtggaggagcactgccagaacagcctgaagcacggcaggcacaagaggccccacaccaccgagaagagctgcgagtacatgggctgcggcaagggcggcccaagcagcggcgcccctcctcccagcggcggcagcccagccggctccccaacctctaccgaggagggcacctctgagtccgccacccccgagagcggccctggcacctccaccgagcccagcgagggcagcgcacccggcagccctgccggcagccccacctccacagaggagggaaccagcaccgagcccagcgaaggcagcgccccaggcaccagcaccgagcctagtgagcaggagattaaacggatcaacaagatcagaagaagacttgtgaaagacagcaacaccaagaaggccggcaagacaggccccatgaaaaccctgctggttagagtgatgacacccgatctgagagagcggctggaaaacctgagaaagaagcctgaaaatatcccccagcccatcagcaatacatctagagccaacctgaataagctgctgaccgattacaccgaaatgaagaaggcgatcctgcatgtgtactgggaagagttccagaaggaccctgtgggcctgatgagccgggtggcccagcctgccagcaagaagatcgatcagaacaagctgaaacctgagatggacgagaagggcaacctgaccaccgccggctttgcctgctctcagtgtggccagcccctgttcgtgtacaagctggagcaggtgtctgagaagggcaaggcttacaccaactacttcggacggtgcaatgtggccgagcacgaaaagctgatcctgctggcccagctgaagcccgagaaggatagcgacgaagccgtgacatatagcctgggaaagtttgggcagagggccctggatttctacagcattcatgtgaccaaggagtccacccaccccgtgaagcccctggcccagatcgccggaaacagatacgcctccggacctgtgggaaaggccctgagcgacgcatgtatgggcacaatcgcctccttcctgtctaagtaccaggacatcatcatcgaacaccagaaggtggtgaagggcaaccagaagagactggagagcctgcgggagctggccggcaaggaaaacctggaataccctagcgtgaccctgccacctcagcctcacaccaaggagggcgttgatgcctacaacgaagtgatcgcccgggtgcgaatgtgggtgaacctgaacctgtggcagaagctgaagctaagcagagatgatgccaagcctctgctgagactgaagggattcccttcctttcctctggtcgagagacaggccaacgaagtggactggtgggacatggtgtgtaacgtgaagaagctgatcaacgagaaaaaggaggatggcaaggtgttttggcagaatctggctggctacaagagacaggaagccctgagaccatacctgagcagcgaggaagatcggaagaagggaaagaaattcgctcggtaccagctgggcgacctgctgctgcacctggaaaagaagcacggcgaggactggggaaaggtgtacgacgaggcctgggagcggattgacaagaaagtggaaggcctgagcaagcacatcaagctggaagaggaacggagaagcgaggacgcccagagcaaggccgccctgaccgactggctgcgggctaaggccagcttcgtgatcgagggcctgaaggaggccgacaaggacgagttctgcagatgcgagctgaagctgcagaagtggtacggggacctgcggggaaagcccttcgccatcgaagccgagaacagcatcctggacatcagcggcttcagcaagcagtacaactgtgccttcatctggcagaaggacggcgtgaagaagctgaacctgtacctgatcatcaactacttcaagggcggcaagctgcggttcaagaagatcaaacctgaagccttcgaagccaacagattctacaccgtgatcaacaaaaagagcggcgagatcgtgcccatggaggtgaacttcaacttcgacgaccccaacctgatcatcctgcctctggcctttggcaagagacagggcagagaattcatctggaacgacctgctgtccctggaaaccggcagcctgaagctggccaacggaagagtgatcgagaagacactgtacaacagaagaacccggcaggatgagcctgccctgttcgtggccctgaccttcgagcggcgggaggtcctggactcctccaatatcaaaccaatgaacctgatcggcgtggcaagaggcgaaaacatccccgccgtgatcgccctgaccgaccccgagggctgcccactgagccggtttaaggatagcctgggaaacccaacccacatcctgagaatcggcgagagctataaggagaagcagcggaccatccaggccaagaaggaggtggagcagcggagagccggcggctacagccggaagtacgccagcaaagccaagaatctggcagacgatatggtgagaaacaccgctagagatctgctgtactacgccgtgacccaggatgccatgctgatcttcgccaacctgagccggggcttcggccggcagggcaagcggaccttcatggccgagagacagtacacacggatggaggactggctgaccgccaagctggcctacgagggcctgagcaagacctacctgtccaagacactggcccagtacacctccaagacatgcagcaactgtgggtttaccatcaccagcgccgactacgacagggtgctggagaagctgaagaagacagcaacaggctggatgaccacaattaacggcaaggagctgaaggtggagggccagattacctactacaacagatacaagagacagaacgtagtcaaggacctgtccgtcgagctggatagactgagcgaagaatctgtgaacaacgacatctcctcctggacaaagggcagaagcggagaagctctgagcctcctgaagaaaagattctcccatagacccgtgcaggagaagttcgtgtgcctgaactgcggcttcgagacacacgcagccgagcaagccgccctgaacatcgccagatcctggctgttcctgcggagccaggagtacaagaaataccagacaaacaagacaaccggcaacaccgataagagagccttcgtcgagacctggcagtccttttaccggaagaagcttaaggaggtgtggaaacctgccgtgcggtctggcggatctggcggaggctccaccagccccaagaaaaagagaaaagtctaagctgccttctgcggggcttgccttctggccatgcccttcttctctcccttgcacctgtacctcttggtctttgaataaagcctgagtaggaaggctagcaaaaaaaaaaaaaaaaaaaaaaaaaaaaaaaaaaaaaaaaaaaaaaaaaaaaaaaaaaaaaaaaaaaaaaaaaaaaaaaa

SEQ ID NO: 12244 - RNA, 5785 nt, synthetic construct
  source 1..5785: mol_type = other RNA
aggaaataagagagaaaagaagagtaagaagaaatataagagccaccatggcccctaagaagaagcgtaaagtgagccggatggaacgcctcgtctacgaggtgcggcagaagtgcagaaacatcgaggacatctgcatctcctgcggatctctgaacgtgaccctggagcacccactgttcatcggcggcatgtgccagaactgtaaaaactgttttctggagtgtgcctatcaatacgacgatgacggctaccagagctactgcaccatctgttgcggcggaagagaggtgctgatgtgtggaaataacaactgctgccggtgcttctgcgtggaatgcgtggacctgctggtgggccccggcgccgcccaggccgctattaaggaagatccttggaactgctacatgtgcggccacaagggcacatacggcctgctgagacggagagaggactggcctagcagactgcagatgttcttcgccaataaccacgaccaggagttcgacccccctaaggtgtaccctcccgtccccgccgagaagagaaagcccatccgggtcctgagcctgttcgatggcatcgccaccggtctgctggtgctgaaggacctgggcatccaggtggataggtacattgcctccgaggtgtgcgaggactccatcaccgtgggaatggtgcgtcatcagggcaagatcatgtacgtgggcgacgtgcggagcgtgacacagaagcatatccaggagtggggccctttcgacctggtgatcggcggcagcccttgcaatgacctgagcatcgtgaacccagcccggaagggcctgtacgagggaaccggcagactgttcttcgagttttacagactgctgcacgacgcccggcctaaggaaggcgacgaccggcccttcttttggctgttcgagaatgtggtggccatgggagtcagcgacaagcgggatattagccggttcctggagagcaaccccgtgatgatcgatgccaaggaagtgagcgccgcccaccgggccagatacttctggggcaatctgcctggcatgaacagacccctggccagcaccgtgaacgacaagctggagctgcaggagtgcctggagcacggccggatcgccaagttcagcaaggtgagaaccatcaccacccgaagcaacagcatcaaacaaggcaaggaccagcactttcctgtgttcatgaacgagaaggaggacatcctgtggtgtaccgagatggagagagtgttcgggttcccagtccactacacagatgtcagcaacatgtctagactggccagacagagactgctgggaagaagctggtccgtccctgtgatcagacacctgttcgcccctctgaaggagtacttcgcctgcgtgagcagcggcaacagcaacgccaacagccggggccccagcttctctagcggcctggtgccactgtccctgagagggagccacatgggccccatggagatctacaaaaccgtgagcgcctggaagcggcagcctgtgcgcgtgctgagcctgtttcggaatatcgataaagtcctgaaaagcctgggattcctggagagcggctctggctccggcggtggcaccctgaagtacgtggaggatgtgacaaacgtggtcagacgggatgtggagaagtggggccccttcgatctggtgtacggcagcacccaacccctgggcagctcttgtgaccggtgccctggctggtacatgtttcagttccaccggatcctgcagtacgccctgccgagacaggagtcccagcggccattcttttggattttcatggacaacttgctgctgaccgaggatgaccaggaaactaccactcggttcctgcagaccgaagccgtgaccctgcaggacgtgagaggccgggactaccagaacgccatgcgggtgtggtccaacatccctggactgaaaagcaagcacgcacctctgacccctaaagaagaggagtacctgcaggcccaggtgcggagcagaagcaagctggacgcccctaaggtggatctgctggtgaagaattgcctcctgcccctgagagagtacttcaagtatttcagccagaatagtctgcccctgggaggcagcggcggcggcagccaggagcccgtgaccttcgaggacgtggccgtgtacttcacccagaaccagtgggccagcctggaccccacccagagggccctgtacagggaggtgatgctggagaactacgccaacatcaccagcctggccgccttccccttccccaagcccgacctgatcctgcagctggagaggggcgaggccaggtggggcctggacccctggatcgccatcgagggcgaggccctgggcggcgtgggcggcccaagcagcggcgcccctcctcccagcggcggcagcccagccggctccccaacctctaccgaggagggcacctctgagtccgccacccccgagagcggccctggcacctccaccgagcccagcgagggcagcgcacccggcagccctgccggcagccccacctccacagaggagggaaccagcaccgagcccagcgaaggcagcgccccaggcaccagcaccgagcctagtgagcaggagattaaacggatcaacaagatcagaagaagacttgtgaaagacagcaacaccaagaaggccggcaagacaggccccatgaaaaccctgctggttagagtgatgacacccgatctgagagagcggctggaaaacctgagaaagaagcctgaaaatatcccccagcccatcagcaatacatctagagccaacctgaataagctgctgaccgattacaccgaaatgaagaaggcgatcctgcatgtgtactgggaagagttccagaaggaccctgtgggcctgatgagccgggtggcccagcctgccagcaagaagatcgatcagaacaagctgaaacctgagatggacgagaagggcaacctgaccaccgccggctttgcctgctctcagtgtggccagcccctgttcgtgtacaagctggagcaggtgtctgagaagggcaaggcttacaccaactacttcggacggtgcaatgtggccgagcacgaaaagctgatcctgctggcccagctgaagcccgagaaggatagcgacgaagccgtgacatatagcctgggaaagtttgggcagagggccctggatttctacagcattcatgtgaccaaggagtccacccaccccgtgaagcccctggcccagatcgccggaaacagatacgcctccggacctgtgggaaaggccctgagcgacgcatgtatgggcacaatcgcctccttcctgtctaagtaccaggacatcatcatcgaacaccagaaggtggtgaagggcaaccagaagagactggagagcctgcgggagctggccggcaaggaaaacctggaataccctagcgtgaccctgccacctcagcctcacaccaaggagggcgttgatgcctacaacgaagtgatcgcccgggtgcgaatgtgggtgaacctgaacctgtggcagaagctgaagctaagcagagatgatgccaagcctctgctgagactgaagggattcccttcctttcctctggtcgagagacaggccaacgaagtggactggtgggacatggtgtgtaacgtgaagaagctgatcaacgagaaaaaggaggatggcaaggtgttttggcagaatctggctggctacaagagacaggaagccctgagaccatacctgagcagcgaggaagatcggaagaagggaaagaaattcgctcggtaccagctgggcgacctgctgctgcacctggaaaagaagcacggcgaggactggggaaaggtgtacgacgaggcctgggagcggattgacaagaaagtggaaggcctgagcaagcacatcaagctggaagaggaacggagaagcgaggacgcccagagcaaggccgccctgaccgactggctgcgggctaaggccagcttcgtgatcgagggcctgaaggaggccgacaaggacgagttctgcagatgcgagctgaagctgcagaagtggtacggggacctgcggggaaagcccttcgccatcgaagccgagaacagcatcctggacatcagcggcttcagcaagcagtacaactgtgccttcatctggcagaaggacggcgtgaagaagctgaacctgtacctgatcatcaactacttcaagggcggcaagctgcggttcaagaagatcaaacctgaagccttcgaagccaacagattctacaccgtgatcaacaaaaagagcggcgagatcgtgcccatggaggtgaacttcaacttcgacgaccccaacctgatcatcctgcctctggcctttggcaagagacagggcagagaattcatctggaacgacctgctgtccctggaaaccggcagcctgaagctggccaacggaagagtgatcgagaagacactgtacaacagaagaacccggcaggatgagcctgccctgttcgtggccctgaccttcgagcggcgggaggtcctggactcctccaatatcaaaccaatgaacctgatcggcgtggcaagaggcgaaaacatccccgccgtgatcgccctgaccgaccccgagggctgcccactgagccggtttaaggatagcctgggaaacccaacccacatcctgagaatcggcgagagctataaggagaagcagcggaccatccaggccaagaaggaggtggagcagcggagagccggcggctacagccggaagtacgccagcaaagccaagaatctggcagacgatatggtgagaaacaccgctagagatctgctgtactacgccgtgacccaggatgccatgctgatcttcgccaacctgagccggggcttcggccggcagggcaagcggaccttcatggccgagagacagtacacacggatggaggactggctgaccgccaagctggcctacgagggcctgagcaagacctacctgtccaagacactggcccagtacacctccaagacatgcagcaactgtgggtttaccatcaccagcgccgactacgacagggtgctggagaagctgaagaagacagcaacaggctggatgaccacaattaacggcaaggagctgaaggtggagggccagattacctactacaacagatacaagagacagaacgtagtcaaggacctgtccgtcgagctggatagactgagcgaagaatctgtgaacaacgacatctcctcctggacaaagggcagaagcggagaagctctgagcctcctgaagaaaagattctcccatagacccgtgcaggagaagttcgtgtgcctgaactgcggcttcgagacacacgcagccgagcaagccgccctgaacatcgccagatcctggctgttcctgcggagccaggagtacaagaaataccagacaaacaagacaaccggcaacaccgataagagagccttcgtcgagacctggcagtccttttaccggaagaagcttaaggaggtgtggaaacctgccgtgcggtctggcggatctggcggaggctccaccagccccaagaaaaagagaaaagtctaagctgccttctgcggggcttgccttctggccatgcccttcttctctcccttgcacctgtacctcttggtctttgaataaagcctgagtaggaaggctagcaaaaaaaaaaaaaaaaaaaaaaaaaaaaaaaaaaaaaaaaaaaaaaaaaaaaaaaaaaaaaaaaaaaaaaaaaaaaaaaa

SEQ ID NO: 12245 - RNA, 5785 nt, synthetic construct
  source 1..5785: mol_type = other RNA
aggaaataagagagaaaagaagagtaagaagaaatataagagccaccatggcccctaagaagaagcgtaaagtgagccggatggaacgcctcgtctacgaggtgcggcagaagtgcagaaacatcgaggacatctgcatctcctgcggatctctgaacgtgaccctggagcacccactgttcatcggcggcatgtgccagaactgtaaaaactgttttctggagtgtgcctatcaatacgacgatgacggctaccagagctactgcaccatctgttgcggcggaagagaggtgctgatgtgtggaaataacaactgctgccggtgcttctgcgtggaatgcgtggacctgctggtgggccccggcgccgcccaggccgctattaaggaagatccttggaactgctacatgtgcggccacaagggcacatacggcctgctgagacggagagaggactggcctagcagactgcagatgttcttcgccaataaccacgaccaggagttcgacccccctaaggtgtaccctcccgtccccgccgagaagagaaagcccatccgggtcctgagcctgttcgatggcatcgccaccggtctgctggtgctgaaggacctgggcatccaggtggataggtacattgcctccgaggtgtgcgaggactccatcaccgtgggaatggtgcgtcatcagggcaagatcatgtacgtgggcgacgtgcggagcgtgacacagaagcatatccaggagtggggccctttcgacctggtgatcggcggcagcccttgcaatgacctgagcatcgtgaacccagcccggaagggcctgtacgagggaaccggcagactgttcttcgagttttacagactgctgcacgacgcccggcctaaggaaggcgacgaccggcccttcttttggctgttcgagaatgtggtggccatgggagtcagcgacaagcgggatattagccggttcctggagagcaaccccgtgatgatcgatgccaaggaagtgagcgccgcccaccgggccagatacttctggggcaatctgcctggcatgaacagacccctggccagcaccgtgaacgacaagctggagctgcaggagtgcctggagcacggccggatcgccaagttcagcaaggtgagaaccatcaccacccgaagcaacagcatcaaacaaggcaaggaccagcactttcctgtgttcatgaacgagaaggaggacatcctgtggtgtaccgagatggagagagtgttcgggttcccagtccactacacagatgtcagcaacatgtctagactggccagacagagactgctgggaagaagctggtccgtccctgtgatcagacacctgttcgcccctctgaaggagtacttcgcctgcgtgagcagcggcaacagcaacgccaacagccggggccccagcttctctagcggcctggtgccactgtccctgagagggagccacatgggccccatggagatctacaaaaccgtgagcgcctggaagcggcagcctgtgcgcgtgctgagcctgtttcggaatatcgataaagtcctgaaaagcctgggattcctggagagcggctctggctccggcggtggcaccctgaagtacgtggaggatgtgacaaacgtggtcagacgggatgtggagaagtggggccccttcgatctggtgtacggcagcacccaacccctgggcagctcttgtgaccggtgccctggctggtacatgtttcagttccaccggatcctgcagtacgccctgccgagacaggagtcccagcggccattcttttggattttcatggacaacttgctgctgaccgaggatgaccaggaaactaccactcggttcctgcagaccgaagccgtgaccctgcaggacgtgagaggccgggactaccagaacgccatgcgggtgtggtccaacatccctggactgaaaagcaagcacgcacctctgacccctaaagaagaggagtacctgcaggcccaggtgcggagcagaagcaagctggacgcccctaaggtggatctgctggtgaagaattgcctcctgcccctgagagagtacttcaagtatttcagccagaatagtctgcccctgggaggcagcggcggcggcgccagggtgagcgtgatgttcagcgacgtgagcatcgccttcagcagggaggagtgggagtacctggacctgagccagagggacctgtacaaggacgtgatgatggagaactacaggaacgtggccagcctgggctacttcatcagcaagcccgacgtgatcagcctgctggagcagggcaaggagccctggaaggtggtgaggaggaggaggaggaaccccgacctggagaccaaggacgagggcggcccaagcagcggcgcccctcctcccagcggcggcagcccagccggctccccaacctctaccgaggagggcacctctgagtccgccacccccgagagcggccctggcacctccaccgagcccagcgagggcagcgcacccggcagccctgccggcagccccacctccacagaggagggaaccagcaccgagcccagcgaaggcagcgccccaggcaccagcaccgagcctagtgagcaggagattaaacggatcaacaagatcagaagaagacttgtgaaagacagcaacaccaagaaggccggcaagacaggccccatgaaaaccctgctggttagagtgatgacacccgatctgagagagcggctggaaaacctgagaaagaagcctgaaaatatcccccagcccatcagcaatacatctagagccaacctgaataagctgctgaccgattacaccgaaatgaagaaggcgatcctgcatgtgtactgggaagagttccagaaggaccctgtgggcctgatgagccgggtggcccagcctgccagcaagaagatcgatcagaacaagctgaaacctgagatggacgagaagggcaacctgaccaccgccggctttgcctgctctcagtgtggccagcccctgttcgtgtacaagctggagcaggtgtctgagaagggcaaggcttacaccaactacttcggacggtgcaatgtggccgagcacgaaaagctgatcctgctggcccagctgaagcccgagaaggatagcgacgaagccgtgacatatagcctgggaaagtttgggcagagggccctggatttctacagcattcatgtgaccaaggagtccacccaccccgtgaagcccctggcccagatcgccggaaacagatacgcctccggacctgtgggaaaggccctgagcgacgcatgtatgggcacaatcgcctccttcctgtctaagtaccaggacatcatcatcgaacaccagaaggtggtgaagggcaaccagaagagactggagagcctgcgggagctggccggcaaggaaaacctggaataccctagcgtgaccctgccacctcagcctcacaccaaggagggcgttgatgcctacaacgaagtgatcgcccgggtgcgaatgtgggtgaacctgaacctgtggcagaagctgaagctaagcagagatgatgccaagcctctgctgagactgaagggattcccttcctttcctctggtcgagagacaggccaacgaagtggactggtgggacatggtgtgtaacgtgaagaagctgatcaacgagaaaaaggaggatggcaaggtgttttggcagaatctggctggctacaagagacaggaagccctgagaccatacctgagcagcgaggaagatcggaagaagggaaagaaattcgctcggtaccagctgggcgacctgctgctgcacctggaaaagaagcacggcgaggactggggaaaggtgtacgacgaggcctgggagcggattgacaagaaagtggaaggcctgagcaagcacatcaagctggaagaggaacggagaagcgaggacgcccagagcaaggccgccctgaccgactggctgcgggctaaggccagcttcgtgatcgagggcctgaaggaggccgacaaggacgagttctgcagatgcgagctgaagctgcagaagtggtacggggacctgcggggaaagcccttcgccatcgaagccgagaacagcatcctggacatcagcggcttcagcaagcagtacaactgtgccttcatctggcagaaggacggcgtgaagaagctgaacctgtacctgatcatcaactacttcaagggcggcaagctgcggttcaagaagatcaaacctgaagccttcgaagccaacagattctacaccgtgatcaacaaaaagagcggcgagatcgtgcccatggaggtgaacttcaacttcgacgaccccaacctgatcatcctgcctctggcctttggcaagagacagggcagagaattcatctggaacgacctgctgtccctggaaaccggcagcctgaagctggccaacggaagagtgatcgagaagacactgtacaacagaagaacccggcaggatgagcctgccctgttcgtggccctgaccttcgagcggcgggaggtcctggactcctccaatatcaaaccaatgaacctgatcggcgtggcaagaggcgaaaacatccccgccgtgatcgccctgaccgaccccgagggctgcccactgagccggtttaaggatagcctgggaaacccaacccacatcctgagaatcggcgagagctataaggagaagcagcggaccatccaggccaagaaggaggtggagcagcggagagccggcggctacagccggaagtacgccagcaaagccaagaatctggcagacgatatggtgagaaacaccgctagagatctgctgtactacgccgtgacccaggatgccatgctgatcttcgccaacctgagccggggcttcggccggcagggcaagcggaccttcatggccgagagacagtacacacggatggaggactggctgaccgccaagctggcctacgagggcctgagcaagacctacctgtccaagacactggcccagtacacctccaagacatgcagcaactgtgggtttaccatcaccagcgccgactacgacagggtgctggagaagctgaagaagacagcaacaggctggatgaccacaattaacggcaaggagctgaaggtggagggccagattacctactacaacagatacaagagacagaacgtagtcaaggacctgtccgtcgagctggatagactgagcgaagaatctgtgaacaacgacatctcctcctggacaaagggcagaagcggagaagctctgagcctcctgaagaaaagattctcccatagacccgtgcaggagaagttcgtgtgcctgaactgcggcttcgagacacacgcagccgagcaagccgccctgaacatcgccagatcctggctgttcctgcggagccaggagtacaagaaataccagacaaacaagacaaccggcaacaccgataagagagccttcgtcgagacctggcagtccttttaccggaagaagcttaaggaggtgtggaaacctgccgtgcggtctggcggatctggcggaggctccaccagccccaagaaaaagagaaaagtctaagctgccttctgcggggcttgccttctggccatgcccttcttctctcccttgcacctgtacctcttggtctttgaataaagcctgagtaggaaggctagcaaaaaaaaaaaaaaaaaaaaaaaaaaaaaaaaaaaaaaaaaaaaaaaaaaaaaaaaaaaaaaaaaaaaaaaaaaaaaaaa

SEQ ID NO: 12246 - RNA, 5785 nt, synthetic construct
  source 1..5785: mol_type = other RNA
aggaaataagagagaaaagaagagtaagaagaaatataagagccaccatggcccctaagaagaagcgtaaagtgagccggatggaacgcctcgtctacgaggtgcggcagaagtgcagaaacatcgaggacatctgcatctcctgcggatctctgaacgtgaccctggagcacccactgttcatcggcggcatgtgccagaactgtaaaaactgttttctggagtgtgcctatcaatacgacgatgacggctaccagagctactgcaccatctgttgcggcggaagagaggtgctgatgtgtggaaataacaactgctgccggtgcttctgcgtggaatgcgtggacctgctggtgggccccggcgccgcccaggccgctattaaggaagatccttggaactgctacatgtgcggccacaagggcacatacggcctgctgagacggagagaggactggcctagcagactgcagatgttcttcgccaataaccacgaccaggagttcgacccccctaaggtgtaccctcccgtccccgccgagaagagaaagcccatccgggtcctgagcctgttcgatggcatcgccaccggtctgctggtgctgaaggacctgggcatccaggtggataggtacattgcctccgaggtgtgcgaggactccatcaccgtgggaatggtgcgtcatcagggcaagatcatgtacgtgggcgacgtgcggagcgtgacacagaagcatatccaggagtggggccctttcgacctggtgatcggcggcagcccttgcaatgacctgagcatcgtgaacccagcccggaagggcctgtacgagggaaccggcagactgttcttcgagttttacagactgctgcacgacgcccggcctaaggaaggcgacgaccggcccttcttttggctgttcgagaatgtggtggccatgggagtcagcgacaagcgggatattagccggttcctggagagcaaccccgtgatgatcgatgccaaggaagtgagcgccgcccaccgggccagatacttctggggcaatctgcctggcatgaacagacccctggccagcaccgtgaacgacaagctggagctgcaggagtgcctggagcacggccggatcgccaagttcagcaaggtgagaaccatcaccacccgaagcaacagcatcaaacaaggcaaggaccagcactttcctgtgttcatgaacgagaaggaggacatcctgtggtgtaccgagatggagagagtgttcgggttcccagtccactacacagatgtcagcaacatgtctagactggccagacagagactgctgggaagaagctggtccgtccctgtgatcagacacctgttcgcccctctgaaggagtacttcgcctgcgtgagcagcggcaacagcaacgccaacagccggggccccagcttctctagcggcctggtgccactgtccctgagagggagccacatgggccccatggagatctacaaaaccgtgagcgcctggaagcggcagcctgtgcgcgtgctgagcctgtttcggaatatcgataaagtcctgaaaagcctgggattcctggagagcggctctggctccggcggtggcaccctgaagtacgtggaggatgtgacaaacgtggtcagacgggatgtggagaagtggggccccttcgatctggtgtacggcagcacccaacccctgggcagctcttgtgaccggtgccctggctggtacatgtttcagttccaccggatcctgcagtacgccctgccgagacaggagtcccagcggccattcttttggattttcatggacaacttgctgctgaccgaggatgaccaggaaactaccactcggttcctgcagaccgaagccgtgaccctgcaggacgtgagaggccgggactaccagaacgccatgcgggtgtggtccaacatccctggactgaaaagcaagcacgcacctctgacccctaaagaagaggagtacctgcaggcccaggtgcggagcagaagcaagctggacgcccctaaggtggatctgctggtgaagaattgcctcctgcccctgagagagtacttcaagtatttcagccagaatagtctgcccctgggaggcagcggcggcggcaagcccctggccgtgaggttcgccgacgtggccgtgtacttcagccccgaggagtggggctacctgaggcccgcccagagggccctgtacagggacgtgatgcaggagacctacggccacctgggcgccctgggcttccccggccccaagcccgccctgatcagctggatggagcaggagagcgaggcctggagccccgccgcccaggaccccgaggagggcgagaacctgggcggcgccctgggcggcccaagcagcggcgcccctcctcccagcggcggcagcccagccggctccccaacctctaccgaggagggcacctctgagtccgccacccccgagagcggccctggcacctccaccgagcccagcgagggcagcgcacccggcagccctgccggcagccccacctccacagaggagggaaccagcaccgagcccagcgaaggcagcgccccaggcaccagcaccgagcctagtgagcaggagattaaacggatcaacaagatcagaagaagacttgtgaaagacagcaacaccaagaaggccggcaagacaggccccatgaaaaccctgctggttagagtgatgacacccgatctgagagagcggctggaaaacctgagaaagaagcctgaaaatatcccccagcccatcagcaatacatctagagccaacctgaataagctgctgaccgattacaccgaaatgaagaaggcgatcctgcatgtgtactgggaagagttccagaaggaccctgtgggcctgatgagccgggtggcccagcctgccagcaagaagatcgatcagaacaagctgaaacctgagatggacgagaagggcaacctgaccaccgccggctttgcctgctctcagtgtggccagcccctgttcgtgtacaagctggagcaggtgtctgagaagggcaaggcttacaccaactacttcggacggtgcaatgtggccgagcacgaaaagctgatcctgctggcccagctgaagcccgagaaggatagcgacgaagccgtgacatatagcctgggaaagtttgggcagagggccctggatttctacagcattcatgtgaccaaggagtccacccaccccgtgaagcccctggcccagatcgccggaaacagatacgcctccggacctgtgggaaaggccctgagcgacgcatgtatgggcacaatcgcctccttcctgtctaagtaccaggacatcatcatcgaacaccagaaggtggtgaagggcaaccagaagagactggagagcctgcgggagctggccggcaaggaaaacctggaataccctagcgtgaccctgccacctcagcctcacaccaaggagggcgttgatgcctacaacgaagtgatcgcccgggtgcgaatgtgggtgaacctgaacctgtggcagaagctgaagctaagcagagatgatgccaagcctctgctgagactgaagggattcccttcctttcctctggtcgagagacaggccaacgaagtggactggtgggacatggtgtgtaacgtgaagaagctgatcaacgagaaaaaggaggatggcaaggtgttttggcagaatctggctggctacaagagacaggaagccctgagaccatacctgagcagcgaggaagatcggaagaagggaaagaaattcgctcggtaccagctgggcgacctgctgctgcacctggaaaagaagcacggcgaggactggggaaaggtgtacgacgaggcctgggagcggattgacaagaaagtggaaggcctgagcaagcacatcaagctggaagaggaacggagaagcgaggacgcccagagcaaggccgccctgaccgactggctgcgggctaaggccagcttcgtgatcgagggcctgaaggaggccgacaaggacgagttctgcagatgcgagctgaagctgcagaagtggtacggggacctgcggggaaagcccttcgccatcgaagccgagaacagcatcctggacatcagcggcttcagcaagcagtacaactgtgccttcatctggcagaaggacggcgtgaagaagctgaacctgtacctgatcatcaactacttcaagggcggcaagctgcggttcaagaagatcaaacctgaagccttcgaagccaacagattctacaccgtgatcaacaaaaagagcggcgagatcgtgcccatggaggtgaacttcaacttcgacgaccccaacctgatcatcctgcctctggcctttggcaagagacagggcagagaattcatctggaacgacctgctgtccctggaaaccggcagcctgaagctggccaacggaagagtgatcgagaagacactgtacaacagaagaacccggcaggatgagcctgccctgttcgtggccctgaccttcgagcggcgggaggtcctggactcctccaatatcaaaccaatgaacctgatcggcgtggcaagaggcgaaaacatccccgccgtgatcgccctgaccgaccccgagggctgcccactgagccggtttaaggatagcctgggaaacccaacccacatcctgagaatcggcgagagctataaggagaagcagcggaccatccaggccaagaaggaggtggagcagcggagagccggcggctacagccggaagtacgccagcaaagccaagaatctggcagacgatatggtgagaaacaccgctagagatctgctgtactacgccgtgacccaggatgccatgctgatcttcgccaacctgagccggggcttcggccggcagggcaagcggaccttcatggccgagagacagtacacacggatggaggactggctgaccgccaagctggcctacgagggcctgagcaagacctacctgtccaagacactggcccagtacacctccaagacatgcagcaactgtgggtttaccatcaccagcgccgactacgacagggtgctggagaagctgaagaagacagcaacaggctggatgaccacaattaacggcaaggagctgaaggtggagggccagattacctactacaacagatacaagagacagaacgtagtcaaggacctgtccgtcgagctggatagactgagcgaagaatctgtgaacaacgacatctcctcctggacaaagggcagaagcggagaagctctgagcctcctgaagaaaagattctcccatagacccgtgcaggagaagttcgtgtgcctgaactgcggcttcgagacacacgcagccgagcaagccgccctgaacatcgccagatcctggctgttcctgcggagccaggagtacaagaaataccagacaaacaagacaaccggcaacaccgataagagagccttcgtcgagacctggcagtccttttaccggaagaagcttaaggaggtgtggaaacctgccgtgcggtctggcggatctggcggaggctccaccagccccaagaaaaagagaaaagtctaagctgccttctgcggggcttgccttctggccatgcccttcttctctcccttgcacctgtacctcttggtctttgaataaagcctgagtaggaaggctagcaaaaaaaaaaaaaaaaaaaaaaaaaaaaaaaaaaaaaaaaaaaaaaaaaaaaaaaaaaaaaaaaaaaaaaaaaaaaaaaa

SEQ ID NO: 12247 - RNA, 5785 nt, synthetic construct
  source 1..5785: mol_type = other RNA
aggaaataagagagaaaagaagagtaagaagaaatataagagccaccatggcccctaagaagaagcgtaaagtgagccggatggaacgcctcgtctacgaggtgcggcagaagtgcagaaacatcgaggacatctgcatctcctgcggatctctgaacgtgaccctggagcacccactgttcatcggcggcatgtgccagaactgtaaaaactgttttctggagtgtgcctatcaatacgacgatgacggctaccagagctactgcaccatctgttgcggcggaagagaggtgctgatgtgtggaaataacaactgctgccggtgcttctgcgtggaatgcgtggacctgctggtgggccccggcgccgcccaggccgctattaaggaagatccttggaactgctacatgtgcggccacaagggcacatacggcctgctgagacggagagaggactggcctagcagactgcagatgttcttcgccaataaccacgaccaggagttcgacccccctaaggtgtaccctcccgtccccgccgagaagagaaagcccatccgggtcctgagcctgttcgatggcatcgccaccggtctgctggtgctgaaggacctgggcatccaggtggataggtacattgcctccgaggtgtgcgaggactccatcaccgtgggaatggtgcgtcatcagggcaagatcatgtacgtgggcgacgtgcggagcgtgacacagaagcatatccaggagtggggccctttcgacctggtgatcggcggcagcccttgcaatgacctgagcatcgtgaacccagcccggaagggcctgtacgagggaaccggcagactgttcttcgagttttacagactgctgcacgacgcccggcctaaggaaggcgacgaccggcccttcttttggctgttcgagaatgtggtggccatgggagtcagcgacaagcgggatattagccggttcctggagagcaaccccgtgatgatcgatgccaaggaagtgagcgccgcccaccgggccagatacttctggggcaatctgcctggcatgaacagacccctggccagcaccgtgaacgacaagctggagctgcaggagtgcctggagcacggccggatcgccaagttcagcaaggtgagaaccatcaccacccgaagcaacagcatcaaacaaggcaaggaccagcactttcctgtgttcatgaacgagaaggaggacatcctgtggtgtaccgagatggagagagtgttcgggttcccagtccactacacagatgtcagcaacatgtctagactggccagacagagactgctgggaagaagctggtccgtccctgtgatcagacacctgttcgcccctctgaaggagtacttcgcctgcgtgagcagcggcaacagcaacgccaacagccggggccccagcttctctagcggcctggtgccactgtccctgagagggagccacatgggccccatggagatctacaaaaccgtgagcgcctggaagcggcagcctgtgcgcgtgctgagcctgtttcggaatatcgataaagtcctgaaaagcctgggattcctggagagcggctctggctccggcggtggcaccctgaagtacgtggaggatgtgacaaacgtggtcagacgggatgtggagaagtggggccccttcgatctggtgtacggcagcacccaacccctgggcagctcttgtgaccggtgccctggctggtacatgtttcagttccaccggatcctgcagtacgccctgccgagacaggagtcccagcggccattcttttggattttcatggacaacttgctgctgaccgaggatgaccaggaaactaccactcggttcctgcagaccgaagccgtgaccctgcaggacgtgagaggccgggactaccagaacgccatgcgggtgtggtccaacatccctggactgaaaagcaagcacgcacctctgacccctaaagaagaggagtacctgcaggcccaggtgcggagcagaagcaagctggacgcccctaaggtggatctgctggtgaagaattgcctcctgcccctgagagagtacttcaagtatttcagccagaatagtctgcccctgggaggcagcggcggcggcatggccttcgaggacgtggccgtgtacttcagccaggaggagtggggcctgctggacaccacccagagggccctgtacaggcacgtgatgctggagaacttcaccctggtgaccagcctgggcctgagcaccagcaggccccacgtggtgatccagctggagaggggcgaggagccctgggtgcccagcggcaccgacaccaccctgagcaggaccacctacaggaggaggaaccccggcagcggcggcccaagcagcggcgcccctcctcccagcggcggcagcccagccggctccccaacctctaccgaggagggcacctctgagtccgccacccccgagagcggccctggcacctccaccgagcccagcgagggcagcgcacccggcagccctgccggcagccccacctccacagaggagggaaccagcaccgagcccagcgaaggcagcgccccaggcaccagcaccgagcctagtgagcaggagattaaacggatcaacaagatcagaagaagacttgtgaaagacagcaacaccaagaaggccggcaagacaggccccatgaaaaccctgctggttagagtgatgacacccgatctgagagagcggctggaaaacctgagaaagaagcctgaaaatatcccccagcccatcagcaatacatctagagccaacctgaataagctgctgaccgattacaccgaaatgaagaaggcgatcctgcatgtgtactgggaagagttccagaaggaccctgtgggcctgatgagccgggtggcccagcctgccagcaagaagatcgatcagaacaagctgaaacctgagatggacgagaagggcaacctgaccaccgccggctttgcctgctctcagtgtggccagcccctgttcgtgtacaagctggagcaggtgtctgagaagggcaaggcttacaccaactacttcggacggtgcaatgtggccgagcacgaaaagctgatcctgctggcccagctgaagcccgagaaggatagcgacgaagccgtgacatatagcctgggaaagtttgggcagagggccctggatttctacagcattcatgtgaccaaggagtccacccaccccgtgaagcccctggcccagatcgccggaaacagatacgcctccggacctgtgggaaaggccctgagcgacgcatgtatgggcacaatcgcctccttcctgtctaagtaccaggacatcatcatcgaacaccagaaggtggtgaagggcaaccagaagagactggagagcctgcgggagctggccggcaaggaaaacctggaataccctagcgtgaccctgccacctcagcctcacaccaaggagggcgttgatgcctacaacgaagtgatcgcccgggtgcgaatgtgggtgaacctgaacctgtggcagaagctgaagctaagcagagatgatgccaagcctctgctgagactgaagggattcccttcctttcctctggtcgagagacaggccaacgaagtggactggtgggacatggtgtgtaacgtgaagaagctgatcaacgagaaaaaggaggatggcaaggtgttttggcagaatctggctggctacaagagacaggaagccctgagaccatacctgagcagcgaggaagatcggaagaagggaaagaaattcgctcggtaccagctgggcgacctgctgctgcacctggaaaagaagcacggcgaggactggggaaaggtgtacgacgaggcctgggagcggattgacaagaaagtggaaggcctgagcaagcacatcaagctggaagaggaacggagaagcgaggacgcccagagcaaggccgccctgaccgactggctgcgggctaaggccagcttcgtgatcgagggcctgaaggaggccgacaaggacgagttctgcagatgcgagctgaagctgcagaagtggtacggggacctgcggggaaagcccttcgccatcgaagccgagaacagcatcctggacatcagcggcttcagcaagcagtacaactgtgccttcatctggcagaaggacggcgtgaagaagctgaacctgtacctgatcatcaactacttcaagggcggcaagctgcggttcaagaagatcaaacctgaagccttcgaagccaacagattctacaccgtgatcaacaaaaagagcggcgagatcgtgcccatggaggtgaacttcaacttcgacgaccccaacctgatcatcctgcctctggcctttggcaagagacagggcagagaattcatctggaacgacctgctgtccctggaaaccggcagcctgaagctggccaacggaagagtgatcgagaagacactgtacaacagaagaacccggcaggatgagcctgccctgttcgtggccctgaccttcgagcggcgggaggtcctggactcctccaatatcaaaccaatgaacctgatcggcgtggcaagaggcgaaaacatccccgccgtgatcgccctgaccgaccccgagggctgcccactgagccggtttaaggatagcctgggaaacccaacccacatcctgagaatcggcgagagctataaggagaagcagcggaccatccaggccaagaaggaggtggagcagcggagagccggcggctacagccggaagtacgccagcaaagccaagaatctggcagacgatatggtgagaaacaccgctagagatctgctgtactacgccgtgacccaggatgccatgctgatcttcgccaacctgagccggggcttcggccggcagggcaagcggaccttcatggccgagagacagtacacacggatggaggactggctgaccgccaagctggcctacgagggcctgagcaagacctacctgtccaagacactggcccagtacacctccaagacatgcagcaactgtgggtttaccatcaccagcgccgactacgacagggtgctggagaagctgaagaagacagcaacaggctggatgaccacaattaacggcaaggagctgaaggtggagggccagattacctactacaacagatacaagagacagaacgtagtcaaggacctgtccgtcgagctggatagactgagcgaagaatctgtgaacaacgacatctcctcctggacaaagggcagaagcggagaagctctgagcctcctgaagaaaagattctcccatagacccgtgcaggagaagttcgtgtgcctgaactgcggcttcgagacacacgcagccgagcaagccgccctgaacatcgccagatcctggctgttcctgcggagccaggagtacaagaaataccagacaaacaagacaaccggcaacaccgataagagagccttcgtcgagacctggcagtccttttaccggaagaagcttaaggaggtgtggaaacctgccgtgcggtctggcggatctggcggaggctccaccagccccaagaaaaagagaaaagtctaagctgccttctgcggggcttgccttctggccatgcccttcttctctcccttgcacctgtacctcttggtctttgaataaagcctgagtaggaaggctagcaaaaaaaaaaaaaaaaaaaaaaaaaaaaaaaaaaaaaaaaaaaaaaaaaaaaaaaaaaaaaaaaaaaaaaaaaaaaaaaa

SEQ ID NO: 12248 - RNA, 5785 nt, synthetic construct
  source 1..5785: mol_type = other RNA
aggaaataagagagaaaagaagagtaagaagaaatataagagccaccatggcccctaagaagaagcgtaaagtgagccggatggaacgcctcgtctacgaggtgcggcagaagtgcagaaacatcgaggacatctgcatctcctgcggatctctgaacgtgaccctggagcacccactgttcatcggcggcatgtgccagaactgtaaaaactgttttctggagtgtgcctatcaatacgacgatgacggctaccagagctactgcaccatctgttgcggcggaagagaggtgctgatgtgtggaaataacaactgctgccggtgcttctgcgtggaatgcgtggacctgctggtgggccccggcgccgcccaggccgctattaaggaagatccttggaactgctacatgtgcggccacaagggcacatacggcctgctgagacggagagaggactggcctagcagactgcagatgttcttcgccaataaccacgaccaggagttcgacccccctaaggtgtaccctcccgtccccgccgagaagagaaagcccatccgggtcctgagcctgttcgatggcatcgccaccggtctgctggtgctgaaggacctgggcatccaggtggataggtacattgcctccgaggtgtgcgaggactccatcaccgtgggaatggtgcgtcatcagggcaagatcatgtacgtgggcgacgtgcggagcgtgacacagaagcatatccaggagtggggccctttcgacctggtgatcggcggcagcccttgcaatgacctgagcatcgtgaacccagcccggaagggcctgtacgagggaaccggcagactgttcttcgagttttacagactgctgcacgacgcccggcctaaggaaggcgacgaccggcccttcttttggctgttcgagaatgtggtggccatgggagtcagcgacaagcgggatattagccggttcctggagagcaaccccgtgatgatcgatgccaaggaagtgagcgccgcccaccgggccagatacttctggggcaatctgcctggcatgaacagacccctggccagcaccgtgaacgacaagctggagctgcaggagtgcctggagcacggccggatcgccaagttcagcaaggtgagaaccatcaccacccgaagcaacagcatcaaacaaggcaaggaccagcactttcctgtgttcatgaacgagaaggaggacatcctgtggtgtaccgagatggagagagtgttcgggttcccagtccactacacagatgtcagcaacatgtctagactggccagacagagactgctgggaagaagctggtccgtccctgtgatcagacacctgttcgcccctctgaaggagtacttcgcctgcgtgagcagcggcaacagcaacgccaacagccggggccccagcttctctagcggcctggtgccactgtccctgagagggagccacatgggccccatggagatctacaaaaccgtgagcgcctggaagcggcagcctgtgcgcgtgctgagcctgtttcggaatatcgataaagtcctgaaaagcctgggattcctggagagcggctctggctccggcggtggcaccctgaagtacgtggaggatgtgacaaacgtggtcagacgggatgtggagaagtggggccccttcgatctggtgtacggcagcacccaacccctgggcagctcttgtgaccggtgccctggctggtacatgtttcagttccaccggatcctgcagtacgccctgccgagacaggagtcccagcggccattcttttggattttcatggacaacttgctgctgaccgaggatgaccaggaaactaccactcggttcctgcagaccgaagccgtgaccctgcaggacgtgagaggccgggactaccagaacgccatgcgggtgtggtccaacatccctggactgaaaagcaagcacgcacctctgacccctaaagaagaggagtacctgcaggcccaggtgcggagcagaagcaagctggacgcccctaaggtggatctgctggtgaagaattgcctcctgcccctgagagagtacttcaagtatttcagccagaatagtctgcccctgggaggcagcggcggcggcgccctggtgaccttcgaggacgtggccgtgaggttcacccaggaggagtgggccctgctggaccccagccagaagatcctgtacagggacgtgatgagggagacctacaggaacctgaccagcgtgggcatcaactgggagtgctgggacctggaggcctgcttcaggagcctgggcaggaacctgagggtgcaggtggtgaagaggaagtgcgagctgaccaacagcggcccctgcgccgagggcggcccaagcagcggcgcccctcctcccagcggcggcagcccagccggctccccaacctctaccgaggagggcacctctgagtccgccacccccgagagcggccctggcacctccaccgagcccagcgagggcagcgcacccggcagccctgccggcagccccacctccacagaggagggaaccagcaccgagcccagcgaaggcagcgccccaggcaccagcaccgagcctagtgagcaggagattaaacggatcaacaagatcagaagaagacttgtgaaagacagcaacaccaagaaggccggcaagacaggccccatgaaaaccctgctggttagagtgatgacacccgatctgagagagcggctggaaaacctgagaaagaagcctgaaaatatcccccagcccatcagcaatacatctagagccaacctgaataagctgctgaccgattacaccgaaatgaagaaggcgatcctgcatgtgtactgggaagagttccagaaggaccctgtgggcctgatgagccgggtggcccagcctgccagcaagaagatcgatcagaacaagctgaaacctgagatggacgagaagggcaacctgaccaccgccggctttgcctgctctcagtgtggccagcccctgttcgtgtacaagctggagcaggtgtctgagaagggcaaggcttacaccaactacttcggacggtgcaatgtggccgagcacgaaaagctgatcctgctggcccagctgaagcccgagaaggatagcgacgaagccgtgacatatagcctgggaaagtttgggcagagggccctggatttctacagcattcatgtgaccaaggagtccacccaccccgtgaagcccctggcccagatcgccggaaacagatacgcctccggacctgtgggaaaggccctgagcgacgcatgtatgggcacaatcgcctccttcctgtctaagtaccaggacatcatcatcgaacaccagaaggtggtgaagggcaaccagaagagactggagagcctgcgggagctggccggcaaggaaaacctggaataccctagcgtgaccctgccacctcagcctcacaccaaggagggcgttgatgcctacaacgaagtgatcgcccgggtgcgaatgtgggtgaacctgaacctgtggcagaagctgaagctaagcagagatgatgccaagcctctgctgagactgaagggattcccttcctttcctctggtcgagagacaggccaacgaagtggactggtgggacatggtgtgtaacgtgaagaagctgatcaacgagaaaaaggaggatggcaaggtgttttggcagaatctggctggctacaagagacaggaagccctgagaccatacctgagcagcgaggaagatcggaagaagggaaagaaattcgctcggtaccagctgggcgacctgctgctgcacctggaaaagaagcacggcgaggactggggaaaggtgtacgacgaggcctgggagcggattgacaagaaagtggaaggcctgagcaagcacatcaagctggaagaggaacggagaagcgaggacgcccagagcaaggccgccctgaccgactggctgcgggctaaggccagcttcgtgatcgagggcctgaaggaggccgacaaggacgagttctgcagatgcgagctgaagctgcagaagtggtacggggacctgcggggaaagcccttcgccatcgaagccgagaacagcatcctggacatcagcggcttcagcaagcagtacaactgtgccttcatctggcagaaggacggcgtgaagaagctgaacctgtacctgatcatcaactacttcaagggcggcaagctgcggttcaagaagatcaaacctgaagccttcgaagccaacagattctacaccgtgatcaacaaaaagagcggcgagatcgtgcccatggaggtgaacttcaacttcgacgaccccaacctgatcatcctgcctctggcctttggcaagagacagggcagagaattcatctggaacgacctgctgtccctggaaaccggcagcctgaagctggccaacggaagagtgatcgagaagacactgtacaacagaagaacccggcaggatgagcctgccctgttcgtggccctgaccttcgagcggcgggaggtcctggactcctccaatatcaaaccaatgaacctgatcggcgtggcaagaggcgaaaacatccccgccgtgatcgccctgaccgaccccgagggctgcccactgagccggtttaaggatagcctgggaaacccaacccacatcctgagaatcggcgagagctataaggagaagcagcggaccatccaggccaagaaggaggtggagcagcggagagccggcggctacagccggaagtacgccagcaaagccaagaatctggcagacgatatggtgagaaacaccgctagagatctgctgtactacgccgtgacccaggatgccatgctgatcttcgccaacctgagccggggcttcggccggcagggcaagcggaccttcatggccgagagacagtacacacggatggaggactggctgaccgccaagctggcctacgagggcctgagcaagacctacctgtccaagacactggcccagtacacctccaagacatgcagcaactgtgggtttaccatcaccagcgccgactacgacagggtgctggagaagctgaagaagacagcaacaggctggatgaccacaattaacggcaaggagctgaaggtggagggccagattacctactacaacagatacaagagacagaacgtagtcaaggacctgtccgtcgagctggatagactgagcgaagaatctgtgaacaacgacatctcctcctggacaaagggcagaagcggagaagctctgagcctcctgaagaaaagattctcccatagacccgtgcaggagaagttcgtgtgcctgaactgcggcttcgagacacacgcagccgagcaagccgccctgaacatcgccagatcctggctgttcctgcggagccaggagtacaagaaataccagacaaacaagacaaccggcaacaccgataagagagccttcgtcgagacctggcagtccttttaccggaagaagcttaaggaggtgtggaaacctgccgtgcggtctggcggatctggcggaggctccaccagccccaagaaaaagagaaaagtctaagctgccttctgcggggcttgccttctggccatgcccttcttctctcccttgcacctgtacctcttggtctttgaataaagcctgagtaggaaggctagcaaaaaaaaaaaaaaaaaaaaaaaaaaaaaaaaaaaaaaaaaaaaaaaaaaaaaaaaaaaaaaaaaaaaaaaaaaaaaaaa

SEQ ID NO: 12249 - RNA, 5785 nt, synthetic construct
  source 1..5785: mol_type = other RNA
aggaaataagagagaaaagaagagtaagaagaaatataagagccaccatggcccctaagaagaagcgtaaagtgagccggatggaacgcctcgtctacgaggtgcggcagaagtgcagaaacatcgaggacatctgcatctcctgcggatctctgaacgtgaccctggagcacccactgttcatcggcggcatgtgccagaactgtaaaaactgttttctggagtgtgcctatcaatacgacgatgacggctaccagagctactgcaccatctgttgcggcggaagagaggtgctgatgtgtggaaataacaactgctgccggtgcttctgcgtggaatgcgtggacctgctggtgggccccggcgccgcccaggccgctattaaggaagatccttggaactgctacatgtgcggccacaagggcacatacggcctgctgagacggagagaggactggcctagcagactgcagatgttcttcgccaataaccacgaccaggagttcgacccccctaaggtgtaccctcccgtccccgccgagaagagaaagcccatccgggtcctgagcctgttcgatggcatcgccaccggtctgctggtgctgaaggacctgggcatccaggtggataggtacattgcctccgaggtgtgcgaggactccatcaccgtgggaatggtgcgtcatcagggcaagatcatgtacgtgggcgacgtgcggagcgtgacacagaagcatatccaggagtggggccctttcgacctggtgatcggcggcagcccttgcaatgacctgagcatcgtgaacccagcccggaagggcctgtacgagggaaccggcagactgttcttcgagttttacagactgctgcacgacgcccggcctaaggaaggcgacgaccggcccttcttttggctgttcgagaatgtggtggccatgggagtcagcgacaagcgggatattagccggttcctggagagcaaccccgtgatgatcgatgccaaggaagtgagcgccgcccaccgggccagatacttctggggcaatctgcctggcatgaacagacccctggccagcaccgtgaacgacaagctggagctgcaggagtgcctggagcacggccggatcgccaagttcagcaaggtgagaaccatcaccacccgaagcaacagcatcaaacaaggcaaggaccagcactttcctgtgttcatgaacgagaaggaggacatcctgtggtgtaccgagatggagagagtgttcgggttcccagtccactacacagatgtcagcaacatgtctagactggccagacagagactgctgggaagaagctggtccgtccctgtgatcagacacctgttcgcccctctgaaggagtacttcgcctgcgtgagcagcggcaacagcaacgccaacagccggggccccagcttctctagcggcctggtgccactgtccctgagagggagccacatgggccccatggagatctacaaaaccgtgagcgcctggaagcggcagcctgtgcgcgtgctgagcctgtttcggaatatcgataaagtcctgaaaagcctgggattcctggagagcggctctggctccggcggtggcaccctgaagtacgtggaggatgtgacaaacgtggtcagacgggatgtggagaagtggggccccttcgatctggtgtacggcagcacccaacccctgggcagctcttgtgaccggtgccctggctggtacatgtttcagttccaccggatcctgcagtacgccctgccgagacaggagtcccagcggccattcttttggattttcatggacaacttgctgctgaccgaggatgaccaggaaactaccactcggttcctgcagaccgaagccgtgaccctgcaggacgtgagaggccgggactaccagaacgccatgcgggtgtggtccaacatccctggactgaaaagcaagcacgcacctctgacccctaaagaagaggagtacctgcaggcccaggtgcggagcagaagcaagctggacgcccctaaggtggatctgctggtgaagaattgcctcctgcccctgagagagtacttcaagtatttcagccagaatagtctgcccctgggaggcagcggcggcggcgtgctgggcctggtgaccttcggcgacgtggccatcgacttcagcagggaggagtgggagtggctgaacagcgcccagaggaccctgcacagggacgtgatgctggagaactacaggaacctggtgagcctgggcctgtgcgtgagcaagcccgacatgatcagcagcctggagcagaggaaggagccctggatggtgaagaggaagctgaccaggggcaggtgccccgacctgaagaccatgggcggcccaagcagcggcgcccctcctcccagcggcggcagcccagccggctccccaacctctaccgaggagggcacctctgagtccgccacccccgagagcggccctggcacctccaccgagcccagcgagggcagcgcacccggcagccctgccggcagccccacctccacagaggagggaaccagcaccgagcccagcgaaggcagcgccccaggcaccagcaccgagcctagtgagcaggagattaaacggatcaacaagatcagaagaagacttgtgaaagacagcaacaccaagaaggccggcaagacaggccccatgaaaaccctgctggttagagtgatgacacccgatctgagagagcggctggaaaacctgagaaagaagcctgaaaatatcccccagcccatcagcaatacatctagagccaacctgaataagctgctgaccgattacaccgaaatgaagaaggcgatcctgcatgtgtactgggaagagttccagaaggaccctgtgggcctgatgagccgggtggcccagcctgccagcaagaagatcgatcagaacaagctgaaacctgagatggacgagaagggcaacctgaccaccgccggctttgcctgctctcagtgtggccagcccctgttcgtgtacaagctggagcaggtgtctgagaagggcaaggcttacaccaactacttcggacggtgcaatgtggccgagcacgaaaagctgatcctgctggcccagctgaagcccgagaaggatagcgacgaagccgtgacatatagcctgggaaagtttgggcagagggccctggatttctacagcattcatgtgaccaaggagtccacccaccccgtgaagcccctggcccagatcgccggaaacagatacgcctccggacctgtgggaaaggccctgagcgacgcatgtatgggcacaatcgcctccttcctgtctaagtaccaggacatcatcatcgaacaccagaaggtggtgaagggcaaccagaagagactggagagcctgcgggagctggccggcaaggaaaacctggaataccctagcgtgaccctgccacctcagcctcacaccaaggagggcgttgatgcctacaacgaagtgatcgcccgggtgcgaatgtgggtgaacctgaacctgtggcagaagctgaagctaagcagagatgatgccaagcctctgctgagactgaagggattcccttcctttcctctggtcgagagacaggccaacgaagtggactggtgggacatggtgtgtaacgtgaagaagctgatcaacgagaaaaaggaggatggcaaggtgttttggcagaatctggctggctacaagagacaggaagccctgagaccatacctgagcagcgaggaagatcggaagaagggaaagaaattcgctcggtaccagctgggcgacctgctgctgcacctggaaaagaagcacggcgaggactggggaaaggtgtacgacgaggcctgggagcggattgacaagaaagtggaaggcctgagcaagcacatcaagctggaagaggaacggagaagcgaggacgcccagagcaaggccgccctgaccgactggctgcgggctaaggccagcttcgtgatcgagggcctgaaggaggccgacaaggacgagttctgcagatgcgagctgaagctgcagaagtggtacggggacctgcggggaaagcccttcgccatcgaagccgagaacagcatcctggacatcagcggcttcagcaagcagtacaactgtgccttcatctggcagaaggacggcgtgaagaagctgaacctgtacctgatcatcaactacttcaagggcggcaagctgcggttcaagaagatcaaacctgaagccttcgaagccaacagattctacaccgtgatcaacaaaaagagcggcgagatcgtgcccatggaggtgaacttcaacttcgacgaccccaacctgatcatcctgcctctggcctttggcaagagacagggcagagaattcatctggaacgacctgctgtccctggaaaccggcagcctgaagctggccaacggaagagtgatcgagaagacactgtacaacagaagaacccggcaggatgagcctgccctgttcgtggccctgaccttcgagcggcgggaggtcctggactcctccaatatcaaaccaatgaacctgatcggcgtggcaagaggcgaaaacatccccgccgtgatcgccctgaccgaccccgagggctgcccactgagccggtttaaggatagcctgggaaacccaacccacatcctgagaatcggcgagagctataaggagaagcagcggaccatccaggccaagaaggaggtggagcagcggagagccggcggctacagccggaagtacgccagcaaagccaagaatctggcagacgatatggtgagaaacaccgctagagatctgctgtactacgccgtgacccaggatgccatgctgatcttcgccaacctgagccggggcttcggccggcagggcaagcggaccttcatggccgagagacagtacacacggatggaggactggctgaccgccaagctggcctacgagggcctgagcaagacctacctgtccaagacactggcccagtacacctccaagacatgcagcaactgtgggtttaccatcaccagcgccgactacgacagggtgctggagaagctgaagaagacagcaacaggctggatgaccacaattaacggcaaggagctgaaggtggagggccagattacctactacaacagatacaagagacagaacgtagtcaaggacctgtccgtcgagctggatagactgagcgaagaatctgtgaacaacgacatctcctcctggacaaagggcagaagcggagaagctctgagcctcctgaagaaaagattctcccatagacccgtgcaggagaagttcgtgtgcctgaactgcggcttcgagacacacgcagccgagcaagccgccctgaacatcgccagatcctggctgttcctgcggagccaggagtacaagaaataccagacaaacaagacaaccggcaacaccgataagagagccttcgtcgagacctggcagtccttttaccggaagaagcttaaggaggtgtggaaacctgccgtgcggtctggcggatctggcggaggctccaccagccccaagaaaaagagaaaagtctaagctgccttctgcggggcttgccttctggccatgcccttcttctctcccttgcacctgtacctcttggtctttgaataaagcctgagtaggaaggctagcaaaaaaaaaaaaaaaaaaaaaaaaaaaaaaaaaaaaaaaaaaaaaaaaaaaaaaaaaaaaaaaaaaaaaaaaaaaaaaaa

SEQ ID NO: 12250 - RNA, 5785 nt, synthetic construct
  source 1..5785: mol_type = other RNA
aggaaataagagagaaaagaagagtaagaagaaatataagagccaccatggcccctaagaagaagcgtaaagtgagccggatggaacgcctcgtctacgaggtgcggcagaagtgcagaaacatcgaggacatctgcatctcctgcggatctctgaacgtgaccctggagcacccactgttcatcggcggcatgtgccagaactgtaaaaactgttttctggagtgtgcctatcaatacgacgatgacggctaccagagctactgcaccatctgttgcggcggaagagaggtgctgatgtgtggaaataacaactgctgccggtgcttctgcgtggaatgcgtggacctgctggtgggccccggcgccgcccaggccgctattaaggaagatccttggaactgctacatgtgcggccacaagggcacatacggcctgctgagacggagagaggactggcctagcagactgcagatgttcttcgccaataaccacgaccaggagttcgacccccctaaggtgtaccctcccgtccccgccgagaagagaaagcccatccgggtcctgagcctgttcgatggcatcgccaccggtctgctggtgctgaaggacctgggcatccaggtggataggtacattgcctccgaggtgtgcgaggactccatcaccgtgggaatggtgcgtcatcagggcaagatcatgtacgtgggcgacgtgcggagcgtgacacagaagcatatccaggagtggggccctttcgacctggtgatcggcggcagcccttgcaatgacctgagcatcgtgaacccagcccggaagggcctgtacgagggaaccggcagactgttcttcgagttttacagactgctgcacgacgcccggcctaaggaaggcgacgaccggcccttcttttggctgttcgagaatgtggtggccatgggagtcagcgacaagcgggatattagccggttcctggagagcaaccccgtgatgatcgatgccaaggaagtgagcgccgcccaccgggccagatacttctggggcaatctgcctggcatgaacagacccctggccagcaccgtgaacgacaagctggagctgcaggagtgcctggagcacggccggatcgccaagttcagcaaggtgagaaccatcaccacccgaagcaacagcatcaaacaaggcaaggaccagcactttcctgtgttcatgaacgagaaggaggacatcctgtggtgtaccgagatggagagagtgttcgggttcccagtccactacacagatgtcagcaacatgtctagactggccagacagagactgctgggaagaagctggtccgtccctgtgatcagacacctgttcgcccctctgaaggagtacttcgcctgcgtgagcagcggcaacagcaacgccaacagccggggccccagcttctctagcggcctggtgccactgtccctgagagggagccacatgggccccatggagatctacaaaaccgtgagcgcctggaagcggcagcctgtgcgcgtgctgagcctgtttcggaatatcgataaagtcctgaaaagcctgggattcctggagagcggctctggctccggcggtggcaccctgaagtacgtggaggatgtgacaaacgtggtcagacgggatgtggagaagtggggccccttcgatctggtgtacggcagcacccaacccctgggcagctcttgtgaccggtgccctggctggtacatgtttcagttccaccggatcctgcagtacgccctgccgagacaggagtcccagcggccattcttttggattttcatggacaacttgctgctgaccgaggatgaccaggaaactaccactcggttcctgcagaccgaagccgtgaccctgcaggacgtgagaggccgggactaccagaacgccatgcgggtgtggtccaacatccctggactgaaaagcaagcacgcacctctgacccctaaagaagaggagtacctgcaggcccaggtgcggagcagaagcaagctggacgcccctaaggtggatctgctggtgaagaattgcctcctgcccctgagagagtacttcaagtatttcagccagaatagtctgcccctgggaggcagcggcggcggcggcagcctggaggagggcaggagggccaccggcctgcccgccgcccaggtgcaggagcccgtgaccttcaaggacgtggccgtggacttcacccaggaggagtggggccagctggacctggtgcagaggaccctgtacagggacgtgatgctggagacctacggccacctgctgagcgtgggcaaccagatcgccaagcccgaggtgatcagcctgctggagcagggcgaggagccctggagcggcggcccaagcagcggcgcccctcctcccagcggcggcagcccagccggctccccaacctctaccgaggagggcacctctgagtccgccacccccgagagcggccctggcacctccaccgagcccagcgagggcagcgcacccggcagccctgccggcagccccacctccacagaggagggaaccagcaccgagcccagcgaaggcagcgccccaggcaccagcaccgagcctagtgagcaggagattaaacggatcaacaagatcagaagaagacttgtgaaagacagcaacaccaagaaggccggcaagacaggccccatgaaaaccctgctggttagagtgatgacacccgatctgagagagcggctggaaaacctgagaaagaagcctgaaaatatcccccagcccatcagcaatacatctagagccaacctgaataagctgctgaccgattacaccgaaatgaagaaggcgatcctgcatgtgtactgggaagagttccagaaggaccctgtgggcctgatgagccgggtggcccagcctgccagcaagaagatcgatcagaacaagctgaaacctgagatggacgagaagggcaacctgaccaccgccggctttgcctgctctcagtgtggccagcccctgttcgtgtacaagctggagcaggtgtctgagaagggcaaggcttacaccaactacttcggacggtgcaatgtggccgagcacgaaaagctgatcctgctggcccagctgaagcccgagaaggatagcgacgaagccgtgacatatagcctgggaaagtttgggcagagggccctggatttctacagcattcatgtgaccaaggagtccacccaccccgtgaagcccctggcccagatcgccggaaacagatacgcctccggacctgtgggaaaggccctgagcgacgcatgtatgggcacaatcgcctccttcctgtctaagtaccaggacatcatcatcgaacaccagaaggtggtgaagggcaaccagaagagactggagagcctgcgggagctggccggcaaggaaaacctggaataccctagcgtgaccctgccacctcagcctcacaccaaggagggcgttgatgcctacaacgaagtgatcgcccgggtgcgaatgtgggtgaacctgaacctgtggcagaagctgaagctaagcagagatgatgccaagcctctgctgagactgaagggattcccttcctttcctctggtcgagagacaggccaacgaagtggactggtgggacatggtgtgtaacgtgaagaagctgatcaacgagaaaaaggaggatggcaaggtgttttggcagaatctggctggctacaagagacaggaagccctgagaccatacctgagcagcgaggaagatcggaagaagggaaagaaattcgctcggtaccagctgggcgacctgctgctgcacctggaaaagaagcacggcgaggactggggaaaggtgtacgacgaggcctgggagcggattgacaagaaagtggaaggcctgagcaagcacatcaagctggaagaggaacggagaagcgaggacgcccagagcaaggccgccctgaccgactggctgcgggctaaggccagcttcgtgatcgagggcctgaaggaggccgacaaggacgagttctgcagatgcgagctgaagctgcagaagtggtacggggacctgcggggaaagcccttcgccatcgaagccgagaacagcatcctggacatcagcggcttcagcaagcagtacaactgtgccttcatctggcagaaggacggcgtgaagaagctgaacctgtacctgatcatcaactacttcaagggcggcaagctgcggttcaagaagatcaaacctgaagccttcgaagccaacagattctacaccgtgatcaacaaaaagagcggcgagatcgtgcccatggaggtgaacttcaacttcgacgaccccaacctgatcatcctgcctctggcctttggcaagagacagggcagagaattcatctggaacgacctgctgtccctggaaaccggcagcctgaagctggccaacggaagagtgatcgagaagacactgtacaacagaagaacccggcaggatgagcctgccctgttcgtggccctgaccttcgagcggcgggaggtcctggactcctccaatatcaaaccaatgaacctgatcggcgtggcaagaggcgaaaacatccccgccgtgatcgccctgaccgaccccgagggctgcccactgagccggtttaaggatagcctgggaaacccaacccacatcctgagaatcggcgagagctataaggagaagcagcggaccatccaggccaagaaggaggtggagcagcggagagccggcggctacagccggaagtacgccagcaaagccaagaatctggcagacgatatggtgagaaacaccgctagagatctgctgtactacgccgtgacccaggatgccatgctgatcttcgccaacctgagccggggcttcggccggcagggcaagcggaccttcatggccgagagacagtacacacggatggaggactggctgaccgccaagctggcctacgagggcctgagcaagacctacctgtccaagacactggcccagtacacctccaagacatgcagcaactgtgggtttaccatcaccagcgccgactacgacagggtgctggagaagctgaagaagacagcaacaggctggatgaccacaattaacggcaaggagctgaaggtggagggccagattacctactacaacagatacaagagacagaacgtagtcaaggacctgtccgtcgagctggatagactgagcgaagaatctgtgaacaacgacatctcctcctggacaaagggcagaagcggagaagctctgagcctcctgaagaaaagattctcccatagacccgtgcaggagaagttcgtgtgcctgaactgcggcttcgagacacacgcagccgagcaagccgccctgaacatcgccagatcctggctgttcctgcggagccaggagtacaagaaataccagacaaacaagacaaccggcaacaccgataagagagccttcgtcgagacctggcagtccttttaccggaagaagcttaaggaggtgtggaaacctgccgtgcggtctggcggatctggcggaggctccaccagccccaagaaaaagagaaaagtctaagctgccttctgcggggcttgccttctggccatgcccttcttctctcccttgcacctgtacctcttggtctttgaataaagcctgagtaggaaggctagcaaaaaaaaaaaaaaaaaaaaaaaaaaaaaaaaaaaaaaaaaaaaaaaaaaaaaaaaaaaaaaaaaaaaaaaaaaaaaaaa

SEQ ID NO: 12251 - RNA, 5785 nt, synthetic construct
  source 1..5785: mol_type = other RNA
aggaaataagagagaaaagaagagtaagaagaaatataagagccaccatggcccctaagaagaagcgtaaagtgagccggatggaacgcctcgtctacgaggtgcggcagaagtgcagaaacatcgaggacatctgcatctcctgcggatctctgaacgtgaccctggagcacccactgttcatcggcggcatgtgccagaactgtaaaaactgttttctggagtgtgcctatcaatacgacgatgacggctaccagagctactgcaccatctgttgcggcggaagagaggtgctgatgtgtggaaataacaactgctgccggtgcttctgcgtggaatgcgtggacctgctggtgggccccggcgccgcccaggccgctattaaggaagatccttggaactgctacatgtgcggccacaagggcacatacggcctgctgagacggagagaggactggcctagcagactgcagatgttcttcgccaataaccacgaccaggagttcgacccccctaaggtgtaccctcccgtccccgccgagaagagaaagcccatccgggtcctgagcctgttcgatggcatcgccaccggtctgctggtgctgaaggacctgggcatccaggtggataggtacattgcctccgaggtgtgcgaggactccatcaccgtgggaatggtgcgtcatcagggcaagatcatgtacgtgggcgacgtgcggagcgtgacacagaagcatatccaggagtggggccctttcgacctggtgatcggcggcagcccttgcaatgacctgagcatcgtgaacccagcccggaagggcctgtacgagggaaccggcagactgttcttcgagttttacagactgctgcacgacgcccggcctaaggaaggcgacgaccggcccttcttttggctgttcgagaatgtggtggccatgggagtcagcgacaagcgggatattagccggttcctggagagcaaccccgtgatgatcgatgccaaggaagtgagcgccgcccaccgggccagatacttctggggcaatctgcctggcatgaacagacccctggccagcaccgtgaacgacaagctggagctgcaggagtgcctggagcacggccggatcgccaagttcagcaaggtgagaaccatcaccacccgaagcaacagcatcaaacaaggcaaggaccagcactttcctgtgttcatgaacgagaaggaggacatcctgtggtgtaccgagatggagagagtgttcgggttcccagtccactacacagatgtcagcaacatgtctagactggccagacagagactgctgggaagaagctggtccgtccctgtgatcagacacctgttcgcccctctgaaggagtacttcgcctgcgtgagcagcggcaacagcaacgccaacagccggggccccagcttctctagcggcctggtgccactgtccctgagagggagccacatgggccccatggagatctacaaaaccgtgagcgcctggaagcggcagcctgtgcgcgtgctgagcctgtttcggaatatcgataaagtcctgaaaagcctgggattcctggagagcggctctggctccggcggtggcaccctgaagtacgtggaggatgtgacaaacgtggtcagacgggatgtggagaagtggggccccttcgatctggtgtacggcagcacccaacccctgggcagctcttgtgaccggtgccctggctggtacatgtttcagttccaccggatcctgcagtacgccctgccgagacaggagtcccagcggccattcttttggattttcatggacaacttgctgctgaccgaggatgaccaggaaactaccactcggttcctgcagaccgaagccgtgaccctgcaggacgtgagaggccgggactaccagaacgccatgcgggtgtggtccaacatccctggactgaaaagcaagcacgcacctctgacccctaaagaagaggagtacctgcaggcccaggtgcggagcagaagcaagctggacgcccctaaggtggatctgctggtgaagaattgcctcctgcccctgagagagtacttcaagtatttcagccagaatagtctgcccctgggaggcagcggcggcggcagcaaggcccccgtgaccttcggcgacctggccatctacttcagccaggaggagtgggagtggctgagccccatccagaaggacctgtacgaggacgtgatgctggagaactacaggaacctggtgagcctgggcctgagcttcaggaggcccaacgtgatcaccctgctggagaagggcaaggccccctggatggtggagcccgtgaggaggaggagggcccccgagctgaccgaggccagcggcggcccaagcagcggcgcccctcctcccagcggcggcagcccagccggctccccaacctctaccgaggagggcacctctgagtccgccacccccgagagcggccctggcacctccaccgagcccagcgagggcagcgcacccggcagccctgccggcagccccacctccacagaggagggaaccagcaccgagcccagcgaaggcagcgccccaggcaccagcaccgagcctagtgagcaggagattaaacggatcaacaagatcagaagaagacttgtgaaagacagcaacaccaagaaggccggcaagacaggccccatgaaaaccctgctggttagagtgatgacacccgatctgagagagcggctggaaaacctgagaaagaagcctgaaaatatcccccagcccatcagcaatacatctagagccaacctgaataagctgctgaccgattacaccgaaatgaagaaggcgatcctgcatgtgtactgggaagagttccagaaggaccctgtgggcctgatgagccgggtggcccagcctgccagcaagaagatcgatcagaacaagctgaaacctgagatggacgagaagggcaacctgaccaccgccggctttgcctgctctcagtgtggccagcccctgttcgtgtacaagctggagcaggtgtctgagaagggcaaggcttacaccaactacttcggacggtgcaatgtggccgagcacgaaaagctgatcctgctggcccagctgaagcccgagaaggatagcgacgaagccgtgacatatagcctgggaaagtttgggcagagggccctggatttctacagcattcatgtgaccaaggagtccacccaccccgtgaagcccctggcccagatcgccggaaacagatacgcctccggacctgtgggaaaggccctgagcgacgcatgtatgggcacaatcgcctccttcctgtctaagtaccaggacatcatcatcgaacaccagaaggtggtgaagggcaaccagaagagactggagagcctgcgggagctggccggcaaggaaaacctggaataccctagcgtgaccctgccacctcagcctcacaccaaggagggcgttgatgcctacaacgaagtgatcgcccgggtgcgaatgtgggtgaacctgaacctgtggcagaagctgaagctaagcagagatgatgccaagcctctgctgagactgaagggattcccttcctttcctctggtcgagagacaggccaacgaagtggactggtgggacatggtgtgtaacgtgaagaagctgatcaacgagaaaaaggaggatggcaaggtgttttggcagaatctggctggctacaagagacaggaagccctgagaccatacctgagcagcgaggaagatcggaagaagggaaagaaattcgctcggtaccagctgggcgacctgctgctgcacctggaaaagaagcacggcgaggactggggaaaggtgtacgacgaggcctgggagcggattgacaagaaagtggaaggcctgagcaagcacatcaagctggaagaggaacggagaagcgaggacgcccagagcaaggccgccctgaccgactggctgcgggctaaggccagcttcgtgatcgagggcctgaaggaggccgacaaggacgagttctgcagatgcgagctgaagctgcagaagtggtacggggacctgcggggaaagcccttcgccatcgaagccgagaacagcatcctggacatcagcggcttcagcaagcagtacaactgtgccttcatctggcagaaggacggcgtgaagaagctgaacctgtacctgatcatcaactacttcaagggcggcaagctgcggttcaagaagatcaaacctgaagccttcgaagccaacagattctacaccgtgatcaacaaaaagagcggcgagatcgtgcccatggaggtgaacttcaacttcgacgaccccaacctgatcatcctgcctctggcctttggcaagagacagggcagagaattcatctggaacgacctgctgtccctggaaaccggcagcctgaagctggccaacggaagagtgatcgagaagacactgtacaacagaagaacccggcaggatgagcctgccctgttcgtggccctgaccttcgagcggcgggaggtcctggactcctccaatatcaaaccaatgaacctgatcggcgtggcaagaggcgaaaacatccccgccgtgatcgccctgaccgaccccgagggctgcccactgagccggtttaaggatagcctgggaaacccaacccacatcctgagaatcggcgagagctataaggagaagcagcggaccatccaggccaagaaggaggtggagcagcggagagccggcggctacagccggaagtacgccagcaaagccaagaatctggcagacgatatggtgagaaacaccgctagagatctgctgtactacgccgtgacccaggatgccatgctgatcttcgccaacctgagccggggcttcggccggcagggcaagcggaccttcatggccgagagacagtacacacggatggaggactggctgaccgccaagctggcctacgagggcctgagcaagacctacctgtccaagacactggcccagtacacctccaagacatgcagcaactgtgggtttaccatcaccagcgccgactacgacagggtgctggagaagctgaagaagacagcaacaggctggatgaccacaattaacggcaaggagctgaaggtggagggccagattacctactacaacagatacaagagacagaacgtagtcaaggacctgtccgtcgagctggatagactgagcgaagaatctgtgaacaacgacatctcctcctggacaaagggcagaagcggagaagctctgagcctcctgaagaaaagattctcccatagacccgtgcaggagaagttcgtgtgcctgaactgcggcttcgagacacacgcagccgagcaagccgccctgaacatcgccagatcctggctgttcctgcggagccaggagtacaagaaataccagacaaacaagacaaccggcaacaccgataagagagccttcgtcgagacctggcagtccttttaccggaagaagcttaaggaggtgtggaaacctgccgtgcggtctggcggatctggcggaggctccaccagccccaagaaaaagagaaaagtctaagctgccttctgcggggcttgccttctggccatgcccttcttctctcccttgcacctgtacctcttggtctttgaataaagcctgagtaggaaggctagcaaaaaaaaaaaaaaaaaaaaaaaaaaaaaaaaaaaaaaaaaaaaaaaaaaaaaaaaaaaaaaaaaaaaaaaaaaaaaaaa

SEQ ID NO: 12252 - RNA, 5785 nt, synthetic construct
  source 1..5785: mol_type = other RNA
aggaaataagagagaaaagaagagtaagaagaaatataagagccaccatggcccctaagaagaagcgtaaagtgagccggatggaacgcctcgtctacgaggtgcggcagaagtgcagaaacatcgaggacatctgcatctcctgcggatctctgaacgtgaccctggagcacccactgttcatcggcggcatgtgccagaactgtaaaaactgttttctggagtgtgcctatcaatacgacgatgacggctaccagagctactgcaccatctgttgcggcggaagagaggtgctgatgtgtggaaataacaactgctgccggtgcttctgcgtggaatgcgtggacctgctggtgggccccggcgccgcccaggccgctattaaggaagatccttggaactgctacatgtgcggccacaagggcacatacggcctgctgagacggagagaggactggcctagcagactgcagatgttcttcgccaataaccacgaccaggagttcgacccccctaaggtgtaccctcccgtccccgccgagaagagaaagcccatccgggtcctgagcctgttcgatggcatcgccaccggtctgctggtgctgaaggacctgggcatccaggtggataggtacattgcctccgaggtgtgcgaggactccatcaccgtgggaatggtgcgtcatcagggcaagatcatgtacgtgggcgacgtgcggagcgtgacacagaagcatatccaggagtggggccctttcgacctggtgatcggcggcagcccttgcaatgacctgagcatcgtgaacccagcccggaagggcctgtacgagggaaccggcagactgttcttcgagttttacagactgctgcacgacgcccggcctaaggaaggcgacgaccggcccttcttttggctgttcgagaatgtggtggccatgggagtcagcgacaagcgggatattagccggttcctggagagcaaccccgtgatgatcgatgccaaggaagtgagcgccgcccaccgggccagatacttctggggcaatctgcctggcatgaacagacccctggccagcaccgtgaacgacaagctggagctgcaggagtgcctggagcacggccggatcgccaagttcagcaaggtgagaaccatcaccacccgaagcaacagcatcaaacaaggcaaggaccagcactttcctgtgttcatgaacgagaaggaggacatcctgtggtgtaccgagatggagagagtgttcgggttcccagtccactacacagatgtcagcaacatgtctagactggccagacagagactgctgggaagaagctggtccgtccctgtgatcagacacctgttcgcccctctgaaggagtacttcgcctgcgtgagcagcggcaacagcaacgccaacagccggggccccagcttctctagcggcctggtgccactgtccctgagagggagccacatgggccccatggagatctacaaaaccgtgagcgcctggaagcggcagcctgtgcgcgtgctgagcctgtttcggaatatcgataaagtcctgaaaagcctgggattcctggagagcggctctggctccggcggtggcaccctgaagtacgtggaggatgtgacaaacgtggtcagacgggatgtggagaagtggggccccttcgatctggtgtacggcagcacccaacccctgggcagctcttgtgaccggtgccctggctggtacatgtttcagttccaccggatcctgcagtacgccctgccgagacaggagtcccagcggccattcttttggattttcatggacaacttgctgctgaccgaggatgaccaggaaactaccactcggttcctgcagaccgaagccgtgaccctgcaggacgtgagaggccgggactaccagaacgccatgcgggtgtggtccaacatccctggactgaaaagcaagcacgcacctctgacccctaaagaagaggagtacctgcaggcccaggtgcggagcagaagcaagctggacgcccctaaggtggatctgctggtgaagaattgcctcctgcccctgagagagtacttcaagtatttcagccagaatagtctgcccctgggaggcagcggcggcggcccccagggcctggtgaccttcggcgacgtggccgtggacttcagccaggaggagtgggagtggctgaaccccaaccagaggaccctgtacaggaaggtgatgctggagaactacaagaacctggccagcctgggcctgtgcgtgagcaagcccgacgtgatcagcagcctggagcagggcaaggagccctggaccgtgaagaggaagatgaccagggcctggtgccccgacctgaagatcgtgggcggcccaagcagcggcgcccctcctcccagcggcggcagcccagccggctccccaacctctaccgaggagggcacctctgagtccgccacccccgagagcggccctggcacctccaccgagcccagcgagggcagcgcacccggcagccctgccggcagccccacctccacagaggagggaaccagcaccgagcccagcgaaggcagcgccccaggcaccagcaccgagcctagtgagcaggagattaaacggatcaacaagatcagaagaagacttgtgaaagacagcaacaccaagaaggccggcaagacaggccccatgaaaaccctgctggttagagtgatgacacccgatctgagagagcggctggaaaacctgagaaagaagcctgaaaatatcccccagcccatcagcaatacatctagagccaacctgaataagctgctgaccgattacaccgaaatgaagaaggcgatcctgcatgtgtactgggaagagttccagaaggaccctgtgggcctgatgagccgggtggcccagcctgccagcaagaagatcgatcagaacaagctgaaacctgagatggacgagaagggcaacctgaccaccgccggctttgcctgctctcagtgtggccagcccctgttcgtgtacaagctggagcaggtgtctgagaagggcaaggcttacaccaactacttcggacggtgcaatgtggccgagcacgaaaagctgatcctgctggcccagctgaagcccgagaaggatagcgacgaagccgtgacatatagcctgggaaagtttgggcagagggccctggatttctacagcattcatgtgaccaaggagtccacccaccccgtgaagcccctggcccagatcgccggaaacagatacgcctccggacctgtgggaaaggccctgagcgacgcatgtatgggcacaatcgcctccttcctgtctaagtaccaggacatcatcatcgaacaccagaaggtggtgaagggcaaccagaagagactggagagcctgcgggagctggccggcaaggaaaacctggaataccctagcgtgaccctgccacctcagcctcacaccaaggagggcgttgatgcctacaacgaagtgatcgcccgggtgcgaatgtgggtgaacctgaacctgtggcagaagctgaagctaagcagagatgatgccaagcctctgctgagactgaagggattcccttcctttcctctggtcgagagacaggccaacgaagtggactggtgggacatggtgtgtaacgtgaagaagctgatcaacgagaaaaaggaggatggcaaggtgttttggcagaatctggctggctacaagagacaggaagccctgagaccatacctgagcagcgaggaagatcggaagaagggaaagaaattcgctcggtaccagctgggcgacctgctgctgcacctggaaaagaagcacggcgaggactggggaaaggtgtacgacgaggcctgggagcggattgacaagaaagtggaaggcctgagcaagcacatcaagctggaagaggaacggagaagcgaggacgcccagagcaaggccgccctgaccgactggctgcgggctaaggccagcttcgtgatcgagggcctgaaggaggccgacaaggacgagttctgcagatgcgagctgaagctgcagaagtggtacggggacctgcggggaaagcccttcgccatcgaagccgagaacagcatcctggacatcagcggcttcagcaagcagtacaactgtgccttcatctggcagaaggacggcgtgaagaagctgaacctgtacctgatcatcaactacttcaagggcggcaagctgcggttcaagaagatcaaacctgaagccttcgaagccaacagattctacaccgtgatcaacaaaaagagcggcgagatcgtgcccatggaggtgaacttcaacttcgacgaccccaacctgatcatcctgcctctggcctttggcaagagacagggcagagaattcatctggaacgacctgctgtccctggaaaccggcagcctgaagctggccaacggaagagtgatcgagaagacactgtacaacagaagaacccggcaggatgagcctgccctgttcgtggccctgaccttcgagcggcgggaggtcctggactcctccaatatcaaaccaatgaacctgatcggcgtggcaagaggcgaaaacatccccgccgtgatcgccctgaccgaccccgagggctgcccactgagccggtttaaggatagcctgggaaacccaacccacatcctgagaatcggcgagagctataaggagaagcagcggaccatccaggccaagaaggaggtggagcagcggagagccggcggctacagccggaagtacgccagcaaagccaagaatctggcagacgatatggtgagaaacaccgctagagatctgctgtactacgccgtgacccaggatgccatgctgatcttcgccaacctgagccggggcttcggccggcagggcaagcggaccttcatggccgagagacagtacacacggatggaggactggctgaccgccaagctggcctacgagggcctgagcaagacctacctgtccaagacactggcccagtacacctccaagacatgcagcaactgtgggtttaccatcaccagcgccgactacgacagggtgctggagaagctgaagaagacagcaacaggctggatgaccacaattaacggcaaggagctgaaggtggagggccagattacctactacaacagatacaagagacagaacgtagtcaaggacctgtccgtcgagctggatagactgagcgaagaatctgtgaacaacgacatctcctcctggacaaagggcagaagcggagaagctctgagcctcctgaagaaaagattctcccatagacccgtgcaggagaagttcgtgtgcctgaactgcggcttcgagacacacgcagccgagcaagccgccctgaacatcgccagatcctggctgttcctgcggagccaggagtacaagaaataccagacaaacaagacaaccggcaacaccgataagagagccttcgtcgagacctggcagtccttttaccggaagaagcttaaggaggtgtggaaacctgccgtgcggtctggcggatctggcggaggctccaccagccccaagaaaaagagaaaagtctaagctgccttctgcggggcttgccttctggccatgcccttcttctctcccttgcacctgtacctcttggtctttgaataaagcctgagtaggaaggctagcaaaaaaaaaaaaaaaaaaaaaaaaaaaaaaaaaaaaaaaaaaaaaaaaaaaaaaaaaaaaaaaaaaaaaaaaaaaaaaaa

SEQ ID NO: 12253 - RNA, 5785 nt, synthetic construct
  source 1..5785: mol_type = other RNA
aggaaataagagagaaaagaagagtaagaagaaatataagagccaccatggcccctaagaagaagcgtaaagtgagccggatggaacgcctcgtctacgaggtgcggcagaagtgcagaaacatcgaggacatctgcatctcctgcggatctctgaacgtgaccctggagcacccactgttcatcggcggcatgtgccagaactgtaaaaactgttttctggagtgtgcctatcaatacgacgatgacggctaccagagctactgcaccatctgttgcggcggaagagaggtgctgatgtgtggaaataacaactgctgccggtgcttctgcgtggaatgcgtggacctgctggtgggccccggcgccgcccaggccgctattaaggaagatccttggaactgctacatgtgcggccacaagggcacatacggcctgctgagacggagagaggactggcctagcagactgcagatgttcttcgccaataaccacgaccaggagttcgacccccctaaggtgtaccctcccgtccccgccgagaagagaaagcccatccgggtcctgagcctgttcgatggcatcgccaccggtctgctggtgctgaaggacctgggcatccaggtggataggtacattgcctccgaggtgtgcgaggactccatcaccgtgggaatggtgcgtcatcagggcaagatcatgtacgtgggcgacgtgcggagcgtgacacagaagcatatccaggagtggggccctttcgacctggtgatcggcggcagcccttgcaatgacctgagcatcgtgaacccagcccggaagggcctgtacgagggaaccggcagactgttcttcgagttttacagactgctgcacgacgcccggcctaaggaaggcgacgaccggcccttcttttggctgttcgagaatgtggtggccatgggagtcagcgacaagcgggatattagccggttcctggagagcaaccccgtgatgatcgatgccaaggaagtgagcgccgcccaccgggccagatacttctggggcaatctgcctggcatgaacagacccctggccagcaccgtgaacgacaagctggagctgcaggagtgcctggagcacggccggatcgccaagttcagcaaggtgagaaccatcaccacccgaagcaacagcatcaaacaaggcaaggaccagcactttcctgtgttcatgaacgagaaggaggacatcctgtggtgtaccgagatggagagagtgttcgggttcccagtccactacacagatgtcagcaacatgtctagactggccagacagagactgctgggaagaagctggtccgtccctgtgatcagacacctgttcgcccctctgaaggagtacttcgcctgcgtgagcagcggcaacagcaacgccaacagccggggccccagcttctctagcggcctggtgccactgtccctgagagggagccacatgggccccatggagatctacaaaaccgtgagcgcctggaagcggcagcctgtgcgcgtgctgagcctgtttcggaatatcgataaagtcctgaaaagcctgggattcctggagagcggctctggctccggcggtggcaccctgaagtacgtggaggatgtgacaaacgtggtcagacgggatgtggagaagtggggccccttcgatctggtgtacggcagcacccaacccctgggcagctcttgtgaccggtgccctggctggtacatgtttcagttccaccggatcctgcagtacgccctgccgagacaggagtcccagcggccattcttttggattttcatggacaacttgctgctgaccgaggatgaccaggaaactaccactcggttcctgcagaccgaagccgtgaccctgcaggacgtgagaggccgggactaccagaacgccatgcgggtgtggtccaacatccctggactgaaaagcaagcacgcacctctgacccctaaagaagaggagtacctgcaggcccaggtgcggagcagaagcaagctggacgcccctaaggtggatctgctggtgaagaattgcctcctgcccctgagagagtacttcaagtatttcagccagaatagtctgcccctgggaggcagcggcggcggcgccagggagagcgtggtgttcagcgacgtgagcatcgccttcagccaggaggagtgggcccacctggacctggagcagaaggacctgtacagggacgtgatgctggagaactacagcaacctggtgagcctggccggctgcttcgtgagcaagcccgacgtgatcagcctgctggagcagggcaaggagccctggaagatcgtgaggaagggcaggaggaggtaccccgacctggagaccaggggcggcccaagcagcggcgcccctcctcccagcggcggcagcccagccggctccccaacctctaccgaggagggcacctctgagtccgccacccccgagagcggccctggcacctccaccgagcccagcgagggcagcgcacccggcagccctgccggcagccccacctccacagaggagggaaccagcaccgagcccagcgaaggcagcgccccaggcaccagcaccgagcctagtgagcaggagattaaacggatcaacaagatcagaagaagacttgtgaaagacagcaacaccaagaaggccggcaagacaggccccatgaaaaccctgctggttagagtgatgacacccgatctgagagagcggctggaaaacctgagaaagaagcctgaaaatatcccccagcccatcagcaatacatctagagccaacctgaataagctgctgaccgattacaccgaaatgaagaaggcgatcctgcatgtgtactgggaagagttccagaaggaccctgtgggcctgatgagccgggtggcccagcctgccagcaagaagatcgatcagaacaagctgaaacctgagatggacgagaagggcaacctgaccaccgccggctttgcctgctctcagtgtggccagcccctgttcgtgtacaagctggagcaggtgtctgagaagggcaaggcttacaccaactacttcggacggtgcaatgtggccgagcacgaaaagctgatcctgctggcccagctgaagcccgagaaggatagcgacgaagccgtgacatatagcctgggaaagtttgggcagagggccctggatttctacagcattcatgtgaccaaggagtccacccaccccgtgaagcccctggcccagatcgccggaaacagatacgcctccggacctgtgggaaaggccctgagcgacgcatgtatgggcacaatcgcctccttcctgtctaagtaccaggacatcatcatcgaacaccagaaggtggtgaagggcaaccagaagagactggagagcctgcgggagctggccggcaaggaaaacctggaataccctagcgtgaccctgccacctcagcctcacaccaaggagggcgttgatgcctacaacgaagtgatcgcccgggtgcgaatgtgggtgaacctgaacctgtggcagaagctgaagctaagcagagatgatgccaagcctctgctgagactgaagggattcccttcctttcctctggtcgagagacaggccaacgaagtggactggtgggacatggtgtgtaacgtgaagaagctgatcaacgagaaaaaggaggatggcaaggtgttttggcagaatctggctggctacaagagacaggaagccctgagaccatacctgagcagcgaggaagatcggaagaagggaaagaaattcgctcggtaccagctgggcgacctgctgctgcacctggaaaagaagcacggcgaggactggggaaaggtgtacgacgaggcctgggagcggattgacaagaaagtggaaggcctgagcaagcacatcaagctggaagaggaacggagaagcgaggacgcccagagcaaggccgccctgaccgactggctgcgggctaaggccagcttcgtgatcgagggcctgaaggaggccgacaaggacgagttctgcagatgcgagctgaagctgcagaagtggtacggggacctgcggggaaagcccttcgccatcgaagccgagaacagcatcctggacatcagcggcttcagcaagcagtacaactgtgccttcatctggcagaaggacggcgtgaagaagctgaacctgtacctgatcatcaactacttcaagggcggcaagctgcggttcaagaagatcaaacctgaagccttcgaagccaacagattctacaccgtgatcaacaaaaagagcggcgagatcgtgcccatggaggtgaacttcaacttcgacgaccccaacctgatcatcctgcctctggcctttggcaagagacagggcagagaattcatctggaacgacctgctgtccctggaaaccggcagcctgaagctggccaacggaagagtgatcgagaagacactgtacaacagaagaacccggcaggatgagcctgccctgttcgtggccctgaccttcgagcggcgggaggtcctggactcctccaatatcaaaccaatgaacctgatcggcgtggcaagaggcgaaaacatccccgccgtgatcgccctgaccgaccccgagggctgcccactgagccggtttaaggatagcctgggaaacccaacccacatcctgagaatcggcgagagctataaggagaagcagcggaccatccaggccaagaaggaggtggagcagcggagagccggcggctacagccggaagtacgccagcaaagccaagaatctggcagacgatatggtgagaaacaccgctagagatctgctgtactacgccgtgacccaggatgccatgctgatcttcgccaacctgagccggggcttcggccggcagggcaagcggaccttcatggccgagagacagtacacacggatggaggactggctgaccgccaagctggcctacgagggcctgagcaagacctacctgtccaagacactggcccagtacacctccaagacatgcagcaactgtgggtttaccatcaccagcgccgactacgacagggtgctggagaagctgaagaagacagcaacaggctggatgaccacaattaacggcaaggagctgaaggtggagggccagattacctactacaacagatacaagagacagaacgtagtcaaggacctgtccgtcgagctggatagactgagcgaagaatctgtgaacaacgacatctcctcctggacaaagggcagaagcggagaagctctgagcctcctgaagaaaagattctcccatagacccgtgcaggagaagttcgtgtgcctgaactgcggcttcgagacacacgcagccgagcaagccgccctgaacatcgccagatcctggctgttcctgcggagccaggagtacaagaaataccagacaaacaagacaaccggcaacaccgataagagagccttcgtcgagacctggcagtccttttaccggaagaagcttaaggaggtgtggaaacctgccgtgcggtctggcggatctggcggaggctccaccagccccaagaaaaagagaaaagtctaagctgccttctgcggggcttgccttctggccatgcccttcttctctcccttgcacctgtacctcttggtctttgaataaagcctgagtaggaaggctagcaaaaaaaaaaaaaaaaaaaaaaaaaaaaaaaaaaaaaaaaaaaaaaaaaaaaaaaaaaaaaaaaaaaaaaaaaaaaaaaa

SEQ ID NO: 12254 - RNA, 5785 nt, synthetic construct
  source 1..5785: mol_type = other RNA
aggaaataagagagaaaagaagagtaagaagaaatataagagccaccatggcccctaagaagaagcgtaaagtgagccggatggaacgcctcgtctacgaggtgcggcagaagtgcagaaacatcgaggacatctgcatctcctgcggatctctgaacgtgaccctggagcacccactgttcatcggcggcatgtgccagaactgtaaaaactgttttctggagtgtgcctatcaatacgacgatgacggctaccagagctactgcaccatctgttgcggcggaagagaggtgctgatgtgtggaaataacaactgctgccggtgcttctgcgtggaatgcgtggacctgctggtgggccccggcgccgcccaggccgctattaaggaagatccttggaactgctacatgtgcggccacaagggcacatacggcctgctgagacggagagaggactggcctagcagactgcagatgttcttcgccaataaccacgaccaggagttcgacccccctaaggtgtaccctcccgtccccgccgagaagagaaagcccatccgggtcctgagcctgttcgatggcatcgccaccggtctgctggtgctgaaggacctgggcatccaggtggataggtacattgcctccgaggtgtgcgaggactccatcaccgtgggaatggtgcgtcatcagggcaagatcatgtacgtgggcgacgtgcggagcgtgacacagaagcatatccaggagtggggccctttcgacctggtgatcggcggcagcccttgcaatgacctgagcatcgtgaacccagcccggaagggcctgtacgagggaaccggcagactgttcttcgagttttacagactgctgcacgacgcccggcctaaggaaggcgacgaccggcccttcttttggctgttcgagaatgtggtggccatgggagtcagcgacaagcgggatattagccggttcctggagagcaaccccgtgatgatcgatgccaaggaagtgagcgccgcccaccgggccagatacttctggggcaatctgcctggcatgaacagacccctggccagcaccgtgaacgacaagctggagctgcaggagtgcctggagcacggccggatcgccaagttcagcaaggtgagaaccatcaccacccgaagcaacagcatcaaacaaggcaaggaccagcactttcctgtgttcatgaacgagaaggaggacatcctgtggtgtaccgagatggagagagtgttcgggttcccagtccactacacagatgtcagcaacatgtctagactggccagacagagactgctgggaagaagctggtccgtccctgtgatcagacacctgttcgcccctctgaaggagtacttcgcctgcgtgagcagcggcaacagcaacgccaacagccggggccccagcttctctagcggcctggtgccactgtccctgagagggagccacatgggccccatggagatctacaaaaccgtgagcgcctggaagcggcagcctgtgcgcgtgctgagcctgtttcggaatatcgataaagtcctgaaaagcctgggattcctggagagcggctctggctccggcggtggcaccctgaagtacgtggaggatgtgacaaacgtggtcagacgggatgtggagaagtggggccccttcgatctggtgtacggcagcacccaacccctgggcagctcttgtgaccggtgccctggctggtacatgtttcagttccaccggatcctgcagtacgccctgccgagacaggagtcccagcggccattcttttggattttcatggacaacttgctgctgaccgaggatgaccaggaaactaccactcggttcctgcagaccgaagccgtgaccctgcaggacgtgagaggccgggactaccagaacgccatgcgggtgtggtccaacatccctggactgaaaagcaagcacgcacctctgacccctaaagaagaggagtacctgcaggcccaggtgcggagcagaagcaagctggacgcccctaaggtggatctgctggtgaagaattgcctcctgcccctgagagagtacttcaagtatttcagccagaatagtctgcccctgggaggcagcggcggcggcatgatcgagtaccagatccccgtgagcttcaaggacgtggtggtgggcttcacccaggaggagtggcaccagctgagccccgcccagagggccctgtacagggacgtgatgctggagacctacagcaacctggtgagcgtgggctacgagggcaccaagcccgacgtgatcctgaggctggagcaggaggaggccccctggatcggcgaggccgcctgccccggctgccactgctggggcaagggcggcccaagcagcggcgcccctcctcccagcggcggcagcccagccggctccccaacctctaccgaggagggcacctctgagtccgccacccccgagagcggccctggcacctccaccgagcccagcgagggcagcgcacccggcagccctgccggcagccccacctccacagaggagggaaccagcaccgagcccagcgaaggcagcgccccaggcaccagcaccgagcctagtgagcaggagattaaacggatcaacaagatcagaagaagacttgtgaaagacagcaacaccaagaaggccggcaagacaggccccatgaaaaccctgctggttagagtgatgacacccgatctgagagagcggctggaaaacctgagaaagaagcctgaaaatatcccccagcccatcagcaatacatctagagccaacctgaataagctgctgaccgattacaccgaaatgaagaaggcgatcctgcatgtgtactgggaagagttccagaaggaccctgtgggcctgatgagccgggtggcccagcctgccagcaagaagatcgatcagaacaagctgaaacctgagatggacgagaagggcaacctgaccaccgccggctttgcctgctctcagtgtggccagcccctgttcgtgtacaagctggagcaggtgtctgagaagggcaaggcttacaccaactacttcggacggtgcaatgtggccgagcacgaaaagctgatcctgctggcccagctgaagcccgagaaggatagcgacgaagccgtgacatatagcctgggaaagtttgggcagagggccctggatttctacagcattcatgtgaccaaggagtccacccaccccgtgaagcccctggcccagatcgccggaaacagatacgcctccggacctgtgggaaaggccctgagcgacgcatgtatgggcacaatcgcctccttcctgtctaagtaccaggacatcatcatcgaacaccagaaggtggtgaagggcaaccagaagagactggagagcctgcgggagctggccggcaaggaaaacctggaataccctagcgtgaccctgccacctcagcctcacaccaaggagggcgttgatgcctacaacgaagtgatcgcccgggtgcgaatgtgggtgaacctgaacctgtggcagaagctgaagctaagcagagatgatgccaagcctctgctgagactgaagggattcccttcctttcctctggtcgagagacaggccaacgaagtggactggtgggacatggtgtgtaacgtgaagaagctgatcaacgagaaaaaggaggatggcaaggtgttttggcagaatctggctggctacaagagacaggaagccctgagaccatacctgagcagcgaggaagatcggaagaagggaaagaaattcgctcggtaccagctgggcgacctgctgctgcacctggaaaagaagcacggcgaggactggggaaaggtgtacgacgaggcctgggagcggattgacaagaaagtggaaggcctgagcaagcacatcaagctggaagaggaacggagaagcgaggacgcccagagcaaggccgccctgaccgactggctgcgggctaaggccagcttcgtgatcgagggcctgaaggaggccgacaaggacgagttctgcagatgcgagctgaagctgcagaagtggtacggggacctgcggggaaagcccttcgccatcgaagccgagaacagcatcctggacatcagcggcttcagcaagcagtacaactgtgccttcatctggcagaaggacggcgtgaagaagctgaacctgtacctgatcatcaactacttcaagggcggcaagctgcggttcaagaagatcaaacctgaagccttcgaagccaacagattctacaccgtgatcaacaaaaagagcggcgagatcgtgcccatggaggtgaacttcaacttcgacgaccccaacctgatcatcctgcctctggcctttggcaagagacagggcagagaattcatctggaacgacctgctgtccctggaaaccggcagcctgaagctggccaacggaagagtgatcgagaagacactgtacaacagaagaacccggcaggatgagcctgccctgttcgtggccctgaccttcgagcggcgggaggtcctggactcctccaatatcaaaccaatgaacctgatcggcgtggcaagaggcgaaaacatccccgccgtgatcgccctgaccgaccccgagggctgcccactgagccggtttaaggatagcctgggaaacccaacccacatcctgagaatcggcgagagctataaggagaagcagcggaccatccaggccaagaaggaggtggagcagcggagagccggcggctacagccggaagtacgccagcaaagccaagaatctggcagacgatatggtgagaaacaccgctagagatctgctgtactacgccgtgacccaggatgccatgctgatcttcgccaacctgagccggggcttcggccggcagggcaagcggaccttcatggccgagagacagtacacacggatggaggactggctgaccgccaagctggcctacgagggcctgagcaagacctacctgtccaagacactggcccagtacacctccaagacatgcagcaactgtgggtttaccatcaccagcgccgactacgacagggtgctggagaagctgaagaagacagcaacaggctggatgaccacaattaacggcaaggagctgaaggtggagggccagattacctactacaacagatacaagagacagaacgtagtcaaggacctgtccgtcgagctggatagactgagcgaagaatctgtgaacaacgacatctcctcctggacaaagggcagaagcggagaagctctgagcctcctgaagaaaagattctcccatagacccgtgcaggagaagttcgtgtgcctgaactgcggcttcgagacacacgcagccgagcaagccgccctgaacatcgccagatcctggctgttcctgcggagccaggagtacaagaaataccagacaaacaagacaaccggcaacaccgataagagagccttcgtcgagacctggcagtccttttaccggaagaagcttaaggaggtgtggaaacctgccgtgcggtctggcggatctggcggaggctccaccagccccaagaaaaagagaaaagtctaagctgccttctgcggggcttgccttctggccatgcccttcttctctcccttgcacctgtacctcttggtctttgaataaagcctgagtaggaaggctagcaaaaaaaaaaaaaaaaaaaaaaaaaaaaaaaaaaaaaaaaaaaaaaaaaaaaaaaaaaaaaaaaaaaaaaaaaaaaaaaa

SEQ ID NO: 12255 - RNA, 5785 nt, synthetic construct
  source 1..5785: mol_type = other RNA
aggaaataagagagaaaagaagagtaagaagaaatataagagccaccatggcccctaagaagaagcgtaaagtgagccggatggaacgcctcgtctacgaggtgcggcagaagtgcagaaacatcgaggacatctgcatctcctgcggatctctgaacgtgaccctggagcacccactgttcatcggcggcatgtgccagaactgtaaaaactgttttctggagtgtgcctatcaatacgacgatgacggctaccagagctactgcaccatctgttgcggcggaagagaggtgctgatgtgtggaaataacaactgctgccggtgcttctgcgtggaatgcgtggacctgctggtgggccccggcgccgcccaggccgctattaaggaagatccttggaactgctacatgtgcggccacaagggcacatacggcctgctgagacggagagaggactggcctagcagactgcagatgttcttcgccaataaccacgaccaggagttcgacccccctaaggtgtaccctcccgtccccgccgagaagagaaagcccatccgggtcctgagcctgttcgatggcatcgccaccggtctgctggtgctgaaggacctgggcatccaggtggataggtacattgcctccgaggtgtgcgaggactccatcaccgtgggaatggtgcgtcatcagggcaagatcatgtacgtgggcgacgtgcggagcgtgacacagaagcatatccaggagtggggccctttcgacctggtgatcggcggcagcccttgcaatgacctgagcatcgtgaacccagcccggaagggcctgtacgagggaaccggcagactgttcttcgagttttacagactgctgcacgacgcccggcctaaggaaggcgacgaccggcccttcttttggctgttcgagaatgtggtggccatgggagtcagcgacaagcgggatattagccggttcctggagagcaaccccgtgatgatcgatgccaaggaagtgagcgccgcccaccgggccagatacttctggggcaatctgcctggcatgaacagacccctggccagcaccgtgaacgacaagctggagctgcaggagtgcctggagcacggccggatcgccaagttcagcaaggtgagaaccatcaccacccgaagcaacagcatcaaacaaggcaaggaccagcactttcctgtgttcatgaacgagaaggaggacatcctgtggtgtaccgagatggagagagtgttcgggttcccagtccactacacagatgtcagcaacatgtctagactggccagacagagactgctgggaagaagctggtccgtccctgtgatcagacacctgttcgcccctctgaaggagtacttcgcctgcgtgagcagcggcaacagcaacgccaacagccggggccccagcttctctagcggcctggtgccactgtccctgagagggagccacatgggccccatggagatctacaaaaccgtgagcgcctggaagcggcagcctgtgcgcgtgctgagcctgtttcggaatatcgataaagtcctgaaaagcctgggattcctggagagcggctctggctccggcggtggcaccctgaagtacgtggaggatgtgacaaacgtggtcagacgggatgtggagaagtggggccccttcgatctggtgtacggcagcacccaacccctgggcagctcttgtgaccggtgccctggctggtacatgtttcagttccaccggatcctgcagtacgccctgccgagacaggagtcccagcggccattcttttggattttcatggacaacttgctgctgaccgaggatgaccaggaaactaccactcggttcctgcagaccgaagccgtgaccctgcaggacgtgagaggccgggactaccagaacgccatgcgggtgtggtccaacatccctggactgaaaagcaagcacgcacctctgacccctaaagaagaggagtacctgcaggcccaggtgcggagcagaagcaagctggacgcccctaaggtggatctgctggtgaagaattgcctcctgcccctgagagagtacttcaagtatttcagccagaatagtctgcccctgggaggcagcggcggcggcccccaggagagcgtgaccttcaaggacatcgccgtggacttcacccaggaggagtgggccctgctggacgccagccagaggaagctgtacagggacgtgatgctggagaacatcggccacctggtgagcgtgggctacagggtgtgcaagagcgacgtgatcagccagctgcagcagggcgtggagctgtggagggagggcaggggcttcccccagggcgtgatccccgacaggaagagcagcggcggcccaagcagcggcgcccctcctcccagcggcggcagcccagccggctccccaacctctaccgaggagggcacctctgagtccgccacccccgagagcggccctggcacctccaccgagcccagcgagggcagcgcacccggcagccctgccggcagccccacctccacagaggagggaaccagcaccgagcccagcgaaggcagcgccccaggcaccagcaccgagcctagtgagcaggagattaaacggatcaacaagatcagaagaagacttgtgaaagacagcaacaccaagaaggccggcaagacaggccccatgaaaaccctgctggttagagtgatgacacccgatctgagagagcggctggaaaacctgagaaagaagcctgaaaatatcccccagcccatcagcaatacatctagagccaacctgaataagctgctgaccgattacaccgaaatgaagaaggcgatcctgcatgtgtactgggaagagttccagaaggaccctgtgggcctgatgagccgggtggcccagcctgccagcaagaagatcgatcagaacaagctgaaacctgagatggacgagaagggcaacctgaccaccgccggctttgcctgctctcagtgtggccagcccctgttcgtgtacaagctggagcaggtgtctgagaagggcaaggcttacaccaactacttcggacggtgcaatgtggccgagcacgaaaagctgatcctgctggcccagctgaagcccgagaaggatagcgacgaagccgtgacatatagcctgggaaagtttgggcagagggccctggatttctacagcattcatgtgaccaaggagtccacccaccccgtgaagcccctggcccagatcgccggaaacagatacgcctccggacctgtgggaaaggccctgagcgacgcatgtatgggcacaatcgcctccttcctgtctaagtaccaggacatcatcatcgaacaccagaaggtggtgaagggcaaccagaagagactggagagcctgcgggagctggccggcaaggaaaacctggaataccctagcgtgaccctgccacctcagcctcacaccaaggagggcgttgatgcctacaacgaagtgatcgcccgggtgcgaatgtgggtgaacctgaacctgtggcagaagctgaagctaagcagagatgatgccaagcctctgctgagactgaagggattcccttcctttcctctggtcgagagacaggccaacgaagtggactggtgggacatggtgtgtaacgtgaagaagctgatcaacgagaaaaaggaggatggcaaggtgttttggcagaatctggctggctacaagagacaggaagccctgagaccatacctgagcagcgaggaagatcggaagaagggaaagaaattcgctcggtaccagctgggcgacctgctgctgcacctggaaaagaagcacggcgaggactggggaaaggtgtacgacgaggcctgggagcggattgacaagaaagtggaaggcctgagcaagcacatcaagctggaagaggaacggagaagcgaggacgcccagagcaaggccgccctgaccgactggctgcgggctaaggccagcttcgtgatcgagggcctgaaggaggccgacaaggacgagttctgcagatgcgagctgaagctgcagaagtggtacggggacctgcggggaaagcccttcgccatcgaagccgagaacagcatcctggacatcagcggcttcagcaagcagtacaactgtgccttcatctggcagaaggacggcgtgaagaagctgaacctgtacctgatcatcaactacttcaagggcggcaagctgcggttcaagaagatcaaacctgaagccttcgaagccaacagattctacaccgtgatcaacaaaaagagcggcgagatcgtgcccatggaggtgaacttcaacttcgacgaccccaacctgatcatcctgcctctggcctttggcaagagacagggcagagaattcatctggaacgacctgctgtccctggaaaccggcagcctgaagctggccaacggaagagtgatcgagaagacactgtacaacagaagaacccggcaggatgagcctgccctgttcgtggccctgaccttcgagcggcgggaggtcctggactcctccaatatcaaaccaatgaacctgatcggcgtggcaagaggcgaaaacatccccgccgtgatcgccctgaccgaccccgagggctgcccactgagccggtttaaggatagcctgggaaacccaacccacatcctgagaatcggcgagagctataaggagaagcagcggaccatccaggccaagaaggaggtggagcagcggagagccggcggctacagccggaagtacgccagcaaagccaagaatctggcagacgatatggtgagaaacaccgctagagatctgctgtactacgccgtgacccaggatgccatgctgatcttcgccaacctgagccggggcttcggccggcagggcaagcggaccttcatggccgagagacagtacacacggatggaggactggctgaccgccaagctggcctacgagggcctgagcaagacctacctgtccaagacactggcccagtacacctccaagacatgcagcaactgtgggtttaccatcaccagcgccgactacgacagggtgctggagaagctgaagaagacagcaacaggctggatgaccacaattaacggcaaggagctgaaggtggagggccagattacctactacaacagatacaagagacagaacgtagtcaaggacctgtccgtcgagctggatagactgagcgaagaatctgtgaacaacgacatctcctcctggacaaagggcagaagcggagaagctctgagcctcctgaagaaaagattctcccatagacccgtgcaggagaagttcgtgtgcctgaactgcggcttcgagacacacgcagccgagcaagccgccctgaacatcgccagatcctggctgttcctgcggagccaggagtacaagaaataccagacaaacaagacaaccggcaacaccgataagagagccttcgtcgagacctggcagtccttttaccggaagaagcttaaggaggtgtggaaacctgccgtgcggtctggcggatctggcggaggctccaccagccccaagaaaaagagaaaagtctaagctgccttctgcggggcttgccttctggccatgcccttcttctctcccttgcacctgtacctcttggtctttgaataaagcctgagtaggaaggctagcaaaaaaaaaaaaaaaaaaaaaaaaaaaaaaaaaaaaaaaaaaaaaaaaaaaaaaaaaaaaaaaaaaaaaaaaaaaaaaaa

SEQ ID NO: 12256 - RNA, 5785 nt, synthetic construct
  source 1..5785: mol_type = other RNA
aggaaataagagagaaaagaagagtaagaagaaatataagagccaccatggcccctaagaagaagcgtaaagtgagccggatggaacgcctcgtctacgaggtgcggcagaagtgcagaaacatcgaggacatctgcatctcctgcggatctctgaacgtgaccctggagcacccactgttcatcggcggcatgtgccagaactgtaaaaactgttttctggagtgtgcctatcaatacgacgatgacggctaccagagctactgcaccatctgttgcggcggaagagaggtgctgatgtgtggaaataacaactgctgccggtgcttctgcgtggaatgcgtggacctgctggtgggccccggcgccgcccaggccgctattaaggaagatccttggaactgctacatgtgcggccacaagggcacatacggcctgctgagacggagagaggactggcctagcagactgcagatgttcttcgccaataaccacgaccaggagttcgacccccctaaggtgtaccctcccgtccccgccgagaagagaaagcccatccgggtcctgagcctgttcgatggcatcgccaccggtctgctggtgctgaaggacctgggcatccaggtggataggtacattgcctccgaggtgtgcgaggactccatcaccgtgggaatggtgcgtcatcagggcaagatcatgtacgtgggcgacgtgcggagcgtgacacagaagcatatccaggagtggggccctttcgacctggtgatcggcggcagcccttgcaatgacctgagcatcgtgaacccagcccggaagggcctgtacgagggaaccggcagactgttcttcgagttttacagactgctgcacgacgcccggcctaaggaaggcgacgaccggcccttcttttggctgttcgagaatgtggtggccatgggagtcagcgacaagcgggatattagccggttcctggagagcaaccccgtgatgatcgatgccaaggaagtgagcgccgcccaccgggccagatacttctggggcaatctgcctggcatgaacagacccctggccagcaccgtgaacgacaagctggagctgcaggagtgcctggagcacggccggatcgccaagttcagcaaggtgagaaccatcaccacccgaagcaacagcatcaaacaaggcaaggaccagcactttcctgtgttcatgaacgagaaggaggacatcctgtggtgtaccgagatggagagagtgttcgggttcccagtccactacacagatgtcagcaacatgtctagactggccagacagagactgctgggaagaagctggtccgtccctgtgatcagacacctgttcgcccctctgaaggagtacttcgcctgcgtgagcagcggcaacagcaacgccaacagccggggccccagcttctctagcggcctggtgccactgtccctgagagggagccacatgggccccatggagatctacaaaaccgtgagcgcctggaagcggcagcctgtgcgcgtgctgagcctgtttcggaatatcgataaagtcctgaaaagcctgggattcctggagagcggctctggctccggcggtggcaccctgaagtacgtggaggatgtgacaaacgtggtcagacgggatgtggagaagtggggccccttcgatctggtgtacggcagcacccaacccctgggcagctcttgtgaccggtgccctggctggtacatgtttcagttccaccggatcctgcagtacgccctgccgagacaggagtcccagcggccattcttttggattttcatggacaacttgctgctgaccgaggatgaccaggaaactaccactcggttcctgcagaccgaagccgtgaccctgcaggacgtgagaggccgggactaccagaacgccatgcgggtgtggtccaacatccctggactgaaaagcaagcacgcacctctgacccctaaagaagaggagtacctgcaggcccaggtgcggagcagaagcaagctggacgcccctaaggtggatctgctggtgaagaattgcctcctgcccctgagagagtacttcaagtatttcagccagaatagtctgcccctgggaggcagcggcggcggcatgaacgtggaggtggtgaaggtgatgccccaggacctggtgaccttcaaggacgtggccatcgacttcagccaggaggagtggcagtggatgaaccccgcccagaagaggctgtacaggagcatgatgctggagaactaccagagcctggtgagcctgggcctgtgcatcagcaagccctacgtgatcagcctgctggagcagggcagggagccctgggagatgaccagcgagatgaccaggggcggcccaagcagcggcgcccctcctcccagcggcggcagcccagccggctccccaacctctaccgaggagggcacctctgagtccgccacccccgagagcggccctggcacctccaccgagcccagcgagggcagcgcacccggcagccctgccggcagccccacctccacagaggagggaaccagcaccgagcccagcgaaggcagcgccccaggcaccagcaccgagcctagtgagcaggagattaaacggatcaacaagatcagaagaagacttgtgaaagacagcaacaccaagaaggccggcaagacaggccccatgaaaaccctgctggttagagtgatgacacccgatctgagagagcggctggaaaacctgagaaagaagcctgaaaatatcccccagcccatcagcaatacatctagagccaacctgaataagctgctgaccgattacaccgaaatgaagaaggcgatcctgcatgtgtactgggaagagttccagaaggaccctgtgggcctgatgagccgggtggcccagcctgccagcaagaagatcgatcagaacaagctgaaacctgagatggacgagaagggcaacctgaccaccgccggctttgcctgctctcagtgtggccagcccctgttcgtgtacaagctggagcaggtgtctgagaagggcaaggcttacaccaactacttcggacggtgcaatgtggccgagcacgaaaagctgatcctgctggcccagctgaagcccgagaaggatagcgacgaagccgtgacatatagcctgggaaagtttgggcagagggccctggatttctacagcattcatgtgaccaaggagtccacccaccccgtgaagcccctggcccagatcgccggaaacagatacgcctccggacctgtgggaaaggccctgagcgacgcatgtatgggcacaatcgcctccttcctgtctaagtaccaggacatcatcatcgaacaccagaaggtggtgaagggcaaccagaagagactggagagcctgcgggagctggccggcaaggaaaacctggaataccctagcgtgaccctgccacctcagcctcacaccaaggagggcgttgatgcctacaacgaagtgatcgcccgggtgcgaatgtgggtgaacctgaacctgtggcagaagctgaagctaagcagagatgatgccaagcctctgctgagactgaagggattcccttcctttcctctggtcgagagacaggccaacgaagtggactggtgggacatggtgtgtaacgtgaagaagctgatcaacgagaaaaaggaggatggcaaggtgttttggcagaatctggctggctacaagagacaggaagccctgagaccatacctgagcagcgaggaagatcggaagaagggaaagaaattcgctcggtaccagctgggcgacctgctgctgcacctggaaaagaagcacggcgaggactggggaaaggtgtacgacgaggcctgggagcggattgacaagaaagtggaaggcctgagcaagcacatcaagctggaagaggaacggagaagcgaggacgcccagagcaaggccgccctgaccgactggctgcgggctaaggccagcttcgtgatcgagggcctgaaggaggccgacaaggacgagttctgcagatgcgagctgaagctgcagaagtggtacggggacctgcggggaaagcccttcgccatcgaagccgagaacagcatcctggacatcagcggcttcagcaagcagtacaactgtgccttcatctggcagaaggacggcgtgaagaagctgaacctgtacctgatcatcaactacttcaagggcggcaagctgcggttcaagaagatcaaacctgaagccttcgaagccaacagattctacaccgtgatcaacaaaaagagcggcgagatcgtgcccatggaggtgaacttcaacttcgacgaccccaacctgatcatcctgcctctggcctttggcaagagacagggcagagaattcatctggaacgacctgctgtccctggaaaccggcagcctgaagctggccaacggaagagtgatcgagaagacactgtacaacagaagaacccggcaggatgagcctgccctgttcgtggccctgaccttcgagcggcgggaggtcctggactcctccaatatcaaaccaatgaacctgatcggcgtggcaagaggcgaaaacatccccgccgtgatcgccctgaccgaccccgagggctgcccactgagccggtttaaggatagcctgggaaacccaacccacatcctgagaatcggcgagagctataaggagaagcagcggaccatccaggccaagaaggaggtggagcagcggagagccggcggctacagccggaagtacgccagcaaagccaagaatctggcagacgatatggtgagaaacaccgctagagatctgctgtactacgccgtgacccaggatgccatgctgatcttcgccaacctgagccggggcttcggccggcagggcaagcggaccttcatggccgagagacagtacacacggatggaggactggctgaccgccaagctggcctacgagggcctgagcaagacctacctgtccaagacactggcccagtacacctccaagacatgcagcaactgtgggtttaccatcaccagcgccgactacgacagggtgctggagaagctgaagaagacagcaacaggctggatgaccacaattaacggcaaggagctgaaggtggagggccagattacctactacaacagatacaagagacagaacgtagtcaaggacctgtccgtcgagctggatagactgagcgaagaatctgtgaacaacgacatctcctcctggacaaagggcagaagcggagaagctctgagcctcctgaagaaaagattctcccatagacccgtgcaggagaagttcgtgtgcctgaactgcggcttcgagacacacgcagccgagcaagccgccctgaacatcgccagatcctggctgttcctgcggagccaggagtacaagaaataccagacaaacaagacaaccggcaacaccgataagagagccttcgtcgagacctggcagtccttttaccggaagaagcttaaggaggtgtggaaacctgccgtgcggtctggcggatctggcggaggctccaccagccccaagaaaaagagaaaagtctaagctgccttctgcggggcttgccttctggccatgcccttcttctctcccttgcacctgtacctcttggtctttgaataaagcctgagtaggaaggctagcaaaaaaaaaaaaaaaaaaaaaaaaaaaaaaaaaaaaaaaaaaaaaaaaaaaaaaaaaaaaaaaaaaaaaaaaaaaaaaaa

SEQ ID NO: 12257 - RNA, 5785 nt, synthetic construct
  source 1..5785: mol_type = other RNA
aggaaataagagagaaaagaagagtaagaagaaatataagagccaccatggcccctaagaagaagcgtaaagtgagccggatggaacgcctcgtctacgaggtgcggcagaagtgcagaaacatcgaggacatctgcatctcctgcggatctctgaacgtgaccctggagcacccactgttcatcggcggcatgtgccagaactgtaaaaactgttttctggagtgtgcctatcaatacgacgatgacggctaccagagctactgcaccatctgttgcggcggaagagaggtgctgatgtgtggaaataacaactgctgccggtgcttctgcgtggaatgcgtggacctgctggtgggccccggcgccgcccaggccgctattaaggaagatccttggaactgctacatgtgcggccacaagggcacatacggcctgctgagacggagagaggactggcctagcagactgcagatgttcttcgccaataaccacgaccaggagttcgacccccctaaggtgtaccctcccgtccccgccgagaagagaaagcccatccgggtcctgagcctgttcgatggcatcgccaccggtctgctggtgctgaaggacctgggcatccaggtggataggtacattgcctccgaggtgtgcgaggactccatcaccgtgggaatggtgcgtcatcagggcaagatcatgtacgtgggcgacgtgcggagcgtgacacagaagcatatccaggagtggggccctttcgacctggtgatcggcggcagcccttgcaatgacctgagcatcgtgaacccagcccggaagggcctgtacgagggaaccggcagactgttcttcgagttttacagactgctgcacgacgcccggcctaaggaaggcgacgaccggcccttcttttggctgttcgagaatgtggtggccatgggagtcagcgacaagcgggatattagccggttcctggagagcaaccccgtgatgatcgatgccaaggaagtgagcgccgcccaccgggccagatacttctggggcaatctgcctggcatgaacagacccctggccagcaccgtgaacgacaagctggagctgcaggagtgcctggagcacggccggatcgccaagttcagcaaggtgagaaccatcaccacccgaagcaacagcatcaaacaaggcaaggaccagcactttcctgtgttcatgaacgagaaggaggacatcctgtggtgtaccgagatggagagagtgttcgggttcccagtccactacacagatgtcagcaacatgtctagactggccagacagagactgctgggaagaagctggtccgtccctgtgatcagacacctgttcgcccctctgaaggagtacttcgcctgcgtgagcagcggcaacagcaacgccaacagccggggccccagcttctctagcggcctggtgccactgtccctgagagggagccacatgggccccatggagatctacaaaaccgtgagcgcctggaagcggcagcctgtgcgcgtgctgagcctgtttcggaatatcgataaagtcctgaaaagcctgggattcctggagagcggctctggctccggcggtggcaccctgaagtacgtggaggatgtgacaaacgtggtcagacgggatgtggagaagtggggccccttcgatctggtgtacggcagcacccaacccctgggcagctcttgtgaccggtgccctggctggtacatgtttcagttccaccggatcctgcagtacgccctgccgagacaggagtcccagcggccattcttttggattttcatggacaacttgctgctgaccgaggatgaccaggaaactaccactcggttcctgcagaccgaagccgtgaccctgcaggacgtgagaggccgggactaccagaacgccatgcgggtgtggtccaacatccctggactgaaaagcaagcacgcacctctgacccctaaagaagaggagtacctgcaggcccaggtgcggagcagaagcaagctggacgcccctaaggtggatctgctggtgaagaattgcctcctgcccctgagagagtacttcaagtatttcagccagaatagtctgcccctgggaggcagcggcggcggcgcccacatggccttcagggacgtggccgtggacttcacccaggaggagtggatgctgctgagccccgcccagaggagcctgtacagggaggtgatgctggagaactacagcaacatggtgagcctgggcatccccttcagcaagcccaagctgatcacccagctggagcagggcaaggagacctggagggaggagaggaagtgcccccccgccacctgcagcgccgagccccagcccgagctgggcggcccaagcagcggcgcccctcctcccagcggcggcagcccagccggctccccaacctctaccgaggagggcacctctgagtccgccacccccgagagcggccctggcacctccaccgagcccagcgagggcagcgcacccggcagccctgccggcagccccacctccacagaggagggaaccagcaccgagcccagcgaaggcagcgccccaggcaccagcaccgagcctagtgagcaggagattaaacggatcaacaagatcagaagaagacttgtgaaagacagcaacaccaagaaggccggcaagacaggccccatgaaaaccctgctggttagagtgatgacacccgatctgagagagcggctggaaaacctgagaaagaagcctgaaaatatcccccagcccatcagcaatacatctagagccaacctgaataagctgctgaccgattacaccgaaatgaagaaggcgatcctgcatgtgtactgggaagagttccagaaggaccctgtgggcctgatgagccgggtggcccagcctgccagcaagaagatcgatcagaacaagctgaaacctgagatggacgagaagggcaacctgaccaccgccggctttgcctgctctcagtgtggccagcccctgttcgtgtacaagctggagcaggtgtctgagaagggcaaggcttacaccaactacttcggacggtgcaatgtggccgagcacgaaaagctgatcctgctggcccagctgaagcccgagaaggatagcgacgaagccgtgacatatagcctgggaaagtttgggcagagggccctggatttctacagcattcatgtgaccaaggagtccacccaccccgtgaagcccctggcccagatcgccggaaacagatacgcctccggacctgtgggaaaggccctgagcgacgcatgtatgggcacaatcgcctccttcctgtctaagtaccaggacatcatcatcgaacaccagaaggtggtgaagggcaaccagaagagactggagagcctgcgggagctggccggcaaggaaaacctggaataccctagcgtgaccctgccacctcagcctcacaccaaggagggcgttgatgcctacaacgaagtgatcgcccgggtgcgaatgtgggtgaacctgaacctgtggcagaagctgaagctaagcagagatgatgccaagcctctgctgagactgaagggattcccttcctttcctctggtcgagagacaggccaacgaagtggactggtgggacatggtgtgtaacgtgaagaagctgatcaacgagaaaaaggaggatggcaaggtgttttggcagaatctggctggctacaagagacaggaagccctgagaccatacctgagcagcgaggaagatcggaagaagggaaagaaattcgctcggtaccagctgggcgacctgctgctgcacctggaaaagaagcacggcgaggactggggaaaggtgtacgacgaggcctgggagcggattgacaagaaagtggaaggcctgagcaagcacatcaagctggaagaggaacggagaagcgaggacgcccagagcaaggccgccctgaccgactggctgcgggctaaggccagcttcgtgatcgagggcctgaaggaggccgacaaggacgagttctgcagatgcgagctgaagctgcagaagtggtacggggacctgcggggaaagcccttcgccatcgaagccgagaacagcatcctggacatcagcggcttcagcaagcagtacaactgtgccttcatctggcagaaggacggcgtgaagaagctgaacctgtacctgatcatcaactacttcaagggcggcaagctgcggttcaagaagatcaaacctgaagccttcgaagccaacagattctacaccgtgatcaacaaaaagagcggcgagatcgtgcccatggaggtgaacttcaacttcgacgaccccaacctgatcatcctgcctctggcctttggcaagagacagggcagagaattcatctggaacgacctgctgtccctggaaaccggcagcctgaagctggccaacggaagagtgatcgagaagacactgtacaacagaagaacccggcaggatgagcctgccctgttcgtggccctgaccttcgagcggcgggaggtcctggactcctccaatatcaaaccaatgaacctgatcggcgtggcaagaggcgaaaacatccccgccgtgatcgccctgaccgaccccgagggctgcccactgagccggtttaaggatagcctgggaaacccaacccacatcctgagaatcggcgagagctataaggagaagcagcggaccatccaggccaagaaggaggtggagcagcggagagccggcggctacagccggaagtacgccagcaaagccaagaatctggcagacgatatggtgagaaacaccgctagagatctgctgtactacgccgtgacccaggatgccatgctgatcttcgccaacctgagccggggcttcggccggcagggcaagcggaccttcatggccgagagacagtacacacggatggaggactggctgaccgccaagctggcctacgagggcctgagcaagacctacctgtccaagacactggcccagtacacctccaagacatgcagcaactgtgggtttaccatcaccagcgccgactacgacagggtgctggagaagctgaagaagacagcaacaggctggatgaccacaattaacggcaaggagctgaaggtggagggccagattacctactacaacagatacaagagacagaacgtagtcaaggacctgtccgtcgagctggatagactgagcgaagaatctgtgaacaacgacatctcctcctggacaaagggcagaagcggagaagctctgagcctcctgaagaaaagattctcccatagacccgtgcaggagaagttcgtgtgcctgaactgcggcttcgagacacacgcagccgagcaagccgccctgaacatcgccagatcctggctgttcctgcggagccaggagtacaagaaataccagacaaacaagacaaccggcaacaccgataagagagccttcgtcgagacctggcagtccttttaccggaagaagcttaaggaggtgtggaaacctgccgtgcggtctggcggatctggcggaggctccaccagccccaagaaaaagagaaaagtctaagctgccttctgcggggcttgccttctggccatgcccttcttctctcccttgcacctgtacctcttggtctttgaataaagcctgagtaggaaggctagcaaaaaaaaaaaaaaaaaaaaaaaaaaaaaaaaaaaaaaaaaaaaaaaaaaaaaaaaaaaaaaaaaaaaaaaaaaaaaaaa

SEQ ID NO: 12258 - RNA, 5785 nt, synthetic construct
  source 1..5785: mol_type = other RNA
aggaaataagagagaaaagaagagtaagaagaaatataagagccaccatggcccctaagaagaagcgtaaagtgagccggatggaacgcctcgtctacgaggtgcggcagaagtgcagaaacatcgaggacatctgcatctcctgcggatctctgaacgtgaccctggagcacccactgttcatcggcggcatgtgccagaactgtaaaaactgttttctggagtgtgcctatcaatacgacgatgacggctaccagagctactgcaccatctgttgcggcggaagagaggtgctgatgtgtggaaataacaactgctgccggtgcttctgcgtggaatgcgtggacctgctggtgggccccggcgccgcccaggccgctattaaggaagatccttggaactgctacatgtgcggccacaagggcacatacggcctgctgagacggagagaggactggcctagcagactgcagatgttcttcgccaataaccacgaccaggagttcgacccccctaaggtgtaccctcccgtccccgccgagaagagaaagcccatccgggtcctgagcctgttcgatggcatcgccaccggtctgctggtgctgaaggacctgggcatccaggtggataggtacattgcctccgaggtgtgcgaggactccatcaccgtgggaatggtgcgtcatcagggcaagatcatgtacgtgggcgacgtgcggagcgtgacacagaagcatatccaggagtggggccctttcgacctggtgatcggcggcagcccttgcaatgacctgagcatcgtgaacccagcccggaagggcctgtacgagggaaccggcagactgttcttcgagttttacagactgctgcacgacgcccggcctaaggaaggcgacgaccggcccttcttttggctgttcgagaatgtggtggccatgggagtcagcgacaagcgggatattagccggttcctggagagcaaccccgtgatgatcgatgccaaggaagtgagcgccgcccaccgggccagatacttctggggcaatctgcctggcatgaacagacccctggccagcaccgtgaacgacaagctggagctgcaggagtgcctggagcacggccggatcgccaagttcagcaaggtgagaaccatcaccacccgaagcaacagcatcaaacaaggcaaggaccagcactttcctgtgttcatgaacgagaaggaggacatcctgtggtgtaccgagatggagagagtgttcgggttcccagtccactacacagatgtcagcaacatgtctagactggccagacagagactgctgggaagaagctggtccgtccctgtgatcagacacctgttcgcccctctgaaggagtacttcgcctgcgtgagcagcggcaacagcaacgccaacagccggggccccagcttctctagcggcctggtgccactgtccctgagagggagccacatgggccccatggagatctacaaaaccgtgagcgcctggaagcggcagcctgtgcgcgtgctgagcctgtttcggaatatcgataaagtcctgaaaagcctgggattcctggagagcggctctggctccggcggtggcaccctgaagtacgtggaggatgtgacaaacgtggtcagacgggatgtggagaagtggggccccttcgatctggtgtacggcagcacccaacccctgggcagctcttgtgaccggtgccctggctggtacatgtttcagttccaccggatcctgcagtacgccctgccgagacaggagtcccagcggccattcttttggattttcatggacaacttgctgctgaccgaggatgaccaggaaactaccactcggttcctgcagaccgaagccgtgaccctgcaggacgtgagaggccgggactaccagaacgccatgcgggtgtggtccaacatccctggactgaaaagcaagcacgcacctctgacccctaaagaagaggagtacctgcaggcccaggtgcggagcagaagcaagctggacgcccctaaggtggatctgctggtgaagaattgcctcctgcccctgagagagtacttcaagtatttcagccagaatagtctgcccctgggaggcagcggcggcggcttccagggcagcgtgaccttcagggacgtggccatcgacttcagccaggaggagtgggcctggctgcagcccgcccagagggacctgtacaggcacgtgatgctggagaactacggccacctggtgagcctgggcctgaacatcagcaagcccgacgtggtgagcctgctggagcagggcaaggagccctggctgggcaagggcgacgtgaggaccgacttcttccccgtgagcgagagcaacggcggcccaagcagcggcgcccctcctcccagcggcggcagcccagccggctccccaacctctaccgaggagggcacctctgagtccgccacccccgagagcggccctggcacctccaccgagcccagcgagggcagcgcacccggcagccctgccggcagccccacctccacagaggagggaaccagcaccgagcccagcgaaggcagcgccccaggcaccagcaccgagcctagtgagcaggagattaaacggatcaacaagatcagaagaagacttgtgaaagacagcaacaccaagaaggccggcaagacaggccccatgaaaaccctgctggttagagtgatgacacccgatctgagagagcggctggaaaacctgagaaagaagcctgaaaatatcccccagcccatcagcaatacatctagagccaacctgaataagctgctgaccgattacaccgaaatgaagaaggcgatcctgcatgtgtactgggaagagttccagaaggaccctgtgggcctgatgagccgggtggcccagcctgccagcaagaagatcgatcagaacaagctgaaacctgagatggacgagaagggcaacctgaccaccgccggctttgcctgctctcagtgtggccagcccctgttcgtgtacaagctggagcaggtgtctgagaagggcaaggcttacaccaactacttcggacggtgcaatgtggccgagcacgaaaagctgatcctgctggcccagctgaagcccgagaaggatagcgacgaagccgtgacatatagcctgggaaagtttgggcagagggccctggatttctacagcattcatgtgaccaaggagtccacccaccccgtgaagcccctggcccagatcgccggaaacagatacgcctccggacctgtgggaaaggccctgagcgacgcatgtatgggcacaatcgcctccttcctgtctaagtaccaggacatcatcatcgaacaccagaaggtggtgaagggcaaccagaagagactggagagcctgcgggagctggccggcaaggaaaacctggaataccctagcgtgaccctgccacctcagcctcacaccaaggagggcgttgatgcctacaacgaagtgatcgcccgggtgcgaatgtgggtgaacctgaacctgtggcagaagctgaagctaagcagagatgatgccaagcctctgctgagactgaagggattcccttcctttcctctggtcgagagacaggccaacgaagtggactggtgggacatggtgtgtaacgtgaagaagctgatcaacgagaaaaaggaggatggcaaggtgttttggcagaatctggctggctacaagagacaggaagccctgagaccatacctgagcagcgaggaagatcggaagaagggaaagaaattcgctcggtaccagctgggcgacctgctgctgcacctggaaaagaagcacggcgaggactggggaaaggtgtacgacgaggcctgggagcggattgacaagaaagtggaaggcctgagcaagcacatcaagctggaagaggaacggagaagcgaggacgcccagagcaaggccgccctgaccgactggctgcgggctaaggccagcttcgtgatcgagggcctgaaggaggccgacaaggacgagttctgcagatgcgagctgaagctgcagaagtggtacggggacctgcggggaaagcccttcgccatcgaagccgagaacagcatcctggacatcagcggcttcagcaagcagtacaactgtgccttcatctggcagaaggacggcgtgaagaagctgaacctgtacctgatcatcaactacttcaagggcggcaagctgcggttcaagaagatcaaacctgaagccttcgaagccaacagattctacaccgtgatcaacaaaaagagcggcgagatcgtgcccatggaggtgaacttcaacttcgacgaccccaacctgatcatcctgcctctggcctttggcaagagacagggcagagaattcatctggaacgacctgctgtccctggaaaccggcagcctgaagctggccaacggaagagtgatcgagaagacactgtacaacagaagaacccggcaggatgagcctgccctgttcgtggccctgaccttcgagcggcgggaggtcctggactcctccaatatcaaaccaatgaacctgatcggcgtggcaagaggcgaaaacatccccgccgtgatcgccctgaccgaccccgagggctgcccactgagccggtttaaggatagcctgggaaacccaacccacatcctgagaatcggcgagagctataaggagaagcagcggaccatccaggccaagaaggaggtggagcagcggagagccggcggctacagccggaagtacgccagcaaagccaagaatctggcagacgatatggtgagaaacaccgctagagatctgctgtactacgccgtgacccaggatgccatgctgatcttcgccaacctgagccggggcttcggccggcagggcaagcggaccttcatggccgagagacagtacacacggatggaggactggctgaccgccaagctggcctacgagggcctgagcaagacctacctgtccaagacactggcccagtacacctccaagacatgcagcaactgtgggtttaccatcaccagcgccgactacgacagggtgctggagaagctgaagaagacagcaacaggctggatgaccacaattaacggcaaggagctgaaggtggagggccagattacctactacaacagatacaagagacagaacgtagtcaaggacctgtccgtcgagctggatagactgagcgaagaatctgtgaacaacgacatctcctcctggacaaagggcagaagcggagaagctctgagcctcctgaagaaaagattctcccatagacccgtgcaggagaagttcgtgtgcctgaactgcggcttcgagacacacgcagccgagcaagccgccctgaacatcgccagatcctggctgttcctgcggagccaggagtacaagaaataccagacaaacaagacaaccggcaacaccgataagagagccttcgtcgagacctggcagtccttttaccggaagaagcttaaggaggtgtggaaacctgccgtgcggtctggcggatctggcggaggctccaccagccccaagaaaaagagaaaagtctaagctgccttctgcggggcttgccttctggccatgcccttcttctctcccttgcacctgtacctcttggtctttgaataaagcctgagtaggaaggctagcaaaaaaaaaaaaaaaaaaaaaaaaaaaaaaaaaaaaaaaaaaaaaaaaaaaaaaaaaaaaaaaaaaaaaaaaaaaaaaaa

SEQ ID NO: 12259 - RNA, 5785 nt, synthetic construct
  source 1..5785: mol_type = other RNA
aggaaataagagagaaaagaagagtaagaagaaatataagagccaccatggcccctaagaagaagcgtaaagtgagccggatggaacgcctcgtctacgaggtgcggcagaagtgcagaaacatcgaggacatctgcatctcctgcggatctctgaacgtgaccctggagcacccactgttcatcggcggcatgtgccagaactgtaaaaactgttttctggagtgtgcctatcaatacgacgatgacggctaccagagctactgcaccatctgttgcggcggaagagaggtgctgatgtgtggaaataacaactgctgccggtgcttctgcgtggaatgcgtggacctgctggtgggccccggcgccgcccaggccgctattaaggaagatccttggaactgctacatgtgcggccacaagggcacatacggcctgctgagacggagagaggactggcctagcagactgcagatgttcttcgccaataaccacgaccaggagttcgacccccctaaggtgtaccctcccgtccccgccgagaagagaaagcccatccgggtcctgagcctgttcgatggcatcgccaccggtctgctggtgctgaaggacctgggcatccaggtggataggtacattgcctccgaggtgtgcgaggactccatcaccgtgggaatggtgcgtcatcagggcaagatcatgtacgtgggcgacgtgcggagcgtgacacagaagcatatccaggagtggggccctttcgacctggtgatcggcggcagcccttgcaatgacctgagcatcgtgaacccagcccggaagggcctgtacgagggaaccggcagactgttcttcgagttttacagactgctgcacgacgcccggcctaaggaaggcgacgaccggcccttcttttggctgttcgagaatgtggtggccatgggagtcagcgacaagcgggatattagccggttcctggagagcaaccccgtgatgatcgatgccaaggaagtgagcgccgcccaccgggccagatacttctggggcaatctgcctggcatgaacagacccctggccagcaccgtgaacgacaagctggagctgcaggagtgcctggagcacggccggatcgccaagttcagcaaggtgagaaccatcaccacccgaagcaacagcatcaaacaaggcaaggaccagcactttcctgtgttcatgaacgagaaggaggacatcctgtggtgtaccgagatggagagagtgttcgggttcccagtccactacacagatgtcagcaacatgtctagactggccagacagagactgctgggaagaagctggtccgtccctgtgatcagacacctgttcgcccctctgaaggagtacttcgcctgcgtgagcagcggcaacagcaacgccaacagccggggccccagcttctctagcggcctggtgccactgtccctgagagggagccacatgggccccatggagatctacaaaaccgtgagcgcctggaagcggcagcctgtgcgcgtgctgagcctgtttcggaatatcgataaagtcctgaaaagcctgggattcctggagagcggctctggctccggcggtggcaccctgaagtacgtggaggatgtgacaaacgtggtcagacgggatgtggagaagtggggccccttcgatctggtgtacggcagcacccaacccctgggcagctcttgtgaccggtgccctggctggtacatgtttcagttccaccggatcctgcagtacgccctgccgagacaggagtcccagcggccattcttttggattttcatggacaacttgctgctgaccgaggatgaccaggaaactaccactcggttcctgcagaccgaagccgtgaccctgcaggacgtgagaggccgggactaccagaacgccatgcgggtgtggtccaacatccctggactgaaaagcaagcacgcacctctgacccctaaagaagaggagtacctgcaggcccaggtgcggagcagaagcaagctggacgcccctaaggtggatctgctggtgaagaattgcctcctgcccctgagagagtacttcaagtatttcagccagaatagtctgcccctgggaggcagcggcggcggcgagcaggagagcgtgagcttcaaggacgtgaccatcgacttcagcagggaggagtggcagcagctggacttcgcccagaagagcctgtacagggacgtgatgctggagaactacttcaacctgatcagcgtgggctgccaggtgcccaagcccgaggtgatcttcaacctggagcaggtggagaacagctgcatgctgcacaggaagatcagcaggcagagctgcctggacggcgacatcggcggcggcccaagcagcggcgcccctcctcccagcggcggcagcccagccggctccccaacctctaccgaggagggcacctctgagtccgccacccccgagagcggccctggcacctccaccgagcccagcgagggcagcgcacccggcagccctgccggcagccccacctccacagaggagggaaccagcaccgagcccagcgaaggcagcgccccaggcaccagcaccgagcctagtgagcaggagattaaacggatcaacaagatcagaagaagacttgtgaaagacagcaacaccaagaaggccggcaagacaggccccatgaaaaccctgctggttagagtgatgacacccgatctgagagagcggctggaaaacctgagaaagaagcctgaaaatatcccccagcccatcagcaatacatctagagccaacctgaataagctgctgaccgattacaccgaaatgaagaaggcgatcctgcatgtgtactgggaagagttccagaaggaccctgtgggcctgatgagccgggtggcccagcctgccagcaagaagatcgatcagaacaagctgaaacctgagatggacgagaagggcaacctgaccaccgccggctttgcctgctctcagtgtggccagcccctgttcgtgtacaagctggagcaggtgtctgagaagggcaaggcttacaccaactacttcggacggtgcaatgtggccgagcacgaaaagctgatcctgctggcccagctgaagcccgagaaggatagcgacgaagccgtgacatatagcctgggaaagtttgggcagagggccctggatttctacagcattcatgtgaccaaggagtccacccaccccgtgaagcccctggcccagatcgccggaaacagatacgcctccggacctgtgggaaaggccctgagcgacgcatgtatgggcacaatcgcctccttcctgtctaagtaccaggacatcatcatcgaacaccagaaggtggtgaagggcaaccagaagagactggagagcctgcgggagctggccggcaaggaaaacctggaataccctagcgtgaccctgccacctcagcctcacaccaaggagggcgttgatgcctacaacgaagtgatcgcccgggtgcgaatgtgggtgaacctgaacctgtggcagaagctgaagctaagcagagatgatgccaagcctctgctgagactgaagggattcccttcctttcctctggtcgagagacaggccaacgaagtggactggtgggacatggtgtgtaacgtgaagaagctgatcaacgagaaaaaggaggatggcaaggtgttttggcagaatctggctggctacaagagacaggaagccctgagaccatacctgagcagcgaggaagatcggaagaagggaaagaaattcgctcggtaccagctgggcgacctgctgctgcacctggaaaagaagcacggcgaggactggggaaaggtgtacgacgaggcctgggagcggattgacaagaaagtggaaggcctgagcaagcacatcaagctggaagaggaacggagaagcgaggacgcccagagcaaggccgccctgaccgactggctgcgggctaaggccagcttcgtgatcgagggcctgaaggaggccgacaaggacgagttctgcagatgcgagctgaagctgcagaagtggtacggggacctgcggggaaagcccttcgccatcgaagccgagaacagcatcctggacatcagcggcttcagcaagcagtacaactgtgccttcatctggcagaaggacggcgtgaagaagctgaacctgtacctgatcatcaactacttcaagggcggcaagctgcggttcaagaagatcaaacctgaagccttcgaagccaacagattctacaccgtgatcaacaaaaagagcggcgagatcgtgcccatggaggtgaacttcaacttcgacgaccccaacctgatcatcctgcctctggcctttggcaagagacagggcagagaattcatctggaacgacctgctgtccctggaaaccggcagcctgaagctggccaacggaagagtgatcgagaagacactgtacaacagaagaacccggcaggatgagcctgccctgttcgtggccctgaccttcgagcggcgggaggtcctggactcctccaatatcaaaccaatgaacctgatcggcgtggcaagaggcgaaaacatccccgccgtgatcgccctgaccgaccccgagggctgcccactgagccggtttaaggatagcctgggaaacccaacccacatcctgagaatcggcgagagctataaggagaagcagcggaccatccaggccaagaaggaggtggagcagcggagagccggcggctacagccggaagtacgccagcaaagccaagaatctggcagacgatatggtgagaaacaccgctagagatctgctgtactacgccgtgacccaggatgccatgctgatcttcgccaacctgagccggggcttcggccggcagggcaagcggaccttcatggccgagagacagtacacacggatggaggactggctgaccgccaagctggcctacgagggcctgagcaagacctacctgtccaagacactggcccagtacacctccaagacatgcagcaactgtgggtttaccatcaccagcgccgactacgacagggtgctggagaagctgaagaagacagcaacaggctggatgaccacaattaacggcaaggagctgaaggtggagggccagattacctactacaacagatacaagagacagaacgtagtcaaggacctgtccgtcgagctggatagactgagcgaagaatctgtgaacaacgacatctcctcctggacaaagggcagaagcggagaagctctgagcctcctgaagaaaagattctcccatagacccgtgcaggagaagttcgtgtgcctgaactgcggcttcgagacacacgcagccgagcaagccgccctgaacatcgccagatcctggctgttcctgcggagccaggagtacaagaaataccagacaaacaagacaaccggcaacaccgataagagagccttcgtcgagacctggcagtccttttaccggaagaagcttaaggaggtgtggaaacctgccgtgcggtctggcggatctggcggaggctccaccagccccaagaaaaagagaaaagtctaagctgccttctgcggggcttgccttctggccatgcccttcttctctcccttgcacctgtacctcttggtctttgaataaagcctgagtaggaaggctagcaaaaaaaaaaaaaaaaaaaaaaaaaaaaaaaaaaaaaaaaaaaaaaaaaaaaaaaaaaaaaaaaaaaaaaaaaaaaaaaa

SEQ ID NO: 12260 - RNA, 5785 nt, synthetic construct
  source 1..5785: mol_type = other RNA
aggaaataagagagaaaagaagagtaagaagaaatataagagccaccatggcccctaagaagaagcgtaaagtgagccggatggaacgcctcgtctacgaggtgcggcagaagtgcagaaacatcgaggacatctgcatctcctgcggatctctgaacgtgaccctggagcacccactgttcatcggcggcatgtgccagaactgtaaaaactgttttctggagtgtgcctatcaatacgacgatgacggctaccagagctactgcaccatctgttgcggcggaagagaggtgctgatgtgtggaaataacaactgctgccggtgcttctgcgtggaatgcgtggacctgctggtgggccccggcgccgcccaggccgctattaaggaagatccttggaactgctacatgtgcggccacaagggcacatacggcctgctgagacggagagaggactggcctagcagactgcagatgttcttcgccaataaccacgaccaggagttcgacccccctaaggtgtaccctcccgtccccgccgagaagagaaagcccatccgggtcctgagcctgttcgatggcatcgccaccggtctgctggtgctgaaggacctgggcatccaggtggataggtacattgcctccgaggtgtgcgaggactccatcaccgtgggaatggtgcgtcatcagggcaagatcatgtacgtgggcgacgtgcggagcgtgacacagaagcatatccaggagtggggccctttcgacctggtgatcggcggcagcccttgcaatgacctgagcatcgtgaacccagcccggaagggcctgtacgagggaaccggcagactgttcttcgagttttacagactgctgcacgacgcccggcctaaggaaggcgacgaccggcccttcttttggctgttcgagaatgtggtggccatgggagtcagcgacaagcgggatattagccggttcctggagagcaaccccgtgatgatcgatgccaaggaagtgagcgccgcccaccgggccagatacttctggggcaatctgcctggcatgaacagacccctggccagcaccgtgaacgacaagctggagctgcaggagtgcctggagcacggccggatcgccaagttcagcaaggtgagaaccatcaccacccgaagcaacagcatcaaacaaggcaaggaccagcactttcctgtgttcatgaacgagaaggaggacatcctgtggtgtaccgagatggagagagtgttcgggttcccagtccactacacagatgtcagcaacatgtctagactggccagacagagactgctgggaagaagctggtccgtccctgtgatcagacacctgttcgcccctctgaaggagtacttcgcctgcgtgagcagcggcaacagcaacgccaacagccggggccccagcttctctagcggcctggtgccactgtccctgagagggagccacatgggccccatggagatctacaaaaccgtgagcgcctggaagcggcagcctgtgcgcgtgctgagcctgtttcggaatatcgataaagtcctgaaaagcctgggattcctggagagcggctctggctccggcggtggcaccctgaagtacgtggaggatgtgacaaacgtggtcagacgggatgtggagaagtggggccccttcgatctggtgtacggcagcacccaacccctgggcagctcttgtgaccggtgccctggctggtacatgtttcagttccaccggatcctgcagtacgccctgccgagacaggagtcccagcggccattcttttggattttcatggacaacttgctgctgaccgaggatgaccaggaaactaccactcggttcctgcagaccgaagccgtgaccctgcaggacgtgagaggccgggactaccagaacgccatgcgggtgtggtccaacatccctggactgaaaagcaagcacgcacctctgacccctaaagaagaggagtacctgcaggcccaggtgcggagcagaagcaagctggacgcccctaaggtggatctgctggtgaagaattgcctcctgcccctgagagagtacttcaagtatttcagccagaatagtctgcccctgggaggcagcggcggcggcatggccgccggccagcccgaggccaggccccaggtgagcctgaccttcgaggacgtggccgtgctgttcaccagggacgagtggaggaagctggcccccagccagaggaacctgtacagggacgtgatgctggagaactacaggaacctggtgagcctgggcctgcccttcaccaagcccaaggtgatcagcctgctgcagcagggcgaggacccctggaaggtggagaaggactgcttcggcggcggcccaagcagcggcgcccctcctcccagcggcggcagcccagccggctccccaacctctaccgaggagggcacctctgagtccgccacccccgagagcggccctggcacctccaccgagcccagcgagggcagcgcacccggcagccctgccggcagccccacctccacagaggagggaaccagcaccgagcccagcgaaggcagcgccccaggcaccagcaccgagcctagtgagcaggagattaaacggatcaacaagatcagaagaagacttgtgaaagacagcaacaccaagaaggccggcaagacaggccccatgaaaaccctgctggttagagtgatgacacccgatctgagagagcggctggaaaacctgagaaagaagcctgaaaatatcccccagcccatcagcaatacatctagagccaacctgaataagctgctgaccgattacaccgaaatgaagaaggcgatcctgcatgtgtactgggaagagttccagaaggaccctgtgggcctgatgagccgggtggcccagcctgccagcaagaagatcgatcagaacaagctgaaacctgagatggacgagaagggcaacctgaccaccgccggctttgcctgctctcagtgtggccagcccctgttcgtgtacaagctggagcaggtgtctgagaagggcaaggcttacaccaactacttcggacggtgcaatgtggccgagcacgaaaagctgatcctgctggcccagctgaagcccgagaaggatagcgacgaagccgtgacatatagcctgggaaagtttgggcagagggccctggatttctacagcattcatgtgaccaaggagtccacccaccccgtgaagcccctggcccagatcgccggaaacagatacgcctccggacctgtgggaaaggccctgagcgacgcatgtatgggcacaatcgcctccttcctgtctaagtaccaggacatcatcatcgaacaccagaaggtggtgaagggcaaccagaagagactggagagcctgcgggagctggccggcaaggaaaacctggaataccctagcgtgaccctgccacctcagcctcacaccaaggagggcgttgatgcctacaacgaagtgatcgcccgggtgcgaatgtgggtgaacctgaacctgtggcagaagctgaagctaagcagagatgatgccaagcctctgctgagactgaagggattcccttcctttcctctggtcgagagacaggccaacgaagtggactggtgggacatggtgtgtaacgtgaagaagctgatcaacgagaaaaaggaggatggcaaggtgttttggcagaatctggctggctacaagagacaggaagccctgagaccatacctgagcagcgaggaagatcggaagaagggaaagaaattcgctcggtaccagctgggcgacctgctgctgcacctggaaaagaagcacggcgaggactggggaaaggtgtacgacgaggcctgggagcggattgacaagaaagtggaaggcctgagcaagcacatcaagctggaagaggaacggagaagcgaggacgcccagagcaaggccgccctgaccgactggctgcgggctaaggccagcttcgtgatcgagggcctgaaggaggccgacaaggacgagttctgcagatgcgagctgaagctgcagaagtggtacggggacctgcggggaaagcccttcgccatcgaagccgagaacagcatcctggacatcagcggcttcagcaagcagtacaactgtgccttcatctggcagaaggacggcgtgaagaagctgaacctgtacctgatcatcaactacttcaagggcggcaagctgcggttcaagaagatcaaacctgaagccttcgaagccaacagattctacaccgtgatcaacaaaaagagcggcgagatcgtgcccatggaggtgaacttcaacttcgacgaccccaacctgatcatcctgcctctggcctttggcaagagacagggcagagaattcatctggaacgacctgctgtccctggaaaccggcagcctgaagctggccaacggaagagtgatcgagaagacactgtacaacagaagaacccggcaggatgagcctgccctgttcgtggccctgaccttcgagcggcgggaggtcctggactcctccaatatcaaaccaatgaacctgatcggcgtggcaagaggcgaaaacatccccgccgtgatcgccctgaccgaccccgagggctgcccactgagccggtttaaggatagcctgggaaacccaacccacatcctgagaatcggcgagagctataaggagaagcagcggaccatccaggccaagaaggaggtggagcagcggagagccggcggctacagccggaagtacgccagcaaagccaagaatctggcagacgatatggtgagaaacaccgctagagatctgctgtactacgccgtgacccaggatgccatgctgatcttcgccaacctgagccggggcttcggccggcagggcaagcggaccttcatggccgagagacagtacacacggatggaggactggctgaccgccaagctggcctacgagggcctgagcaagacctacctgtccaagacactggcccagtacacctccaagacatgcagcaactgtgggtttaccatcaccagcgccgactacgacagggtgctggagaagctgaagaagacagcaacaggctggatgaccacaattaacggcaaggagctgaaggtggagggccagattacctactacaacagatacaagagacagaacgtagtcaaggacctgtccgtcgagctggatagactgagcgaagaatctgtgaacaacgacatctcctcctggacaaagggcagaagcggagaagctctgagcctcctgaagaaaagattctcccatagacccgtgcaggagaagttcgtgtgcctgaactgcggcttcgagacacacgcagccgagcaagccgccctgaacatcgccagatcctggctgttcctgcggagccaggagtacaagaaataccagacaaacaagacaaccggcaacaccgataagagagccttcgtcgagacctggcagtccttttaccggaagaagcttaaggaggtgtggaaacctgccgtgcggtctggcggatctggcggaggctccaccagccccaagaaaaagagaaaagtctaagctgccttctgcggggcttgccttctggccatgcccttcttctctcccttgcacctgtacctcttggtctttgaataaagcctgagtaggaaggctagcaaaaaaaaaaaaaaaaaaaaaaaaaaaaaaaaaaaaaaaaaaaaaaaaaaaaaaaaaaaaaaaaaaaaaaaaaaaaaaaa

SEQ ID NO: 12261 - RNA, 5785 nt, synthetic construct
  source 1..5785: mol_type = other RNA
aggaaataagagagaaaagaagagtaagaagaaatataagagccaccatggcccctaagaagaagcgtaaagtgagccggatggaacgcctcgtctacgaggtgcggcagaagtgcagaaacatcgaggacatctgcatctcctgcggatctctgaacgtgaccctggagcacccactgttcatcggcggcatgtgccagaactgtaaaaactgttttctggagtgtgcctatcaatacgacgatgacggctaccagagctactgcaccatctgttgcggcggaagagaggtgctgatgtgtggaaataacaactgctgccggtgcttctgcgtggaatgcgtggacctgctggtgggccccggcgccgcccaggccgctattaaggaagatccttggaactgctacatgtgcggccacaagggcacatacggcctgctgagacggagagaggactggcctagcagactgcagatgttcttcgccaataaccacgaccaggagttcgacccccctaaggtgtaccctcccgtccccgccgagaagagaaagcccatccgggtcctgagcctgttcgatggcatcgccaccggtctgctggtgctgaaggacctgggcatccaggtggataggtacattgcctccgaggtgtgcgaggactccatcaccgtgggaatggtgcgtcatcagggcaagatcatgtacgtgggcgacgtgcggagcgtgacacagaagcatatccaggagtggggccctttcgacctggtgatcggcggcagcccttgcaatgacctgagcatcgtgaacccagcccggaagggcctgtacgagggaaccggcagactgttcttcgagttttacagactgctgcacgacgcccggcctaaggaaggcgacgaccggcccttcttttggctgttcgagaatgtggtggccatgggagtcagcgacaagcgggatattagccggttcctggagagcaaccccgtgatgatcgatgccaaggaagtgagcgccgcccaccgggccagatacttctggggcaatctgcctggcatgaacagacccctggccagcaccgtgaacgacaagctggagctgcaggagtgcctggagcacggccggatcgccaagttcagcaaggtgagaaccatcaccacccgaagcaacagcatcaaacaaggcaaggaccagcactttcctgtgttcatgaacgagaaggaggacatcctgtggtgtaccgagatggagagagtgttcgggttcccagtccactacacagatgtcagcaacatgtctagactggccagacagagactgctgggaagaagctggtccgtccctgtgatcagacacctgttcgcccctctgaaggagtacttcgcctgcgtgagcagcggcaacagcaacgccaacagccggggccccagcttctctagcggcctggtgccactgtccctgagagggagccacatgggccccatggagatctacaaaaccgtgagcgcctggaagcggcagcctgtgcgcgtgctgagcctgtttcggaatatcgataaagtcctgaaaagcctgggattcctggagagcggctctggctccggcggtggcaccctgaagtacgtggaggatgtgacaaacgtggtcagacgggatgtggagaagtggggccccttcgatctggtgtacggcagcacccaacccctgggcagctcttgtgaccggtgccctggctggtacatgtttcagttccaccggatcctgcagtacgccctgccgagacaggagtcccagcggccattcttttggattttcatggacaacttgctgctgaccgaggatgaccaggaaactaccactcggttcctgcagaccgaagccgtgaccctgcaggacgtgagaggccgggactaccagaacgccatgcgggtgtggtccaacatccctggactgaaaagcaagcacgcacctctgacccctaaagaagaggagtacctgcaggcccaggtgcggagcagaagcaagctggacgcccctaaggtggatctgctggtgaagaattgcctcctgcccctgagagagtacttcaagtatttcagccagaatagtctgcccctgggaggcagcggcggcggccagatgcccgtgaagttcgaggacatcgccgtgagcttcagccaggaggagtgggagtacctgaacgaggagcagaaggagctgtacagggaggtgatggaggagaactaccagaccctgatcagcctgggcaccggcagcccccccatcacccccgacatcatcagccacatcgagaggggcgaggagccctacatcagggaggagcccggcagcgaggagaggggccccgtgaggagcagcggcggcccaagcagcggcgcccctcctcccagcggcggcagcccagccggctccccaacctctaccgaggagggcacctctgagtccgccacccccgagagcggccctggcacctccaccgagcccagcgagggcagcgcacccggcagccctgccggcagccccacctccacagaggagggaaccagcaccgagcccagcgaaggcagcgccccaggcaccagcaccgagcctagtgagcaggagattaaacggatcaacaagatcagaagaagacttgtgaaagacagcaacaccaagaaggccggcaagacaggccccatgaaaaccctgctggttagagtgatgacacccgatctgagagagcggctggaaaacctgagaaagaagcctgaaaatatcccccagcccatcagcaatacatctagagccaacctgaataagctgctgaccgattacaccgaaatgaagaaggcgatcctgcatgtgtactgggaagagttccagaaggaccctgtgggcctgatgagccgggtggcccagcctgccagcaagaagatcgatcagaacaagctgaaacctgagatggacgagaagggcaacctgaccaccgccggctttgcctgctctcagtgtggccagcccctgttcgtgtacaagctggagcaggtgtctgagaagggcaaggcttacaccaactacttcggacggtgcaatgtggccgagcacgaaaagctgatcctgctggcccagctgaagcccgagaaggatagcgacgaagccgtgacatatagcctgggaaagtttgggcagagggccctggatttctacagcattcatgtgaccaaggagtccacccaccccgtgaagcccctggcccagatcgccggaaacagatacgcctccggacctgtgggaaaggccctgagcgacgcatgtatgggcacaatcgcctccttcctgtctaagtaccaggacatcatcatcgaacaccagaaggtggtgaagggcaaccagaagagactggagagcctgcgggagctggccggcaaggaaaacctggaataccctagcgtgaccctgccacctcagcctcacaccaaggagggcgttgatgcctacaacgaagtgatcgcccgggtgcgaatgtgggtgaacctgaacctgtggcagaagctgaagctaagcagagatgatgccaagcctctgctgagactgaagggattcccttcctttcctctggtcgagagacaggccaacgaagtggactggtgggacatggtgtgtaacgtgaagaagctgatcaacgagaaaaaggaggatggcaaggtgttttggcagaatctggctggctacaagagacaggaagccctgagaccatacctgagcagcgaggaagatcggaagaagggaaagaaattcgctcggtaccagctgggcgacctgctgctgcacctggaaaagaagcacggcgaggactggggaaaggtgtacgacgaggcctgggagcggattgacaagaaagtggaaggcctgagcaagcacatcaagctggaagaggaacggagaagcgaggacgcccagagcaaggccgccctgaccgactggctgcgggctaaggccagcttcgtgatcgagggcctgaaggaggccgacaaggacgagttctgcagatgcgagctgaagctgcagaagtggtacggggacctgcggggaaagcccttcgccatcgaagccgagaacagcatcctggacatcagcggcttcagcaagcagtacaactgtgccttcatctggcagaaggacggcgtgaagaagctgaacctgtacctgatcatcaactacttcaagggcggcaagctgcggttcaagaagatcaaacctgaagccttcgaagccaacagattctacaccgtgatcaacaaaaagagcggcgagatcgtgcccatggaggtgaacttcaacttcgacgaccccaacctgatcatcctgcctctggcctttggcaagagacagggcagagaattcatctggaacgacctgctgtccctggaaaccggcagcctgaagctggccaacggaagagtgatcgagaagacactgtacaacagaagaacccggcaggatgagcctgccctgttcgtggccctgaccttcgagcggcgggaggtcctggactcctccaatatcaaaccaatgaacctgatcggcgtggcaagaggcgaaaacatccccgccgtgatcgccctgaccgaccccgagggctgcccactgagccggtttaaggatagcctgggaaacccaacccacatcctgagaatcggcgagagctataaggagaagcagcggaccatccaggccaagaaggaggtggagcagcggagagccggcggctacagccggaagtacgccagcaaagccaagaatctggcagacgatatggtgagaaacaccgctagagatctgctgtactacgccgtgacccaggatgccatgctgatcttcgccaacctgagccggggcttcggccggcagggcaagcggaccttcatggccgagagacagtacacacggatggaggactggctgaccgccaagctggcctacgagggcctgagcaagacctacctgtccaagacactggcccagtacacctccaagacatgcagcaactgtgggtttaccatcaccagcgccgactacgacagggtgctggagaagctgaagaagacagcaacaggctggatgaccacaattaacggcaaggagctgaaggtggagggccagattacctactacaacagatacaagagacagaacgtagtcaaggacctgtccgtcgagctggatagactgagcgaagaatctgtgaacaacgacatctcctcctggacaaagggcagaagcggagaagctctgagcctcctgaagaaaagattctcccatagacccgtgcaggagaagttcgtgtgcctgaactgcggcttcgagacacacgcagccgagcaagccgccctgaacatcgccagatcctggctgttcctgcggagccaggagtacaagaaataccagacaaacaagacaaccggcaacaccgataagagagccttcgtcgagacctggcagtccttttaccggaagaagcttaaggaggtgtggaaacctgccgtgcggtctggcggatctggcggaggctccaccagccccaagaaaaagagaaaagtctaagctgccttctgcggggcttgccttctggccatgcccttcttctctcccttgcacctgtacctcttggtctttgaataaagcctgagtaggaaggctagcaaaaaaaaaaaaaaaaaaaaaaaaaaaaaaaaaaaaaaaaaaaaaaaaaaaaaaaaaaaaaaaaaaaaaaaaaaaaaaaa

SEQ ID NO: 12262 - RNA, 5785 nt, synthetic construct
  source 1..5785: mol_type = other RNA
aggaaataagagagaaaagaagagtaagaagaaatataagagccaccatggcccctaagaagaagcgtaaagtgagccggatggaacgcctcgtctacgaggtgcggcagaagtgcagaaacatcgaggacatctgcatctcctgcggatctctgaacgtgaccctggagcacccactgttcatcggcggcatgtgccagaactgtaaaaactgttttctggagtgtgcctatcaatacgacgatgacggctaccagagctactgcaccatctgttgcggcggaagagaggtgctgatgtgtggaaataacaactgctgccggtgcttctgcgtggaatgcgtggacctgctggtgggccccggcgccgcccaggccgctattaaggaagatccttggaactgctacatgtgcggccacaagggcacatacggcctgctgagacggagagaggactggcctagcagactgcagatgttcttcgccaataaccacgaccaggagttcgacccccctaaggtgtaccctcccgtccccgccgagaagagaaagcccatccgggtcctgagcctgttcgatggcatcgccaccggtctgctggtgctgaaggacctgggcatccaggtggataggtacattgcctccgaggtgtgcgaggactccatcaccgtgggaatggtgcgtcatcagggcaagatcatgtacgtgggcgacgtgcggagcgtgacacagaagcatatccaggagtggggccctttcgacctggtgatcggcggcagcccttgcaatgacctgagcatcgtgaacccagcccggaagggcctgtacgagggaaccggcagactgttcttcgagttttacagactgctgcacgacgcccggcctaaggaaggcgacgaccggcccttcttttggctgttcgagaatgtggtggccatgggagtcagcgacaagcgggatattagccggttcctggagagcaaccccgtgatgatcgatgccaaggaagtgagcgccgcccaccgggccagatacttctggggcaatctgcctggcatgaacagacccctggccagcaccgtgaacgacaagctggagctgcaggagtgcctggagcacggccggatcgccaagttcagcaaggtgagaaccatcaccacccgaagcaacagcatcaaacaaggcaaggaccagcactttcctgtgttcatgaacgagaaggaggacatcctgtggtgtaccgagatggagagagtgttcgggttcccagtccactacacagatgtcagcaacatgtctagactggccagacagagactgctgggaagaagctggtccgtccctgtgatcagacacctgttcgcccctctgaaggagtacttcgcctgcgtgagcagcggcaacagcaacgccaacagccggggccccagcttctctagcggcctggtgccactgtccctgagagggagccacatgggccccatggagatctacaaaaccgtgagcgcctggaagcggcagcctgtgcgcgtgctgagcctgtttcggaatatcgataaagtcctgaaaagcctgggattcctggagagcggctctggctccggcggtggcaccctgaagtacgtggaggatgtgacaaacgtggtcagacgggatgtggagaagtggggccccttcgatctggtgtacggcagcacccaacccctgggcagctcttgtgaccggtgccctggctggtacatgtttcagttccaccggatcctgcagtacgccctgccgagacaggagtcccagcggccattcttttggattttcatggacaacttgctgctgaccgaggatgaccaggaaactaccactcggttcctgcagaccgaagccgtgaccctgcaggacgtgagaggccgggactaccagaacgccatgcgggtgtggtccaacatccctggactgaaaagcaagcacgcacctctgacccctaaagaagaggagtacctgcaggcccaggtgcggagcagaagcaagctggacgcccctaaggtggatctgctggtgaagaattgcctcctgcccctgagagagtacttcaagtatttcagccagaatagtctgcccctgggaggcagcggcggcggcgccagcgcccaggtgaccttcgaggacatcgccgtgagcttctgccacgaggagtggaggtacctggacgagggccagaaggagctgtacaaggaggtgatgaaggagaactacgagaccctgatcagcctgggcttcctgtgcgagaagcccagcctgatcagcaagatcgagcaggaggaggacccctgcgtgagggaccagcagaacagcagggagaggaggaggaggctgaagaacttcggcggcccaagcagcggcgcccctcctcccagcggcggcagcccagccggctccccaacctctaccgaggagggcacctctgagtccgccacccccgagagcggccctggcacctccaccgagcccagcgagggcagcgcacccggcagccctgccggcagccccacctccacagaggagggaaccagcaccgagcccagcgaaggcagcgccccaggcaccagcaccgagcctagtgagcaggagattaaacggatcaacaagatcagaagaagacttgtgaaagacagcaacaccaagaaggccggcaagacaggccccatgaaaaccctgctggttagagtgatgacacccgatctgagagagcggctggaaaacctgagaaagaagcctgaaaatatcccccagcccatcagcaatacatctagagccaacctgaataagctgctgaccgattacaccgaaatgaagaaggcgatcctgcatgtgtactgggaagagttccagaaggaccctgtgggcctgatgagccgggtggcccagcctgccagcaagaagatcgatcagaacaagctgaaacctgagatggacgagaagggcaacctgaccaccgccggctttgcctgctctcagtgtggccagcccctgttcgtgtacaagctggagcaggtgtctgagaagggcaaggcttacaccaactacttcggacggtgcaatgtggccgagcacgaaaagctgatcctgctggcccagctgaagcccgagaaggatagcgacgaagccgtgacatatagcctgggaaagtttgggcagagggccctggatttctacagcattcatgtgaccaaggagtccacccaccccgtgaagcccctggcccagatcgccggaaacagatacgcctccggacctgtgggaaaggccctgagcgacgcatgtatgggcacaatcgcctccttcctgtctaagtaccaggacatcatcatcgaacaccagaaggtggtgaagggcaaccagaagagactggagagcctgcgggagctggccggcaaggaaaacctggaataccctagcgtgaccctgccacctcagcctcacaccaaggagggcgttgatgcctacaacgaagtgatcgcccgggtgcgaatgtgggtgaacctgaacctgtggcagaagctgaagctaagcagagatgatgccaagcctctgctgagactgaagggattcccttcctttcctctggtcgagagacaggccaacgaagtggactggtgggacatggtgtgtaacgtgaagaagctgatcaacgagaaaaaggaggatggcaaggtgttttggcagaatctggctggctacaagagacaggaagccctgagaccatacctgagcagcgaggaagatcggaagaagggaaagaaattcgctcggtaccagctgggcgacctgctgctgcacctggaaaagaagcacggcgaggactggggaaaggtgtacgacgaggcctgggagcggattgacaagaaagtggaaggcctgagcaagcacatcaagctggaagaggaacggagaagcgaggacgcccagagcaaggccgccctgaccgactggctgcgggctaaggccagcttcgtgatcgagggcctgaaggaggccgacaaggacgagttctgcagatgcgagctgaagctgcagaagtggtacggggacctgcggggaaagcccttcgccatcgaagccgagaacagcatcctggacatcagcggcttcagcaagcagtacaactgtgccttcatctggcagaaggacggcgtgaagaagctgaacctgtacctgatcatcaactacttcaagggcggcaagctgcggttcaagaagatcaaacctgaagccttcgaagccaacagattctacaccgtgatcaacaaaaagagcggcgagatcgtgcccatggaggtgaacttcaacttcgacgaccccaacctgatcatcctgcctctggcctttggcaagagacagggcagagaattcatctggaacgacctgctgtccctggaaaccggcagcctgaagctggccaacggaagagtgatcgagaagacactgtacaacagaagaacccggcaggatgagcctgccctgttcgtggccctgaccttcgagcggcgggaggtcctggactcctccaatatcaaaccaatgaacctgatcggcgtggcaagaggcgaaaacatccccgccgtgatcgccctgaccgaccccgagggctgcccactgagccggtttaaggatagcctgggaaacccaacccacatcctgagaatcggcgagagctataaggagaagcagcggaccatccaggccaagaaggaggtggagcagcggagagccggcggctacagccggaagtacgccagcaaagccaagaatctggcagacgatatggtgagaaacaccgctagagatctgctgtactacgccgtgacccaggatgccatgctgatcttcgccaacctgagccggggcttcggccggcagggcaagcggaccttcatggccgagagacagtacacacggatggaggactggctgaccgccaagctggcctacgagggcctgagcaagacctacctgtccaagacactggcccagtacacctccaagacatgcagcaactgtgggtttaccatcaccagcgccgactacgacagggtgctggagaagctgaagaagacagcaacaggctggatgaccacaattaacggcaaggagctgaaggtggagggccagattacctactacaacagatacaagagacagaacgtagtcaaggacctgtccgtcgagctggatagactgagcgaagaatctgtgaacaacgacatctcctcctggacaaagggcagaagcggagaagctctgagcctcctgaagaaaagattctcccatagacccgtgcaggagaagttcgtgtgcctgaactgcggcttcgagacacacgcagccgagcaagccgccctgaacatcgccagatcctggctgttcctgcggagccaggagtacaagaaataccagacaaacaagacaaccggcaacaccgataagagagccttcgtcgagacctggcagtccttttaccggaagaagcttaaggaggtgtggaaacctgccgtgcggtctggcggatctggcggaggctccaccagccccaagaaaaagagaaaagtctaagctgccttctgcggggcttgccttctggccatgcccttcttctctcccttgcacctgtacctcttggtctttgaataaagcctgagtaggaaggctagcaaaaaaaaaaaaaaaaaaaaaaaaaaaaaaaaaaaaaaaaaaaaaaaaaaaaaaaaaaaaaaaaaaaaaaaaaaaaaaaa

SEQ ID NO: 12263 - RNA, 5785 nt, synthetic construct
  source 1..5785: mol_type = other RNA
aggaaataagagagaaaagaagagtaagaagaaatataagagccaccatggcccctaagaagaagcgtaaagtgagccggatggaacgcctcgtctacgaggtgcggcagaagtgcagaaacatcgaggacatctgcatctcctgcggatctctgaacgtgaccctggagcacccactgttcatcggcggcatgtgccagaactgtaaaaactgttttctggagtgtgcctatcaatacgacgatgacggctaccagagctactgcaccatctgttgcggcggaagagaggtgctgatgtgtggaaataacaactgctgccggtgcttctgcgtggaatgcgtggacctgctggtgggccccggcgccgcccaggccgctattaaggaagatccttggaactgctacatgtgcggccacaagggcacatacggcctgctgagacggagagaggactggcctagcagactgcagatgttcttcgccaataaccacgaccaggagttcgacccccctaaggtgtaccctcccgtccccgccgagaagagaaagcccatccgggtcctgagcctgttcgatggcatcgccaccggtctgctggtgctgaaggacctgggcatccaggtggataggtacattgcctccgaggtgtgcgaggactccatcaccgtgggaatggtgcgtcatcagggcaagatcatgtacgtgggcgacgtgcggagcgtgacacagaagcatatccaggagtggggccctttcgacctggtgatcggcggcagcccttgcaatgacctgagcatcgtgaacccagcccggaagggcctgtacgagggaaccggcagactgttcttcgagttttacagactgctgcacgacgcccggcctaaggaaggcgacgaccggcccttcttttggctgttcgagaatgtggtggccatgggagtcagcgacaagcgggatattagccggttcctggagagcaaccccgtgatgatcgatgccaaggaagtgagcgccgcccaccgggccagatacttctggggcaatctgcctggcatgaacagacccctggccagcaccgtgaacgacaagctggagctgcaggagtgcctggagcacggccggatcgccaagttcagcaaggtgagaaccatcaccacccgaagcaacagcatcaaacaaggcaaggaccagcactttcctgtgttcatgaacgagaaggaggacatcctgtggtgtaccgagatggagagagtgttcgggttcccagtccactacacagatgtcagcaacatgtctagactggccagacagagactgctgggaagaagctggtccgtccctgtgatcagacacctgttcgcccctctgaaggagtacttcgcctgcgtgagcagcggcaacagcaacgccaacagccggggccccagcttctctagcggcctggtgccactgtccctgagagggagccacatgggccccatggagatctacaaaaccgtgagcgcctggaagcggcagcctgtgcgcgtgctgagcctgtttcggaatatcgataaagtcctgaaaagcctgggattcctggagagcggctctggctccggcggtggcaccctgaagtacgtggaggatgtgacaaacgtggtcagacgggatgtggagaagtggggccccttcgatctggtgtacggcagcacccaacccctgggcagctcttgtgaccggtgccctggctggtacatgtttcagttccaccggatcctgcagtacgccctgccgagacaggagtcccagcggccattcttttggattttcatggacaacttgctgctgaccgaggatgaccaggaaactaccactcggttcctgcagaccgaagccgtgaccctgcaggacgtgagaggccgggactaccagaacgccatgcgggtgtggtccaacatccctggactgaaaagcaagcacgcacctctgacccctaaagaagaggagtacctgcaggcccaggtgcggagcagaagcaagctggacgcccctaaggtggatctgctggtgaagaattgcctcctgcccctgagagagtacttcaagtatttcagccagaatagtctgcccctgggaggcagcggcggcggcagccagggcctggtgaccttcggcgacgtggccgtggacttcagccaggaggagtgggcctggctgagcaccacccagaggaccctgtacaggaaggtgaccctggagaactacaggaacctggccagcctgggcctgtgcgtgagcaagcccgccgtgatcagcctgctggagcagggcaaggagccctggatcgtgaagaggaagatgaccaggggcggctgccccgacctgaacgccgtgggcggcccaagcagcggcgcccctcctcccagcggcggcagcccagccggctccccaacctctaccgaggagggcacctctgagtccgccacccccgagagcggccctggcacctccaccgagcccagcgagggcagcgcacccggcagccctgccggcagccccacctccacagaggagggaaccagcaccgagcccagcgaaggcagcgccccaggcaccagcaccgagcctagtgagcaggagattaaacggatcaacaagatcagaagaagacttgtgaaagacagcaacaccaagaaggccggcaagacaggccccatgaaaaccctgctggttagagtgatgacacccgatctgagagagcggctggaaaacctgagaaagaagcctgaaaatatcccccagcccatcagcaatacatctagagccaacctgaataagctgctgaccgattacaccgaaatgaagaaggcgatcctgcatgtgtactgggaagagttccagaaggaccctgtgggcctgatgagccgggtggcccagcctgccagcaagaagatcgatcagaacaagctgaaacctgagatggacgagaagggcaacctgaccaccgccggctttgcctgctctcagtgtggccagcccctgttcgtgtacaagctggagcaggtgtctgagaagggcaaggcttacaccaactacttcggacggtgcaatgtggccgagcacgaaaagctgatcctgctggcccagctgaagcccgagaaggatagcgacgaagccgtgacatatagcctgggaaagtttgggcagagggccctggatttctacagcattcatgtgaccaaggagtccacccaccccgtgaagcccctggcccagatcgccggaaacagatacgcctccggacctgtgggaaaggccctgagcgacgcatgtatgggcacaatcgcctccttcctgtctaagtaccaggacatcatcatcgaacaccagaaggtggtgaagggcaaccagaagagactggagagcctgcgggagctggccggcaaggaaaacctggaataccctagcgtgaccctgccacctcagcctcacaccaaggagggcgttgatgcctacaacgaagtgatcgcccgggtgcgaatgtgggtgaacctgaacctgtggcagaagctgaagctaagcagagatgatgccaagcctctgctgagactgaagggattcccttcctttcctctggtcgagagacaggccaacgaagtggactggtgggacatggtgtgtaacgtgaagaagctgatcaacgagaaaaaggaggatggcaaggtgttttggcagaatctggctggctacaagagacaggaagccctgagaccatacctgagcagcgaggaagatcggaagaagggaaagaaattcgctcggtaccagctgggcgacctgctgctgcacctggaaaagaagcacggcgaggactggggaaaggtgtacgacgaggcctgggagcggattgacaagaaagtggaaggcctgagcaagcacatcaagctggaagaggaacggagaagcgaggacgcccagagcaaggccgccctgaccgactggctgcgggctaaggccagcttcgtgatcgagggcctgaaggaggccgacaaggacgagttctgcagatgcgagctgaagctgcagaagtggtacggggacctgcggggaaagcccttcgccatcgaagccgagaacagcatcctggacatcagcggcttcagcaagcagtacaactgtgccttcatctggcagaaggacggcgtgaagaagctgaacctgtacctgatcatcaactacttcaagggcggcaagctgcggttcaagaagatcaaacctgaagccttcgaagccaacagattctacaccgtgatcaacaaaaagagcggcgagatcgtgcccatggaggtgaacttcaacttcgacgaccccaacctgatcatcctgcctctggcctttggcaagagacagggcagagaattcatctggaacgacctgctgtccctggaaaccggcagcctgaagctggccaacggaagagtgatcgagaagacactgtacaacagaagaacccggcaggatgagcctgccctgttcgtggccctgaccttcgagcggcgggaggtcctggactcctccaatatcaaaccaatgaacctgatcggcgtggcaagaggcgaaaacatccccgccgtgatcgccctgaccgaccccgagggctgcccactgagccggtttaaggatagcctgggaaacccaacccacatcctgagaatcggcgagagctataaggagaagcagcggaccatccaggccaagaaggaggtggagcagcggagagccggcggctacagccggaagtacgccagcaaagccaagaatctggcagacgatatggtgagaaacaccgctagagatctgctgtactacgccgtgacccaggatgccatgctgatcttcgccaacctgagccggggcttcggccggcagggcaagcggaccttcatggccgagagacagtacacacggatggaggactggctgaccgccaagctggcctacgagggcctgagcaagacctacctgtccaagacactggcccagtacacctccaagacatgcagcaactgtgggtttaccatcaccagcgccgactacgacagggtgctggagaagctgaagaagacagcaacaggctggatgaccacaattaacggcaaggagctgaaggtggagggccagattacctactacaacagatacaagagacagaacgtagtcaaggacctgtccgtcgagctggatagactgagcgaagaatctgtgaacaacgacatctcctcctggacaaagggcagaagcggagaagctctgagcctcctgaagaaaagattctcccatagacccgtgcaggagaagttcgtgtgcctgaactgcggcttcgagacacacgcagccgagcaagccgccctgaacatcgccagatcctggctgttcctgcggagccaggagtacaagaaataccagacaaacaagacaaccggcaacaccgataagagagccttcgtcgagacctggcagtccttttaccggaagaagcttaaggaggtgtggaaacctgccgtgcggtctggcggatctggcggaggctccaccagccccaagaaaaagagaaaagtctaagctgccttctgcggggcttgccttctggccatgcccttcttctctcccttgcacctgtacctcttggtctttgaataaagcctgagtaggaaggctagcaaaaaaaaaaaaaaaaaaaaaaaaaaaaaaaaaaaaaaaaaaaaaaaaaaaaaaaaaaaaaaaaaaaaaaaaaaaaaaaa

SEQ ID NO: 12264 - RNA, 5785 nt, synthetic construct
  source 1..5785: mol_type = other RNA
aggaaataagagagaaaagaagagtaagaagaaatataagagccaccatggcccctaagaagaagcgtaaagtgagccggatggaacgcctcgtctacgaggtgcggcagaagtgcagaaacatcgaggacatctgcatctcctgcggatctctgaacgtgaccctggagcacccactgttcatcggcggcatgtgccagaactgtaaaaactgttttctggagtgtgcctatcaatacgacgatgacggctaccagagctactgcaccatctgttgcggcggaagagaggtgctgatgtgtggaaataacaactgctgccggtgcttctgcgtggaatgcgtggacctgctggtgggccccggcgccgcccaggccgctattaaggaagatccttggaactgctacatgtgcggccacaagggcacatacggcctgctgagacggagagaggactggcctagcagactgcagatgttcttcgccaataaccacgaccaggagttcgacccccctaaggtgtaccctcccgtccccgccgagaagagaaagcccatccgggtcctgagcctgttcgatggcatcgccaccggtctgctggtgctgaaggacctgggcatccaggtggataggtacattgcctccgaggtgtgcgaggactccatcaccgtgggaatggtgcgtcatcagggcaagatcatgtacgtgggcgacgtgcggagcgtgacacagaagcatatccaggagtggggccctttcgacctggtgatcggcggcagcccttgcaatgacctgagcatcgtgaacccagcccggaagggcctgtacgagggaaccggcagactgttcttcgagttttacagactgctgcacgacgcccggcctaaggaaggcgacgaccggcccttcttttggctgttcgagaatgtggtggccatgggagtcagcgacaagcgggatattagccggttcctggagagcaaccccgtgatgatcgatgccaaggaagtgagcgccgcccaccgggccagatacttctggggcaatctgcctggcatgaacagacccctggccagcaccgtgaacgacaagctggagctgcaggagtgcctggagcacggccggatcgccaagttcagcaaggtgagaaccatcaccacccgaagcaacagcatcaaacaaggcaaggaccagcactttcctgtgttcatgaacgagaaggaggacatcctgtggtgtaccgagatggagagagtgttcgggttcccagtccactacacagatgtcagcaacatgtctagactggccagacagagactgctgggaagaagctggtccgtccctgtgatcagacacctgttcgcccctctgaaggagtacttcgcctgcgtgagcagcggcaacagcaacgccaacagccggggccccagcttctctagcggcctggtgccactgtccctgagagggagccacatgggccccatggagatctacaaaaccgtgagcgcctggaagcggcagcctgtgcgcgtgctgagcctgtttcggaatatcgataaagtcctgaaaagcctgggattcctggagagcggctctggctccggcggtggcaccctgaagtacgtggaggatgtgacaaacgtggtcagacgggatgtggagaagtggggccccttcgatctggtgtacggcagcacccaacccctgggcagctcttgtgaccggtgccctggctggtacatgtttcagttccaccggatcctgcagtacgccctgccgagacaggagtcccagcggccattcttttggattttcatggacaacttgctgctgaccgaggatgaccaggaaactaccactcggttcctgcagaccgaagccgtgaccctgcaggacgtgagaggccgggactaccagaacgccatgcgggtgtggtccaacatccctggactgaaaagcaagcacgcacctctgacccctaaagaagaggagtacctgcaggcccaggtgcggagcagaagcaagctggacgcccctaaggtggatctgctggtgaagaattgcctcctgcccctgagagagtacttcaagtatttcagccagaatagtctgcccctgggaggcagcggcggcggcagcaaggtgcccgtgaccttcggcgacctggccatctacttcagccaggaggagtgggagtggctgagccccatccagaaggacctgtacgaggacgtgatgctggagaactaccagaacctggtgagcctgggcctgagcttcaggaggcccaacgtgatcaccctgctggagaagggcaaggccccctggatggtggagcccgccaggaagaggaggggcgtggacagcggcagcaagtgcggcggcccaagcagcggcgcccctcctcccagcggcggcagcccagccggctccccaacctctaccgaggagggcacctctgagtccgccacccccgagagcggccctggcacctccaccgagcccagcgagggcagcgcacccggcagccctgccggcagccccacctccacagaggagggaaccagcaccgagcccagcgaaggcagcgccccaggcaccagcaccgagcctagtgagcaggagattaaacggatcaacaagatcagaagaagacttgtgaaagacagcaacaccaagaaggccggcaagacaggccccatgaaaaccctgctggttagagtgatgacacccgatctgagagagcggctggaaaacctgagaaagaagcctgaaaatatcccccagcccatcagcaatacatctagagccaacctgaataagctgctgaccgattacaccgaaatgaagaaggcgatcctgcatgtgtactgggaagagttccagaaggaccctgtgggcctgatgagccgggtggcccagcctgccagcaagaagatcgatcagaacaagctgaaacctgagatggacgagaagggcaacctgaccaccgccggctttgcctgctctcagtgtggccagcccctgttcgtgtacaagctggagcaggtgtctgagaagggcaaggcttacaccaactacttcggacggtgcaatgtggccgagcacgaaaagctgatcctgctggcccagctgaagcccgagaaggatagcgacgaagccgtgacatatagcctgggaaagtttgggcagagggccctggatttctacagcattcatgtgaccaaggagtccacccaccccgtgaagcccctggcccagatcgccggaaacagatacgcctccggacctgtgggaaaggccctgagcgacgcatgtatgggcacaatcgcctccttcctgtctaagtaccaggacatcatcatcgaacaccagaaggtggtgaagggcaaccagaagagactggagagcctgcgggagctggccggcaaggaaaacctggaataccctagcgtgaccctgccacctcagcctcacaccaaggagggcgttgatgcctacaacgaagtgatcgcccgggtgcgaatgtgggtgaacctgaacctgtggcagaagctgaagctaagcagagatgatgccaagcctctgctgagactgaagggattcccttcctttcctctggtcgagagacaggccaacgaagtggactggtgggacatggtgtgtaacgtgaagaagctgatcaacgagaaaaaggaggatggcaaggtgttttggcagaatctggctggctacaagagacaggaagccctgagaccatacctgagcagcgaggaagatcggaagaagggaaagaaattcgctcggtaccagctgggcgacctgctgctgcacctggaaaagaagcacggcgaggactggggaaaggtgtacgacgaggcctgggagcggattgacaagaaagtggaaggcctgagcaagcacatcaagctggaagaggaacggagaagcgaggacgcccagagcaaggccgccctgaccgactggctgcgggctaaggccagcttcgtgatcgagggcctgaaggaggccgacaaggacgagttctgcagatgcgagctgaagctgcagaagtggtacggggacctgcggggaaagcccttcgccatcgaagccgagaacagcatcctggacatcagcggcttcagcaagcagtacaactgtgccttcatctggcagaaggacggcgtgaagaagctgaacctgtacctgatcatcaactacttcaagggcggcaagctgcggttcaagaagatcaaacctgaagccttcgaagccaacagattctacaccgtgatcaacaaaaagagcggcgagatcgtgcccatggaggtgaacttcaacttcgacgaccccaacctgatcatcctgcctctggcctttggcaagagacagggcagagaattcatctggaacgacctgctgtccctggaaaccggcagcctgaagctggccaacggaagagtgatcgagaagacactgtacaacagaagaacccggcaggatgagcctgccctgttcgtggccctgaccttcgagcggcgggaggtcctggactcctccaatatcaaaccaatgaacctgatcggcgtggcaagaggcgaaaacatccccgccgtgatcgccctgaccgaccccgagggctgcccactgagccggtttaaggatagcctgggaaacccaacccacatcctgagaatcggcgagagctataaggagaagcagcggaccatccaggccaagaaggaggtggagcagcggagagccggcggctacagccggaagtacgccagcaaagccaagaatctggcagacgatatggtgagaaacaccgctagagatctgctgtactacgccgtgacccaggatgccatgctgatcttcgccaacctgagccggggcttcggccggcagggcaagcggaccttcatggccgagagacagtacacacggatggaggactggctgaccgccaagctggcctacgagggcctgagcaagacctacctgtccaagacactggcccagtacacctccaagacatgcagcaactgtgggtttaccatcaccagcgccgactacgacagggtgctggagaagctgaagaagacagcaacaggctggatgaccacaattaacggcaaggagctgaaggtggagggccagattacctactacaacagatacaagagacagaacgtagtcaaggacctgtccgtcgagctggatagactgagcgaagaatctgtgaacaacgacatctcctcctggacaaagggcagaagcggagaagctctgagcctcctgaagaaaagattctcccatagacccgtgcaggagaagttcgtgtgcctgaactgcggcttcgagacacacgcagccgagcaagccgccctgaacatcgccagatcctggctgttcctgcggagccaggagtacaagaaataccagacaaacaagacaaccggcaacaccgataagagagccttcgtcgagacctggcagtccttttaccggaagaagcttaaggaggtgtggaaacctgccgtgcggtctggcggatctggcggaggctccaccagccccaagaaaaagagaaaagtctaagctgccttctgcggggcttgccttctggccatgcccttcttctctcccttgcacctgtacctcttggtctttgaataaagcctgagtaggaaggctagcaaaaaaaaaaaaaaaaaaaaaaaaaaaaaaaaaaaaaaaaaaaaaaaaaaaaaaaaaaaaaaaaaaaaaaaaaaaaaaaa

SEQ ID NO: 12265 - RNA, 5785 nt, synthetic construct
  source 1..5785: mol_type = other RNA
aggaaataagagagaaaagaagagtaagaagaaatataagagccaccatggcccctaagaagaagcgtaaagtgagccggatggaacgcctcgtctacgaggtgcggcagaagtgcagaaacatcgaggacatctgcatctcctgcggatctctgaacgtgaccctggagcacccactgttcatcggcggcatgtgccagaactgtaaaaactgttttctggagtgtgcctatcaatacgacgatgacggctaccagagctactgcaccatctgttgcggcggaagagaggtgctgatgtgtggaaataacaactgctgccggtgcttctgcgtggaatgcgtggacctgctggtgggccccggcgccgcccaggccgctattaaggaagatccttggaactgctacatgtgcggccacaagggcacatacggcctgctgagacggagagaggactggcctagcagactgcagatgttcttcgccaataaccacgaccaggagttcgacccccctaaggtgtaccctcccgtccccgccgagaagagaaagcccatccgggtcctgagcctgttcgatggcatcgccaccggtctgctggtgctgaaggacctgggcatccaggtggataggtacattgcctccgaggtgtgcgaggactccatcaccgtgggaatggtgcgtcatcagggcaagatcatgtacgtgggcgacgtgcggagcgtgacacagaagcatatccaggagtggggccctttcgacctggtgatcggcggcagcccttgcaatgacctgagcatcgtgaacccagcccggaagggcctgtacgagggaaccggcagactgttcttcgagttttacagactgctgcacgacgcccggcctaaggaaggcgacgaccggcccttcttttggctgttcgagaatgtggtggccatgggagtcagcgacaagcgggatattagccggttcctggagagcaaccccgtgatgatcgatgccaaggaagtgagcgccgcccaccgggccagatacttctggggcaatctgcctggcatgaacagacccctggccagcaccgtgaacgacaagctggagctgcaggagtgcctggagcacggccggatcgccaagttcagcaaggtgagaaccatcaccacccgaagcaacagcatcaaacaaggcaaggaccagcactttcctgtgttcatgaacgagaaggaggacatcctgtggtgtaccgagatggagagagtgttcgggttcccagtccactacacagatgtcagcaacatgtctagactggccagacagagactgctgggaagaagctggtccgtccctgtgatcagacacctgttcgcccctctgaaggagtacttcgcctgcgtgagcagcggcaacagcaacgccaacagccggggccccagcttctctagcggcctggtgccactgtccctgagagggagccacatgggccccatggagatctacaaaaccgtgagcgcctggaagcggcagcctgtgcgcgtgctgagcctgtttcggaatatcgataaagtcctgaaaagcctgggattcctggagagcggctctggctccggcggtggcaccctgaagtacgtggaggatgtgacaaacgtggtcagacgggatgtggagaagtggggccccttcgatctggtgtacggcagcacccaacccctgggcagctcttgtgaccggtgccctggctggtacatgtttcagttccaccggatcctgcagtacgccctgccgagacaggagtcccagcggccattcttttggattttcatggacaacttgctgctgaccgaggatgaccaggaaactaccactcggttcctgcagaccgaagccgtgaccctgcaggacgtgagaggccgggactaccagaacgccatgcgggtgtggtccaacatccctggactgaaaagcaagcacgcacctctgacccctaaagaagaggagtacctgcaggcccaggtgcggagcagaagcaagctggacgcccctaaggtggatctgctggtgaagaattgcctcctgcccctgagagagtacttcaagtatttcagccagaatagtctgcccctgggaggcagcggcggcggcctgcaggagctgctgaccttcaaggacgtgagcgtggagttcagcgtggacgagtgggcctgcctggaccccgcccagcagaccctgtacagggacgtgatgctggagaactacaggcacctggtgttcctgggcctgacccccagcaagccccacctgatcacctgcctggagcagagcaaggagccctggaaggtgaaggcctaccagaccgtggtgaagcaccccgccgtgagcaaccacggcggcccaagcagcggcgcccctcctcccagcggcggcagcccagccggctccccaacctctaccgaggagggcacctctgagtccgccacccccgagagcggccctggcacctccaccgagcccagcgagggcagcgcacccggcagccctgccggcagccccacctccacagaggagggaaccagcaccgagcccagcgaaggcagcgccccaggcaccagcaccgagcctagtgagcaggagattaaacggatcaacaagatcagaagaagacttgtgaaagacagcaacaccaagaaggccggcaagacaggccccatgaaaaccctgctggttagagtgatgacacccgatctgagagagcggctggaaaacctgagaaagaagcctgaaaatatcccccagcccatcagcaatacatctagagccaacctgaataagctgctgaccgattacaccgaaatgaagaaggcgatcctgcatgtgtactgggaagagttccagaaggaccctgtgggcctgatgagccgggtggcccagcctgccagcaagaagatcgatcagaacaagctgaaacctgagatggacgagaagggcaacctgaccaccgccggctttgcctgctctcagtgtggccagcccctgttcgtgtacaagctggagcaggtgtctgagaagggcaaggcttacaccaactacttcggacggtgcaatgtggccgagcacgaaaagctgatcctgctggcccagctgaagcccgagaaggatagcgacgaagccgtgacatatagcctgggaaagtttgggcagagggccctggatttctacagcattcatgtgaccaaggagtccacccaccccgtgaagcccctggcccagatcgccggaaacagatacgcctccggacctgtgggaaaggccctgagcgacgcatgtatgggcacaatcgcctccttcctgtctaagtaccaggacatcatcatcgaacaccagaaggtggtgaagggcaaccagaagagactggagagcctgcgggagctggccggcaaggaaaacctggaataccctagcgtgaccctgccacctcagcctcacaccaaggagggcgttgatgcctacaacgaagtgatcgcccgggtgcgaatgtgggtgaacctgaacctgtggcagaagctgaagctaagcagagatgatgccaagcctctgctgagactgaagggattcccttcctttcctctggtcgagagacaggccaacgaagtggactggtgggacatggtgtgtaacgtgaagaagctgatcaacgagaaaaaggaggatggcaaggtgttttggcagaatctggctggctacaagagacaggaagccctgagaccatacctgagcagcgaggaagatcggaagaagggaaagaaattcgctcggtaccagctgggcgacctgctgctgcacctggaaaagaagcacggcgaggactggggaaaggtgtacgacgaggcctgggagcggattgacaagaaagtggaaggcctgagcaagcacatcaagctggaagaggaacggagaagcgaggacgcccagagcaaggccgccctgaccgactggctgcgggctaaggccagcttcgtgatcgagggcctgaaggaggccgacaaggacgagttctgcagatgcgagctgaagctgcagaagtggtacggggacctgcggggaaagcccttcgccatcgaagccgagaacagcatcctggacatcagcggcttcagcaagcagtacaactgtgccttcatctggcagaaggacggcgtgaagaagctgaacctgtacctgatcatcaactacttcaagggcggcaagctgcggttcaagaagatcaaacctgaagccttcgaagccaacagattctacaccgtgatcaacaaaaagagcggcgagatcgtgcccatggaggtgaacttcaacttcgacgaccccaacctgatcatcctgcctctggcctttggcaagagacagggcagagaattcatctggaacgacctgctgtccctggaaaccggcagcctgaagctggccaacggaagagtgatcgagaagacactgtacaacagaagaacccggcaggatgagcctgccctgttcgtggccctgaccttcgagcggcgggaggtcctggactcctccaatatcaaaccaatgaacctgatcggcgtggcaagaggcgaaaacatccccgccgtgatcgccctgaccgaccccgagggctgcccactgagccggtttaaggatagcctgggaaacccaacccacatcctgagaatcggcgagagctataaggagaagcagcggaccatccaggccaagaaggaggtggagcagcggagagccggcggctacagccggaagtacgccagcaaagccaagaatctggcagacgatatggtgagaaacaccgctagagatctgctgtactacgccgtgacccaggatgccatgctgatcttcgccaacctgagccggggcttcggccggcagggcaagcggaccttcatggccgagagacagtacacacggatggaggactggctgaccgccaagctggcctacgagggcctgagcaagacctacctgtccaagacactggcccagtacacctccaagacatgcagcaactgtgggtttaccatcaccagcgccgactacgacagggtgctggagaagctgaagaagacagcaacaggctggatgaccacaattaacggcaaggagctgaaggtggagggccagattacctactacaacagatacaagagacagaacgtagtcaaggacctgtccgtcgagctggatagactgagcgaagaatctgtgaacaacgacatctcctcctggacaaagggcagaagcggagaagctctgagcctcctgaagaaaagattctcccatagacccgtgcaggagaagttcgtgtgcctgaactgcggcttcgagacacacgcagccgagcaagccgccctgaacatcgccagatcctggctgttcctgcggagccaggagtacaagaaataccagacaaacaagacaaccggcaacaccgataagagagccttcgtcgagacctggcagtccttttaccggaagaagcttaaggaggtgtggaaacctgccgtgcggtctggcggatctggcggaggctccaccagccccaagaaaaagagaaaagtctaagctgccttctgcggggcttgccttctggccatgcccttcttctctcccttgcacctgtacctcttggtctttgaataaagcctgagtaggaaggctagcaaaaaaaaaaaaaaaaaaaaaaaaaaaaaaaaaaaaaaaaaaaaaaaaaaaaaaaaaaaaaaaaaaaaaaaaaaaaaaaa

SEQ ID NO: 12266 - RNA, 5782 nt, synthetic construct
  source 1..5782: mol_type = other RNA
aggaaataagagagaaaagaagagtaagaagaaatataagagccaccatggcccctaagaagaagcgtaaagtgagccggatggaacgcctcgtctacgaggtgcggcagaagtgcagaaacatcgaggacatctgcatctcctgcggatctctgaacgtgaccctggagcacccactgttcatcggcggcatgtgccagaactgtaaaaactgttttctggagtgtgcctatcaatacgacgatgacggctaccagagctactgcaccatctgttgcggcggaagagaggtgctgatgtgtggaaataacaactgctgccggtgcttctgcgtggaatgcgtggacctgctggtgggccccggcgccgcccaggccgctattaaggaagatccttggaactgctacatgtgcggccacaagggcacatacggcctgctgagacggagagaggactggcctagcagactgcagatgttcttcgccaataaccacgaccaggagttcgacccccctaaggtgtaccctcccgtccccgccgagaagagaaagcccatccgggtcctgagcctgttcgatggcatcgccaccggtctgctggtgctgaaggacctgggcatccaggtggataggtacattgcctccgaggtgtgcgaggactccatcaccgtgggaatggtgcgtcatcagggcaagatcatgtacgtgggcgacgtgcggagcgtgacacagaagcatatccaggagtggggccctttcgacctggtgatcggcggcagcccttgcaatgacctgagcatcgtgaacccagcccggaagggcctgtacgagggaaccggcagactgttcttcgagttttacagactgctgcacgacgcccggcctaaggaaggcgacgaccggcccttcttttggctgttcgagaatgtggtggccatgggagtcagcgacaagcgggatattagccggttcctggagagcaaccccgtgatgatcgatgccaaggaagtgagcgccgcccaccgggccagatacttctggggcaatctgcctggcatgaacagacccctggccagcaccgtgaacgacaagctggagctgcaggagtgcctggagcacggccggatcgccaagttcagcaaggtgagaaccatcaccacccgaagcaacagcatcaaacaaggcaaggaccagcactttcctgtgttcatgaacgagaaggaggacatcctgtggtgtaccgagatggagagagtgttcgggttcccagtccactacacagatgtcagcaacatgtctagactggccagacagagactgctgggaagaagctggtccgtccctgtgatcagacacctgttcgcccctctgaaggagtacttcgcctgcgtgagcagcggcaacagcaacgccaacagccggggccccagcttctctagcggcctggtgccactgtccctgagagggagccacatgggccccatggagatctacaaaaccgtgagcgcctggaagcggcagcctgtgcgcgtgctgagcctgtttcggaatatcgataaagtcctgaaaagcctgggattcctggagagcggctctggctccggcggtggcaccctgaagtacgtggaggatgtgacaaacgtggtcagacgggatgtggagaagtggggccccttcgatctggtgtacggcagcacccaacccctgggcagctcttgtgaccggtgccctggctggtacatgtttcagttccaccggatcctgcagtacgccctgccgagacaggagtcccagcggccattcttttggattttcatggacaacttgctgctgaccgaggatgaccaggaaactaccactcggttcctgcagaccgaagccgtgaccctgcaggacgtgagaggccgggactaccagaacgccatgcgggtgtggtccaacatccctggactgaaaagcaagcacgcacctctgacccctaaagaagaggagtacctgcaggcccaggtgcggagcagaagcaagctggacgcccctaaggtggatctgctggtgaagaattgcctcctgcccctgagagagtacttcaagtatttcagccagaatagtctgcccctgggaggcagcggcggcggcaacgtggaggtggtgaaggtgatgccccaggacctggtgaccttcaaggacgtggccatcgacttcagccaggaggagtggcagtggatgaaccccgcccagaagagactgtacagaagcatgatgctggagaactaccagagcctggtgagcctgggcctgtgcatcagcaagccctacgtgatcagcctgctggagcagggcagagagccctgggagatgaccagcgagatgaccagaggcggcccaagcagcggcgcccctcctcccagcggcggcagcccagccggctccccaacctctaccgaggagggcacctctgagtccgccacccccgagagcggccctggcacctccaccgagcccagcgagggcagcgcacccggcagccctgccggcagccccacctccacagaggagggaaccagcaccgagcccagcgaaggcagcgccccaggcaccagcaccgagcctagtgagcaggagattaaacggatcaacaagatcagaagaagacttgtgaaagacagcaacaccaagaaggccggcaagacaggccccatgaaaaccctgctggttagagtgatgacacccgatctgagagagcggctggaaaacctgagaaagaagcctgaaaatatcccccagcccatcagcaatacatctagagccaacctgaataagctgctgaccgattacaccgaaatgaagaaggcgatcctgcatgtgtactgggaagagttccagaaggaccctgtgggcctgatgagccgggtggcccagcctgccagcaagaagatcgatcagaacaagctgaaacctgagatggacgagaagggcaacctgaccaccgccggctttgcctgctctcagtgtggccagcccctgttcgtgtacaagctggagcaggtgtctgagaagggcaaggcttacaccaactacttcggacggtgcaatgtggccgagcacgaaaagctgatcctgctggcccagctgaagcccgagaaggatagcgacgaagccgtgacatatagcctgggaaagtttgggcagagggccctggatttctacagcattcatgtgaccaaggagtccacccaccccgtgaagcccctggcccagatcgccggaaacagatacgcctccggacctgtgggaaaggccctgagcgacgcatgtatgggcacaatcgcctccttcctgtctaagtaccaggacatcatcatcgaacaccagaaggtggtgaagggcaaccagaagagactggagagcctgcgggagctggccggcaaggaaaacctggaataccctagcgtgaccctgccacctcagcctcacaccaaggagggcgttgatgcctacaacgaagtgatcgcccgggtgcgaatgtgggtgaacctgaacctgtggcagaagctgaagctaagcagagatgatgccaagcctctgctgagactgaagggattcccttcctttcctctggtcgagagacaggccaacgaagtggactggtgggacatggtgtgtaacgtgaagaagctgatcaacgagaaaaaggaggatggcaaggtgttttggcagaatctggctggctacaagagacaggaagccctgagaccatacctgagcagcgaggaagatcggaagaagggaaagaaattcgctcggtaccagctgggcgacctgctgctgcacctggaaaagaagcacggcgaggactggggaaaggtgtacgacgaggcctgggagcggattgacaagaaagtggaaggcctgagcaagcacatcaagctggaagaggaacggagaagcgaggacgcccagagcaaggccgccctgaccgactggctgcgggctaaggccagcttcgtgatcgagggcctgaaggaggccgacaaggacgagttctgcagatgcgagctgaagctgcagaagtggtacggggacctgcggggaaagcccttcgccatcgaagccgagaacagcatcctggacatcagcggcttcagcaagcagtacaactgtgccttcatctggcagaaggacggcgtgaagaagctgaacctgtacctgatcatcaactacttcaagggcggcaagctgcggttcaagaagatcaaacctgaagccttcgaagccaacagattctacaccgtgatcaacaaaaagagcggcgagatcgtgcccatggaggtgaacttcaacttcgacgaccccaacctgatcatcctgcctctggcctttggcaagagacagggcagagaattcatctggaacgacctgctgtccctggaaaccggcagcctgaagctggccaacggaagagtgatcgagaagacactgtacaacagaagaacccggcaggatgagcctgccctgttcgtggccctgaccttcgagcggcgggaggtcctggactcctccaatatcaaaccaatgaacctgatcggcgtggcaagaggcgaaaacatccccgccgtgatcgccctgaccgaccccgagggctgcccactgagccggtttaaggatagcctgggaaacccaacccacatcctgagaatcggcgagagctataaggagaagcagcggaccatccaggccaagaaggaggtggagcagcggagagccggcggctacagccggaagtacgccagcaaagccaagaatctggcagacgatatggtgagaaacaccgctagagatctgctgtactacgccgtgacccaggatgccatgctgatcttcgccaacctgagccggggcttcggccggcagggcaagcggaccttcatggccgagagacagtacacacggatggaggactggctgaccgccaagctggcctacgagggcctgagcaagacctacctgtccaagacactggcccagtacacctccaagacatgcagcaactgtgggtttaccatcaccagcgccgactacgacagggtgctggagaagctgaagaagacagcaacaggctggatgaccacaattaacggcaaggagctgaaggtggagggccagattacctactacaacagatacaagagacagaacgtagtcaaggacctgtccgtcgagctggatagactgagcgaagaatctgtgaacaacgacatctcctcctggacaaagggcagaagcggagaagctctgagcctcctgaagaaaagattctcccatagacccgtgcaggagaagttcgtgtgcctgaactgcggcttcgagacacacgcagccgagcaagccgccctgaacatcgccagatcctggctgttcctgcggagccaggagtacaagaaataccagacaaacaagacaaccggcaacaccgataagagagccttcgtcgagacctggcagtccttttaccggaagaagcttaaggaggtgtggaaacctgccgtgcggtctggcggatctggcggaggctccaccagccccaagaaaaagagaaaagtctaagctgccttctgcggggcttgccttctggccatgcccttcttctctcccttgcacctgtacctcttggtctttgaataaagcctgagtaggaaggctagcaaaaaaaaaaaaaaaaaaaaaaaaaaaaaaaaaaaaaaaaaaaaaaaaaaaaaaaaaaaaaaaaaaaaaaaaaaaaaaaa

SEQ ID NO: 12267 - RNA, 5785 nt, synthetic construct
  source 1..5785: mol_type = other RNA
aggaaataagagagaaaagaagagtaagaagaaatataagagccaccatggcccctaagaagaagcgtaaagtgagccggatggaacgcctcgtctacgaggtgcggcagaagtgcagaaacatcgaggacatctgcatctcctgcggatctctgaacgtgaccctggagcacccactgttcatcggcggcatgtgccagaactgtaaaaactgttttctggagtgtgcctatcaatacgacgatgacggctaccagagctactgcaccatctgttgcggcggaagagaggtgctgatgtgtggaaataacaactgctgccggtgcttctgcgtggaatgcgtggacctgctggtgggccccggcgccgcccaggccgctattaaggaagatccttggaactgctacatgtgcggccacaagggcacatacggcctgctgagacggagagaggactggcctagcagactgcagatgttcttcgccaataaccacgaccaggagttcgacccccctaaggtgtaccctcccgtccccgccgagaagagaaagcccatccgggtcctgagcctgttcgatggcatcgccaccggtctgctggtgctgaaggacctgggcatccaggtggataggtacattgcctccgaggtgtgcgaggactccatcaccgtgggaatggtgcgtcatcagggcaagatcatgtacgtgggcgacgtgcggagcgtgacacagaagcatatccaggagtggggccctttcgacctggtgatcggcggcagcccttgcaatgacctgagcatcgtgaacccagcccggaagggcctgtacgagggaaccggcagactgttcttcgagttttacagactgctgcacgacgcccggcctaaggaaggcgacgaccggcccttcttttggctgttcgagaatgtggtggccatgggagtcagcgacaagcgggatattagccggttcctggagagcaaccccgtgatgatcgatgccaaggaagtgagcgccgcccaccgggccagatacttctggggcaatctgcctggcatgaacagacccctggccagcaccgtgaacgacaagctggagctgcaggagtgcctggagcacggccggatcgccaagttcagcaaggtgagaaccatcaccacccgaagcaacagcatcaaacaaggcaaggaccagcactttcctgtgttcatgaacgagaaggaggacatcctgtggtgtaccgagatggagagagtgttcgggttcccagtccactacacagatgtcagcaacatgtctagactggccagacagagactgctgggaagaagctggtccgtccctgtgatcagacacctgttcgcccctctgaaggagtacttcgcctgcgtgagcagcggcaacagcaacgccaacagccggggccccagcttctctagcggcctggtgccactgtccctgagagggagccacatgggccccatggagatctacaaaaccgtgagcgcctggaagcggcagcctgtgcgcgtgctgagcctgtttcggaatatcgataaagtcctgaaaagcctgggattcctggagagcggctctggctccggcggtggcaccctgaagtacgtggaggatgtgacaaacgtggtcagacgggatgtggagaagtggggccccttcgatctggtgtacggcagcacccaacccctgggcagctcttgtgaccggtgccctggctggtacatgtttcagttccaccggatcctgcagtacgccctgccgagacaggagtcccagcggccattcttttggattttcatggacaacttgctgctgaccgaggatgaccaggaaactaccactcggttcctgcagaccgaagccgtgaccctgcaggacgtgagaggccgggactaccagaacgccatgcgggtgtggtccaacatccctggactgaaaagcaagcacgcacctctgacccctaaagaagaggagtacctgcaggcccaggtgcggagcagaagcaagctggacgcccctaaggtggatctgctggtgaagaattgcctcctgcccctgagagagtacttcaagtatttcagccagaatagtctgcccctgggaggcagcggcggcggcttccaggagagcgtggccttcgaggacgtggccgtgtacttcacccagaaccagtggggcagcctggaccccgcccagagggccctgtacagcgaggtgatgctggagaactacgccaacgtggccagcctggtggccttccccttccccaagcccgccctgatcagccacctggagaagggcgaggccccctggggccccgacccctgggacgccgagatccccagcggcatcaaccagggcggcggcccaagcagcggcgcccctcctcccagcggcggcagcccagccggctccccaacctctaccgaggagggcacctctgagtccgccacccccgagagcggccctggcacctccaccgagcccagcgagggcagcgcacccggcagccctgccggcagccccacctccacagaggagggaaccagcaccgagcccagcgaaggcagcgccccaggcaccagcaccgagcctagtgagcaggagattaaacggatcaacaagatcagaagaagacttgtgaaagacagcaacaccaagaaggccggcaagacaggccccatgaaaaccctgctggttagagtgatgacacccgatctgagagagcggctggaaaacctgagaaagaagcctgaaaatatcccccagcccatcagcaatacatctagagccaacctgaataagctgctgaccgattacaccgaaatgaagaaggcgatcctgcatgtgtactgggaagagttccagaaggaccctgtgggcctgatgagccgggtggcccagcctgccagcaagaagatcgatcagaacaagctgaaacctgagatggacgagaagggcaacctgaccaccgccggctttgcctgctctcagtgtggccagcccctgttcgtgtacaagctggagcaggtgtctgagaagggcaaggcttacaccaactacttcggacggtgcaatgtggccgagcacgaaaagctgatcctgctggcccagctgaagcccgagaaggatagcgacgaagccgtgacatatagcctgggaaagtttgggcagagggccctggatttctacagcattcatgtgaccaaggagtccacccaccccgtgaagcccctggcccagatcgccggaaacagatacgcctccggacctgtgggaaaggccctgagcgacgcatgtatgggcacaatcgcctccttcctgtctaagtaccaggacatcatcatcgaacaccagaaggtggtgaagggcaaccagaagagactggagagcctgcgggagctggccggcaaggaaaacctggaataccctagcgtgaccctgccacctcagcctcacaccaaggagggcgttgatgcctacaacgaagtgatcgcccgggtgcgaatgtgggtgaacctgaacctgtggcagaagctgaagctaagcagagatgatgccaagcctctgctgagactgaagggattcccttcctttcctctggtcgagagacaggccaacgaagtggactggtgggacatggtgtgtaacgtgaagaagctgatcaacgagaaaaaggaggatggcaaggtgttttggcagaatctggctggctacaagagacaggaagccctgagaccatacctgagcagcgaggaagatcggaagaagggaaagaaattcgctcggtaccagctgggcgacctgctgctgcacctggaaaagaagcacggcgaggactggggaaaggtgtacgacgaggcctgggagcggattgacaagaaagtggaaggcctgagcaagcacatcaagctggaagaggaacggagaagcgaggacgcccagagcaaggccgccctgaccgactggctgcgggctaaggccagcttcgtgatcgagggcctgaaggaggccgacaaggacgagttctgcagatgcgagctgaagctgcagaagtggtacggggacctgcggggaaagcccttcgccatcgaagccgagaacagcatcctggacatcagcggcttcagcaagcagtacaactgtgccttcatctggcagaaggacggcgtgaagaagctgaacctgtacctgatcatcaactacttcaagggcggcaagctgcggttcaagaagatcaaacctgaagccttcgaagccaacagattctacaccgtgatcaacaaaaagagcggcgagatcgtgcccatggaggtgaacttcaacttcgacgaccccaacctgatcatcctgcctctggcctttggcaagagacagggcagagaattcatctggaacgacctgctgtccctggaaaccggcagcctgaagctggccaacggaagagtgatcgagaagacactgtacaacagaagaacccggcaggatgagcctgccctgttcgtggccctgaccttcgagcggcgggaggtcctggactcctccaatatcaaaccaatgaacctgatcggcgtggcaagaggcgaaaacatccccgccgtgatcgccctgaccgaccccgagggctgcccactgagccggtttaaggatagcctgggaaacccaacccacatcctgagaatcggcgagagctataaggagaagcagcggaccatccaggccaagaaggaggtggagcagcggagagccggcggctacagccggaagtacgccagcaaagccaagaatctggcagacgatatggtgagaaacaccgctagagatctgctgtactacgccgtgacccaggatgccatgctgatcttcgccaacctgagccggggcttcggccggcagggcaagcggaccttcatggccgagagacagtacacacggatggaggactggctgaccgccaagctggcctacgagggcctgagcaagacctacctgtccaagacactggcccagtacacctccaagacatgcagcaactgtgggtttaccatcaccagcgccgactacgacagggtgctggagaagctgaagaagacagcaacaggctggatgaccacaattaacggcaaggagctgaaggtggagggccagattacctactacaacagatacaagagacagaacgtagtcaaggacctgtccgtcgagctggatagactgagcgaagaatctgtgaacaacgacatctcctcctggacaaagggcagaagcggagaagctctgagcctcctgaagaaaagattctcccatagacccgtgcaggagaagttcgtgtgcctgaactgcggcttcgagacacacgcagccgagcaagccgccctgaacatcgccagatcctggctgttcctgcggagccaggagtacaagaaataccagacaaacaagacaaccggcaacaccgataagagagccttcgtcgagacctggcagtccttttaccggaagaagcttaaggaggtgtggaaacctgccgtgcggtctggcggatctggcggaggctccaccagccccaagaaaaagagaaaagtctaagctgccttctgcggggcttgccttctggccatgcccttcttctctcccttgcacctgtacctcttggtctttgaataaagcctgagtaggaaggctagcaaaaaaaaaaaaaaaaaaaaaaaaaaaaaaaaaaaaaaaaaaaaaaaaaaaaaaaaaaaaaaaaaaaaaaaaaaaaaaaa

SEQ ID NO: 12268 - RNA, 5785 nt, synthetic construct
  source 1..5785: mol_type = other RNA
aggaaataagagagaaaagaagagtaagaagaaatataagagccaccatggcccctaagaagaagcgtaaagtgagccggatggaacgcctcgtctacgaggtgcggcagaagtgcagaaacatcgaggacatctgcatctcctgcggatctctgaacgtgaccctggagcacccactgttcatcggcggcatgtgccagaactgtaaaaactgttttctggagtgtgcctatcaatacgacgatgacggctaccagagctactgcaccatctgttgcggcggaagagaggtgctgatgtgtggaaataacaactgctgccggtgcttctgcgtggaatgcgtggacctgctggtgggccccggcgccgcccaggccgctattaaggaagatccttggaactgctacatgtgcggccacaagggcacatacggcctgctgagacggagagaggactggcctagcagactgcagatgttcttcgccaataaccacgaccaggagttcgacccccctaaggtgtaccctcccgtccccgccgagaagagaaagcccatccgggtcctgagcctgttcgatggcatcgccaccggtctgctggtgctgaaggacctgggcatccaggtggataggtacattgcctccgaggtgtgcgaggactccatcaccgtgggaatggtgcgtcatcagggcaagatcatgtacgtgggcgacgtgcggagcgtgacacagaagcatatccaggagtggggccctttcgacctggtgatcggcggcagcccttgcaatgacctgagcatcgtgaacccagcccggaagggcctgtacgagggaaccggcagactgttcttcgagttttacagactgctgcacgacgcccggcctaaggaaggcgacgaccggcccttcttttggctgttcgagaatgtggtggccatgggagtcagcgacaagcgggatattagccggttcctggagagcaaccccgtgatgatcgatgccaaggaagtgagcgccgcccaccgggccagatacttctggggcaatctgcctggcatgaacagacccctggccagcaccgtgaacgacaagctggagctgcaggagtgcctggagcacggccggatcgccaagttcagcaaggtgagaaccatcaccacccgaagcaacagcatcaaacaaggcaaggaccagcactttcctgtgttcatgaacgagaaggaggacatcctgtggtgtaccgagatggagagagtgttcgggttcccagtccactacacagatgtcagcaacatgtctagactggccagacagagactgctgggaagaagctggtccgtccctgtgatcagacacctgttcgcccctctgaaggagtacttcgcctgcgtgagcagcggcaacagcaacgccaacagccggggccccagcttctctagcggcctggtgccactgtccctgagagggagccacatgggccccatggagatctacaaaaccgtgagcgcctggaagcggcagcctgtgcgcgtgctgagcctgtttcggaatatcgataaagtcctgaaaagcctgggattcctggagagcggctctggctccggcggtggcaccctgaagtacgtggaggatgtgacaaacgtggtcagacgggatgtggagaagtggggccccttcgatctggtgtacggcagcacccaacccctgggcagctcttgtgaccggtgccctggctggtacatgtttcagttccaccggatcctgcagtacgccctgccgagacaggagtcccagcggccattcttttggattttcatggacaacttgctgctgaccgaggatgaccaggaaactaccactcggttcctgcagaccgaagccgtgaccctgcaggacgtgagaggccgggactaccagaacgccatgcgggtgtggtccaacatccctggactgaaaagcaagcacgcacctctgacccctaaagaagaggagtacctgcaggcccaggtgcggagcagaagcaagctggacgcccctaaggtggatctgctggtgaagaattgcctcctgcccctgagagagtacttcaagtatttcagccagaatagtctgcccctgggaggcagcggcggcggcccccagaagagcgtgaccttcgaggacgtggccgtgtacttcacccaggccgagtgggacggcctgagccccgcccagaggaccctgtacagggacgtgatgctggagaactacggcaacgtggccagcctgggcttccccctgctgaagcccgccgtgatcagccagctggagggcggcggcgagctgggcggccccagccccctggccgccggcaccggcctgaggggcctgtggaccgtgggcggcccaagcagcggcgcccctcctcccagcggcggcagcccagccggctccccaacctctaccgaggagggcacctctgagtccgccacccccgagagcggccctggcacctccaccgagcccagcgagggcagcgcacccggcagccctgccggcagccccacctccacagaggagggaaccagcaccgagcccagcgaaggcagcgccccaggcaccagcaccgagcctagtgagcaggagattaaacggatcaacaagatcagaagaagacttgtgaaagacagcaacaccaagaaggccggcaagacaggccccatgaaaaccctgctggttagagtgatgacacccgatctgagagagcggctggaaaacctgagaaagaagcctgaaaatatcccccagcccatcagcaatacatctagagccaacctgaataagctgctgaccgattacaccgaaatgaagaaggcgatcctgcatgtgtactgggaagagttccagaaggaccctgtgggcctgatgagccgggtggcccagcctgccagcaagaagatcgatcagaacaagctgaaacctgagatggacgagaagggcaacctgaccaccgccggctttgcctgctctcagtgtggccagcccctgttcgtgtacaagctggagcaggtgtctgagaagggcaaggcttacaccaactacttcggacggtgcaatgtggccgagcacgaaaagctgatcctgctggcccagctgaagcccgagaaggatagcgacgaagccgtgacatatagcctgggaaagtttgggcagagggccctggatttctacagcattcatgtgaccaaggagtccacccaccccgtgaagcccctggcccagatcgccggaaacagatacgcctccggacctgtgggaaaggccctgagcgacgcatgtatgggcacaatcgcctccttcctgtctaagtaccaggacatcatcatcgaacaccagaaggtggtgaagggcaaccagaagagactggagagcctgcgggagctggccggcaaggaaaacctggaataccctagcgtgaccctgccacctcagcctcacaccaaggagggcgttgatgcctacaacgaagtgatcgcccgggtgcgaatgtgggtgaacctgaacctgtggcagaagctgaagctaagcagagatgatgccaagcctctgctgagactgaagggattcccttcctttcctctggtcgagagacaggccaacgaagtggactggtgggacatggtgtgtaacgtgaagaagctgatcaacgagaaaaaggaggatggcaaggtgttttggcagaatctggctggctacaagagacaggaagccctgagaccatacctgagcagcgaggaagatcggaagaagggaaagaaattcgctcggtaccagctgggcgacctgctgctgcacctggaaaagaagcacggcgaggactggggaaaggtgtacgacgaggcctgggagcggattgacaagaaagtggaaggcctgagcaagcacatcaagctggaagaggaacggagaagcgaggacgcccagagcaaggccgccctgaccgactggctgcgggctaaggccagcttcgtgatcgagggcctgaaggaggccgacaaggacgagttctgcagatgcgagctgaagctgcagaagtggtacggggacctgcggggaaagcccttcgccatcgaagccgagaacagcatcctggacatcagcggcttcagcaagcagtacaactgtgccttcatctggcagaaggacggcgtgaagaagctgaacctgtacctgatcatcaactacttcaagggcggcaagctgcggttcaagaagatcaaacctgaagccttcgaagccaacagattctacaccgtgatcaacaaaaagagcggcgagatcgtgcccatggaggtgaacttcaacttcgacgaccccaacctgatcatcctgcctctggcctttggcaagagacagggcagagaattcatctggaacgacctgctgtccctggaaaccggcagcctgaagctggccaacggaagagtgatcgagaagacactgtacaacagaagaacccggcaggatgagcctgccctgttcgtggccctgaccttcgagcggcgggaggtcctggactcctccaatatcaaaccaatgaacctgatcggcgtggcaagaggcgaaaacatccccgccgtgatcgccctgaccgaccccgagggctgcccactgagccggtttaaggatagcctgggaaacccaacccacatcctgagaatcggcgagagctataaggagaagcagcggaccatccaggccaagaaggaggtggagcagcggagagccggcggctacagccggaagtacgccagcaaagccaagaatctggcagacgatatggtgagaaacaccgctagagatctgctgtactacgccgtgacccaggatgccatgctgatcttcgccaacctgagccggggcttcggccggcagggcaagcggaccttcatggccgagagacagtacacacggatggaggactggctgaccgccaagctggcctacgagggcctgagcaagacctacctgtccaagacactggcccagtacacctccaagacatgcagcaactgtgggtttaccatcaccagcgccgactacgacagggtgctggagaagctgaagaagacagcaacaggctggatgaccacaattaacggcaaggagctgaaggtggagggccagattacctactacaacagatacaagagacagaacgtagtcaaggacctgtccgtcgagctggatagactgagcgaagaatctgtgaacaacgacatctcctcctggacaaagggcagaagcggagaagctctgagcctcctgaagaaaagattctcccatagacccgtgcaggagaagttcgtgtgcctgaactgcggcttcgagacacacgcagccgagcaagccgccctgaacatcgccagatcctggctgttcctgcggagccaggagtacaagaaataccagacaaacaagacaaccggcaacaccgataagagagccttcgtcgagacctggcagtccttttaccggaagaagcttaaggaggtgtggaaacctgccgtgcggtctggcggatctggcggaggctccaccagccccaagaaaaagagaaaagtctaagctgccttctgcggggcttgccttctggccatgcccttcttctctcccttgcacctgtacctcttggtctttgaataaagcctgagtaggaaggctagcaaaaaaaaaaaaaaaaaaaaaaaaaaaaaaaaaaaaaaaaaaaaaaaaaaaaaaaaaaaaaaaaaaaaaaaaaaaaaaaa

SEQ ID NO: 12269 - RNA, 5785 nt, synthetic construct
  source 1..5785: mol_type = other RNA
aggaaataagagagaaaagaagagtaagaagaaatataagagccaccatggcccctaagaagaagcgtaaagtgagccggatggaacgcctcgtctacgaggtgcggcagaagtgcagaaacatcgaggacatctgcatctcctgcggatctctgaacgtgaccctggagcacccactgttcatcggcggcatgtgccagaactgtaaaaactgttttctggagtgtgcctatcaatacgacgatgacggctaccagagctactgcaccatctgttgcggcggaagagaggtgctgatgtgtggaaataacaactgctgccggtgcttctgcgtggaatgcgtggacctgctggtgggccccggcgccgcccaggccgctattaaggaagatccttggaactgctacatgtgcggccacaagggcacatacggcctgctgagacggagagaggactggcctagcagactgcagatgttcttcgccaataaccacgaccaggagttcgacccccctaaggtgtaccctcccgtccccgccgagaagagaaagcccatccgggtcctgagcctgttcgatggcatcgccaccggtctgctggtgctgaaggacctgggcatccaggtggataggtacattgcctccgaggtgtgcgaggactccatcaccgtgggaatggtgcgtcatcagggcaagatcatgtacgtgggcgacgtgcggagcgtgacacagaagcatatccaggagtggggccctttcgacctggtgatcggcggcagcccttgcaatgacctgagcatcgtgaacccagcccggaagggcctgtacgagggaaccggcagactgttcttcgagttttacagactgctgcacgacgcccggcctaaggaaggcgacgaccggcccttcttttggctgttcgagaatgtggtggccatgggagtcagcgacaagcgggatattagccggttcctggagagcaaccccgtgatgatcgatgccaaggaagtgagcgccgcccaccgggccagatacttctggggcaatctgcctggcatgaacagacccctggccagcaccgtgaacgacaagctggagctgcaggagtgcctggagcacggccggatcgccaagttcagcaaggtgagaaccatcaccacccgaagcaacagcatcaaacaaggcaaggaccagcactttcctgtgttcatgaacgagaaggaggacatcctgtggtgtaccgagatggagagagtgttcgggttcccagtccactacacagatgtcagcaacatgtctagactggccagacagagactgctgggaagaagctggtccgtccctgtgatcagacacctgttcgcccctctgaaggagtacttcgcctgcgtgagcagcggcaacagcaacgccaacagccggggccccagcttctctagcggcctggtgccactgtccctgagagggagccacatgggccccatggagatctacaaaaccgtgagcgcctggaagcggcagcctgtgcgcgtgctgagcctgtttcggaatatcgataaagtcctgaaaagcctgggattcctggagagcggctctggctccggcggtggcaccctgaagtacgtggaggatgtgacaaacgtggtcagacgggatgtggagaagtggggccccttcgatctggtgtacggcagcacccaacccctgggcagctcttgtgaccggtgccctggctggtacatgtttcagttccaccggatcctgcagtacgccctgccgagacaggagtcccagcggccattcttttggattttcatggacaacttgctgctgaccgaggatgaccaggaaactaccactcggttcctgcagaccgaagccgtgaccctgcaggacgtgagaggccgggactaccagaacgccatgcgggtgtggtccaacatccctggactgaaaagcaagcacgcacctctgacccctaaagaagaggagtacctgcaggcccaggtgcggagcagaagcaagctggacgcccctaaggtggatctgctggtgaagaattgcctcctgcccctgagagagtacttcaagtatttcagccagaatagtctgcccctgggaggcagcggcggcggcatggccttcgaggacgtggccgtgtacttcagccaggaggagtgggtgttcctggacgccgcccagagggccctgtacaggcacgtgatgctggagaacttcgccctggtggacagcatcggcctgagcatcagcaggcccagggtgatcatccagctgcagaggggcgaggagccctgggtgagcaacaggaccaacaccggccccggcaggggcaccaggaggaggcccagcctgggcagcggcggcccaagcagcggcgcccctcctcccagcggcggcagcccagccggctccccaacctctaccgaggagggcacctctgagtccgccacccccgagagcggccctggcacctccaccgagcccagcgagggcagcgcacccggcagccctgccggcagccccacctccacagaggagggaaccagcaccgagcccagcgaaggcagcgccccaggcaccagcaccgagcctagtgagcaggagattaaacggatcaacaagatcagaagaagacttgtgaaagacagcaacaccaagaaggccggcaagacaggccccatgaaaaccctgctggttagagtgatgacacccgatctgagagagcggctggaaaacctgagaaagaagcctgaaaatatcccccagcccatcagcaatacatctagagccaacctgaataagctgctgaccgattacaccgaaatgaagaaggcgatcctgcatgtgtactgggaagagttccagaaggaccctgtgggcctgatgagccgggtggcccagcctgccagcaagaagatcgatcagaacaagctgaaacctgagatggacgagaagggcaacctgaccaccgccggctttgcctgctctcagtgtggccagcccctgttcgtgtacaagctggagcaggtgtctgagaagggcaaggcttacaccaactacttcggacggtgcaatgtggccgagcacgaaaagctgatcctgctggcccagctgaagcccgagaaggatagcgacgaagccgtgacatatagcctgggaaagtttgggcagagggccctggatttctacagcattcatgtgaccaaggagtccacccaccccgtgaagcccctggcccagatcgccggaaacagatacgcctccggacctgtgggaaaggccctgagcgacgcatgtatgggcacaatcgcctccttcctgtctaagtaccaggacatcatcatcgaacaccagaaggtggtgaagggcaaccagaagagactggagagcctgcgggagctggccggcaaggaaaacctggaataccctagcgtgaccctgccacctcagcctcacaccaaggagggcgttgatgcctacaacgaagtgatcgcccgggtgcgaatgtgggtgaacctgaacctgtggcagaagctgaagctaagcagagatgatgccaagcctctgctgagactgaagggattcccttcctttcctctggtcgagagacaggccaacgaagtggactggtgggacatggtgtgtaacgtgaagaagctgatcaacgagaaaaaggaggatggcaaggtgttttggcagaatctggctggctacaagagacaggaagccctgagaccatacctgagcagcgaggaagatcggaagaagggaaagaaattcgctcggtaccagctgggcgacctgctgctgcacctggaaaagaagcacggcgaggactggggaaaggtgtacgacgaggcctgggagcggattgacaagaaagtggaaggcctgagcaagcacatcaagctggaagaggaacggagaagcgaggacgcccagagcaaggccgccctgaccgactggctgcgggctaaggccagcttcgtgatcgagggcctgaaggaggccgacaaggacgagttctgcagatgcgagctgaagctgcagaagtggtacggggacctgcggggaaagcccttcgccatcgaagccgagaacagcatcctggacatcagcggcttcagcaagcagtacaactgtgccttcatctggcagaaggacggcgtgaagaagctgaacctgtacctgatcatcaactacttcaagggcggcaagctgcggttcaagaagatcaaacctgaagccttcgaagccaacagattctacaccgtgatcaacaaaaagagcggcgagatcgtgcccatggaggtgaacttcaacttcgacgaccccaacctgatcatcctgcctctggcctttggcaagagacagggcagagaattcatctggaacgacctgctgtccctggaaaccggcagcctgaagctggccaacggaagagtgatcgagaagacactgtacaacagaagaacccggcaggatgagcctgccctgttcgtggccctgaccttcgagcggcgggaggtcctggactcctccaatatcaaaccaatgaacctgatcggcgtggcaagaggcgaaaacatccccgccgtgatcgccctgaccgaccccgagggctgcccactgagccggtttaaggatagcctgggaaacccaacccacatcctgagaatcggcgagagctataaggagaagcagcggaccatccaggccaagaaggaggtggagcagcggagagccggcggctacagccggaagtacgccagcaaagccaagaatctggcagacgatatggtgagaaacaccgctagagatctgctgtactacgccgtgacccaggatgccatgctgatcttcgccaacctgagccggggcttcggccggcagggcaagcggaccttcatggccgagagacagtacacacggatggaggactggctgaccgccaagctggcctacgagggcctgagcaagacctacctgtccaagacactggcccagtacacctccaagacatgcagcaactgtgggtttaccatcaccagcgccgactacgacagggtgctggagaagctgaagaagacagcaacaggctggatgaccacaattaacggcaaggagctgaaggtggagggccagattacctactacaacagatacaagagacagaacgtagtcaaggacctgtccgtcgagctggatagactgagcgaagaatctgtgaacaacgacatctcctcctggacaaagggcagaagcggagaagctctgagcctcctgaagaaaagattctcccatagacccgtgcaggagaagttcgtgtgcctgaactgcggcttcgagacacacgcagccgagcaagccgccctgaacatcgccagatcctggctgttcctgcggagccaggagtacaagaaataccagacaaacaagacaaccggcaacaccgataagagagccttcgtcgagacctggcagtccttttaccggaagaagcttaaggaggtgtggaaacctgccgtgcggtctggcggatctggcggaggctccaccagccccaagaaaaagagaaaagtctaagctgccttctgcggggcttgccttctggccatgcccttcttctctcccttgcacctgtacctcttggtctttgaataaagcctgagtaggaaggctagcaaaaaaaaaaaaaaaaaaaaaaaaaaaaaaaaaaaaaaaaaaaaaaaaaaaaaaaaaaaaaaaaaaaaaaaaaaaaaaaa

SEQ ID NO: 12270 - RNA, 5785 nt, synthetic construct
  source 1..5785: mol_type = other RNA
aggaaataagagagaaaagaagagtaagaagaaatataagagccaccatggcccctaagaagaagcgtaaagtgagccggatggaacgcctcgtctacgaggtgcggcagaagtgcagaaacatcgaggacatctgcatctcctgcggatctctgaacgtgaccctggagcacccactgttcatcggcggcatgtgccagaactgtaaaaactgttttctggagtgtgcctatcaatacgacgatgacggctaccagagctactgcaccatctgttgcggcggaagagaggtgctgatgtgtggaaataacaactgctgccggtgcttctgcgtggaatgcgtggacctgctggtgggccccggcgccgcccaggccgctattaaggaagatccttggaactgctacatgtgcggccacaagggcacatacggcctgctgagacggagagaggactggcctagcagactgcagatgttcttcgccaataaccacgaccaggagttcgacccccctaaggtgtaccctcccgtccccgccgagaagagaaagcccatccgggtcctgagcctgttcgatggcatcgccaccggtctgctggtgctgaaggacctgggcatccaggtggataggtacattgcctccgaggtgtgcgaggactccatcaccgtgggaatggtgcgtcatcagggcaagatcatgtacgtgggcgacgtgcggagcgtgacacagaagcatatccaggagtggggccctttcgacctggtgatcggcggcagcccttgcaatgacctgagcatcgtgaacccagcccggaagggcctgtacgagggaaccggcagactgttcttcgagttttacagactgctgcacgacgcccggcctaaggaaggcgacgaccggcccttcttttggctgttcgagaatgtggtggccatgggagtcagcgacaagcgggatattagccggttcctggagagcaaccccgtgatgatcgatgccaaggaagtgagcgccgcccaccgggccagatacttctggggcaatctgcctggcatgaacagacccctggccagcaccgtgaacgacaagctggagctgcaggagtgcctggagcacggccggatcgccaagttcagcaaggtgagaaccatcaccacccgaagcaacagcatcaaacaaggcaaggaccagcactttcctgtgttcatgaacgagaaggaggacatcctgtggtgtaccgagatggagagagtgttcgggttcccagtccactacacagatgtcagcaacatgtctagactggccagacagagactgctgggaagaagctggtccgtccctgtgatcagacacctgttcgcccctctgaaggagtacttcgcctgcgtgagcagcggcaacagcaacgccaacagccggggccccagcttctctagcggcctggtgccactgtccctgagagggagccacatgggccccatggagatctacaaaaccgtgagcgcctggaagcggcagcctgtgcgcgtgctgagcctgtttcggaatatcgataaagtcctgaaaagcctgggattcctggagagcggctctggctccggcggtggcaccctgaagtacgtggaggatgtgacaaacgtggtcagacgggatgtggagaagtggggccccttcgatctggtgtacggcagcacccaacccctgggcagctcttgtgaccggtgccctggctggtacatgtttcagttccaccggatcctgcagtacgccctgccgagacaggagtcccagcggccattcttttggattttcatggacaacttgctgctgaccgaggatgaccaggaaactaccactcggttcctgcagaccgaagccgtgaccctgcaggacgtgagaggccgggactaccagaacgccatgcgggtgtggtccaacatccctggactgaaaagcaagcacgcacctctgacccctaaagaagaggagtacctgcaggcccaggtgcggagcagaagcaagctggacgcccctaaggtggatctgctggtgaagaattgcctcctgcccctgagagagtacttcaagtatttcagccagaatagtctgcccctgggaggcagcggcggcggcgcccacggcagcgtgatgttcaacgacgtgagcatcgtgttcagccaggaggagtgggagtacctggacctggagcagagggacctgtacagggacgtgatgctggagaactacagcaacctggtgagcctgggctgcttcatcagcaagcccgacgtgatcagcctgctggagcagggcaaggagccctggaaggtggtgaggaagggcaggaggcagtaccccgacctggagaccaggtacggcggcccaagcagcggcgcccctcctcccagcggcggcagcccagccggctccccaacctctaccgaggagggcacctctgagtccgccacccccgagagcggccctggcacctccaccgagcccagcgagggcagcgcacccggcagccctgccggcagccccacctccacagaggagggaaccagcaccgagcccagcgaaggcagcgccccaggcaccagcaccgagcctagtgagcaggagattaaacggatcaacaagatcagaagaagacttgtgaaagacagcaacaccaagaaggccggcaagacaggccccatgaaaaccctgctggttagagtgatgacacccgatctgagagagcggctggaaaacctgagaaagaagcctgaaaatatcccccagcccatcagcaatacatctagagccaacctgaataagctgctgaccgattacaccgaaatgaagaaggcgatcctgcatgtgtactgggaagagttccagaaggaccctgtgggcctgatgagccgggtggcccagcctgccagcaagaagatcgatcagaacaagctgaaacctgagatggacgagaagggcaacctgaccaccgccggctttgcctgctctcagtgtggccagcccctgttcgtgtacaagctggagcaggtgtctgagaagggcaaggcttacaccaactacttcggacggtgcaatgtggccgagcacgaaaagctgatcctgctggcccagctgaagcccgagaaggatagcgacgaagccgtgacatatagcctgggaaagtttgggcagagggccctggatttctacagcattcatgtgaccaaggagtccacccaccccgtgaagcccctggcccagatcgccggaaacagatacgcctccggacctgtgggaaaggccctgagcgacgcatgtatgggcacaatcgcctccttcctgtctaagtaccaggacatcatcatcgaacaccagaaggtggtgaagggcaaccagaagagactggagagcctgcgggagctggccggcaaggaaaacctggaataccctagcgtgaccctgccacctcagcctcacaccaaggagggcgttgatgcctacaacgaagtgatcgcccgggtgcgaatgtgggtgaacctgaacctgtggcagaagctgaagctaagcagagatgatgccaagcctctgctgagactgaagggattcccttcctttcctctggtcgagagacaggccaacgaagtggactggtgggacatggtgtgtaacgtgaagaagctgatcaacgagaaaaaggaggatggcaaggtgttttggcagaatctggctggctacaagagacaggaagccctgagaccatacctgagcagcgaggaagatcggaagaagggaaagaaattcgctcggtaccagctgggcgacctgctgctgcacctggaaaagaagcacggcgaggactggggaaaggtgtacgacgaggcctgggagcggattgacaagaaagtggaaggcctgagcaagcacatcaagctggaagaggaacggagaagcgaggacgcccagagcaaggccgccctgaccgactggctgcgggctaaggccagcttcgtgatcgagggcctgaaggaggccgacaaggacgagttctgcagatgcgagctgaagctgcagaagtggtacggggacctgcggggaaagcccttcgccatcgaagccgagaacagcatcctggacatcagcggcttcagcaagcagtacaactgtgccttcatctggcagaaggacggcgtgaagaagctgaacctgtacctgatcatcaactacttcaagggcggcaagctgcggttcaagaagatcaaacctgaagccttcgaagccaacagattctacaccgtgatcaacaaaaagagcggcgagatcgtgcccatggaggtgaacttcaacttcgacgaccccaacctgatcatcctgcctctggcctttggcaagagacagggcagagaattcatctggaacgacctgctgtccctggaaaccggcagcctgaagctggccaacggaagagtgatcgagaagacactgtacaacagaagaacccggcaggatgagcctgccctgttcgtggccctgaccttcgagcggcgggaggtcctggactcctccaatatcaaaccaatgaacctgatcggcgtggcaagaggcgaaaacatccccgccgtgatcgccctgaccgaccccgagggctgcccactgagccggtttaaggatagcctgggaaacccaacccacatcctgagaatcggcgagagctataaggagaagcagcggaccatccaggccaagaaggaggtggagcagcggagagccggcggctacagccggaagtacgccagcaaagccaagaatctggcagacgatatggtgagaaacaccgctagagatctgctgtactacgccgtgacccaggatgccatgctgatcttcgccaacctgagccggggcttcggccggcagggcaagcggaccttcatggccgagagacagtacacacggatggaggactggctgaccgccaagctggcctacgagggcctgagcaagacctacctgtccaagacactggcccagtacacctccaagacatgcagcaactgtgggtttaccatcaccagcgccgactacgacagggtgctggagaagctgaagaagacagcaacaggctggatgaccacaattaacggcaaggagctgaaggtggagggccagattacctactacaacagatacaagagacagaacgtagtcaaggacctgtccgtcgagctggatagactgagcgaagaatctgtgaacaacgacatctcctcctggacaaagggcagaagcggagaagctctgagcctcctgaagaaaagattctcccatagacccgtgcaggagaagttcgtgtgcctgaactgcggcttcgagacacacgcagccgagcaagccgccctgaacatcgccagatcctggctgttcctgcggagccaggagtacaagaaataccagacaaacaagacaaccggcaacaccgataagagagccttcgtcgagacctggcagtccttttaccggaagaagcttaaggaggtgtggaaacctgccgtgcggtctggcggatctggcggaggctccaccagccccaagaaaaagagaaaagtctaagctgccttctgcggggcttgccttctggccatgcccttcttctctcccttgcacctgtacctcttggtctttgaataaagcctgagtaggaaggctagcaaaaaaaaaaaaaaaaaaaaaaaaaaaaaaaaaaaaaaaaaaaaaaaaaaaaaaaaaaaaaaaaaaaaaaaaaaaaaaaa

SEQ ID NO: 12271 - RNA, 5785 nt, synthetic construct
  source 1..5785: mol_type = other RNA
aggaaataagagagaaaagaagagtaagaagaaatataagagccaccatggcccctaagaagaagcgtaaagtgagccggatggaacgcctcgtctacgaggtgcggcagaagtgcagaaacatcgaggacatctgcatctcctgcggatctctgaacgtgaccctggagcacccactgttcatcggcggcatgtgccagaactgtaaaaactgttttctggagtgtgcctatcaatacgacgatgacggctaccagagctactgcaccatctgttgcggcggaagagaggtgctgatgtgtggaaataacaactgctgccggtgcttctgcgtggaatgcgtggacctgctggtgggccccggcgccgcccaggccgctattaaggaagatccttggaactgctacatgtgcggccacaagggcacatacggcctgctgagacggagagaggactggcctagcagactgcagatgttcttcgccaataaccacgaccaggagttcgacccccctaaggtgtaccctcccgtccccgccgagaagagaaagcccatccgggtcctgagcctgttcgatggcatcgccaccggtctgctggtgctgaaggacctgggcatccaggtggataggtacattgcctccgaggtgtgcgaggactccatcaccgtgggaatggtgcgtcatcagggcaagatcatgtacgtgggcgacgtgcggagcgtgacacagaagcatatccaggagtggggccctttcgacctggtgatcggcggcagcccttgcaatgacctgagcatcgtgaacccagcccggaagggcctgtacgagggaaccggcagactgttcttcgagttttacagactgctgcacgacgcccggcctaaggaaggcgacgaccggcccttcttttggctgttcgagaatgtggtggccatgggagtcagcgacaagcgggatattagccggttcctggagagcaaccccgtgatgatcgatgccaaggaagtgagcgccgcccaccgggccagatacttctggggcaatctgcctggcatgaacagacccctggccagcaccgtgaacgacaagctggagctgcaggagtgcctggagcacggccggatcgccaagttcagcaaggtgagaaccatcaccacccgaagcaacagcatcaaacaaggcaaggaccagcactttcctgtgttcatgaacgagaaggaggacatcctgtggtgtaccgagatggagagagtgttcgggttcccagtccactacacagatgtcagcaacatgtctagactggccagacagagactgctgggaagaagctggtccgtccctgtgatcagacacctgttcgcccctctgaaggagtacttcgcctgcgtgagcagcggcaacagcaacgccaacagccggggccccagcttctctagcggcctggtgccactgtccctgagagggagccacatgggccccatggagatctacaaaaccgtgagcgcctggaagcggcagcctgtgcgcgtgctgagcctgtttcggaatatcgataaagtcctgaaaagcctgggattcctggagagcggctctggctccggcggtggcaccctgaagtacgtggaggatgtgacaaacgtggtcagacgggatgtggagaagtggggccccttcgatctggtgtacggcagcacccaacccctgggcagctcttgtgaccggtgccctggctggtacatgtttcagttccaccggatcctgcagtacgccctgccgagacaggagtcccagcggccattcttttggattttcatggacaacttgctgctgaccgaggatgaccaggaaactaccactcggttcctgcagaccgaagccgtgaccctgcaggacgtgagaggccgggactaccagaacgccatgcgggtgtggtccaacatccctggactgaaaagcaagcacgcacctctgacccctaaagaagaggagtacctgcaggcccaggtgcggagcagaagcaagctggacgcccctaaggtggatctgctggtgaagaattgcctcctgcccctgagagagtacttcaagtatttcagccagaatagtctgcccctgggaggcagcggcggcggcgcccacggcagcgtgatgttcaacgacgtgagcatcgtgttcagccaggaggagtgggagtacctggacctggagcagagggacctgtacagggacgtgatgctggagaactacagcaacctggtgagcctgggctgcttcatcagcaagcccgacgtgatcagcctgctggagcagggcaaggagccctggaaggtggtgaggaagggcaggaggaggtaccccgacctggagaccaggtacggcggcccaagcagcggcgcccctcctcccagcggcggcagcccagccggctccccaacctctaccgaggagggcacctctgagtccgccacccccgagagcggccctggcacctccaccgagcccagcgagggcagcgcacccggcagccctgccggcagccccacctccacagaggagggaaccagcaccgagcccagcgaaggcagcgccccaggcaccagcaccgagcctagtgagcaggagattaaacggatcaacaagatcagaagaagacttgtgaaagacagcaacaccaagaaggccggcaagacaggccccatgaaaaccctgctggttagagtgatgacacccgatctgagagagcggctggaaaacctgagaaagaagcctgaaaatatcccccagcccatcagcaatacatctagagccaacctgaataagctgctgaccgattacaccgaaatgaagaaggcgatcctgcatgtgtactgggaagagttccagaaggaccctgtgggcctgatgagccgggtggcccagcctgccagcaagaagatcgatcagaacaagctgaaacctgagatggacgagaagggcaacctgaccaccgccggctttgcctgctctcagtgtggccagcccctgttcgtgtacaagctggagcaggtgtctgagaagggcaaggcttacaccaactacttcggacggtgcaatgtggccgagcacgaaaagctgatcctgctggcccagctgaagcccgagaaggatagcgacgaagccgtgacatatagcctgggaaagtttgggcagagggccctggatttctacagcattcatgtgaccaaggagtccacccaccccgtgaagcccctggcccagatcgccggaaacagatacgcctccggacctgtgggaaaggccctgagcgacgcatgtatgggcacaatcgcctccttcctgtctaagtaccaggacatcatcatcgaacaccagaaggtggtgaagggcaaccagaagagactggagagcctgcgggagctggccggcaaggaaaacctggaataccctagcgtgaccctgccacctcagcctcacaccaaggagggcgttgatgcctacaacgaagtgatcgcccgggtgcgaatgtgggtgaacctgaacctgtggcagaagctgaagctaagcagagatgatgccaagcctctgctgagactgaagggattcccttcctttcctctggtcgagagacaggccaacgaagtggactggtgggacatggtgtgtaacgtgaagaagctgatcaacgagaaaaaggaggatggcaaggtgttttggcagaatctggctggctacaagagacaggaagccctgagaccatacctgagcagcgaggaagatcggaagaagggaaagaaattcgctcggtaccagctgggcgacctgctgctgcacctggaaaagaagcacggcgaggactggggaaaggtgtacgacgaggcctgggagcggattgacaagaaagtggaaggcctgagcaagcacatcaagctggaagaggaacggagaagcgaggacgcccagagcaaggccgccctgaccgactggctgcgggctaaggccagcttcgtgatcgagggcctgaaggaggccgacaaggacgagttctgcagatgcgagctgaagctgcagaagtggtacggggacctgcggggaaagcccttcgccatcgaagccgagaacagcatcctggacatcagcggcttcagcaagcagtacaactgtgccttcatctggcagaaggacggcgtgaagaagctgaacctgtacctgatcatcaactacttcaagggcggcaagctgcggttcaagaagatcaaacctgaagccttcgaagccaacagattctacaccgtgatcaacaaaaagagcggcgagatcgtgcccatggaggtgaacttcaacttcgacgaccccaacctgatcatcctgcctctggcctttggcaagagacagggcagagaattcatctggaacgacctgctgtccctggaaaccggcagcctgaagctggccaacggaagagtgatcgagaagacactgtacaacagaagaacccggcaggatgagcctgccctgttcgtggccctgaccttcgagcggcgggaggtcctggactcctccaatatcaaaccaatgaacctgatcggcgtggcaagaggcgaaaacatccccgccgtgatcgccctgaccgaccccgagggctgcccactgagccggtttaaggatagcctgggaaacccaacccacatcctgagaatcggcgagagctataaggagaagcagcggaccatccaggccaagaaggaggtggagcagcggagagccggcggctacagccggaagtacgccagcaaagccaagaatctggcagacgatatggtgagaaacaccgctagagatctgctgtactacgccgtgacccaggatgccatgctgatcttcgccaacctgagccggggcttcggccggcagggcaagcggaccttcatggccgagagacagtacacacggatggaggactggctgaccgccaagctggcctacgagggcctgagcaagacctacctgtccaagacactggcccagtacacctccaagacatgcagcaactgtgggtttaccatcaccagcgccgactacgacagggtgctggagaagctgaagaagacagcaacaggctggatgaccacaattaacggcaaggagctgaaggtggagggccagattacctactacaacagatacaagagacagaacgtagtcaaggacctgtccgtcgagctggatagactgagcgaagaatctgtgaacaacgacatctcctcctggacaaagggcagaagcggagaagctctgagcctcctgaagaaaagattctcccatagacccgtgcaggagaagttcgtgtgcctgaactgcggcttcgagacacacgcagccgagcaagccgccctgaacatcgccagatcctggctgttcctgcggagccaggagtacaagaaataccagacaaacaagacaaccggcaacaccgataagagagccttcgtcgagacctggcagtccttttaccggaagaagcttaaggaggtgtggaaacctgccgtgcggtctggcggatctggcggaggctccaccagccccaagaaaaagagaaaagtctaagctgccttctgcggggcttgccttctggccatgcccttcttctctcccttgcacctgtacctcttggtctttgaataaagcctgagtaggaaggctagcaaaaaaaaaaaaaaaaaaaaaaaaaaaaaaaaaaaaaaaaaaaaaaaaaaaaaaaaaaaaaaaaaaaaaaaaaaaaaaaa

SEQ ID NO: 12272 - RNA, 5785 nt, synthetic construct
  source 1..5785: mol_type = other RNA
aggaaataagagagaaaagaagagtaagaagaaatataagagccaccatggcccctaagaagaagcgtaaagtgagccggatggaacgcctcgtctacgaggtgcggcagaagtgcagaaacatcgaggacatctgcatctcctgcggatctctgaacgtgaccctggagcacccactgttcatcggcggcatgtgccagaactgtaaaaactgttttctggagtgtgcctatcaatacgacgatgacggctaccagagctactgcaccatctgttgcggcggaagagaggtgctgatgtgtggaaataacaactgctgccggtgcttctgcgtggaatgcgtggacctgctggtgggccccggcgccgcccaggccgctattaaggaagatccttggaactgctacatgtgcggccacaagggcacatacggcctgctgagacggagagaggactggcctagcagactgcagatgttcttcgccaataaccacgaccaggagttcgacccccctaaggtgtaccctcccgtccccgccgagaagagaaagcccatccgggtcctgagcctgttcgatggcatcgccaccggtctgctggtgctgaaggacctgggcatccaggtggataggtacattgcctccgaggtgtgcgaggactccatcaccgtgggaatggtgcgtcatcagggcaagatcatgtacgtgggcgacgtgcggagcgtgacacagaagcatatccaggagtggggccctttcgacctggtgatcggcggcagcccttgcaatgacctgagcatcgtgaacccagcccggaagggcctgtacgagggaaccggcagactgttcttcgagttttacagactgctgcacgacgcccggcctaaggaaggcgacgaccggcccttcttttggctgttcgagaatgtggtggccatgggagtcagcgacaagcgggatattagccggttcctggagagcaaccccgtgatgatcgatgccaaggaagtgagcgccgcccaccgggccagatacttctggggcaatctgcctggcatgaacagacccctggccagcaccgtgaacgacaagctggagctgcaggagtgcctggagcacggccggatcgccaagttcagcaaggtgagaaccatcaccacccgaagcaacagcatcaaacaaggcaaggaccagcactttcctgtgttcatgaacgagaaggaggacatcctgtggtgtaccgagatggagagagtgttcgggttcccagtccactacacagatgtcagcaacatgtctagactggccagacagagactgctgggaagaagctggtccgtccctgtgatcagacacctgttcgcccctctgaaggagtacttcgcctgcgtgagcagcggcaacagcaacgccaacagccggggccccagcttctctagcggcctggtgccactgtccctgagagggagccacatgggccccatggagatctacaaaaccgtgagcgcctggaagcggcagcctgtgcgcgtgctgagcctgtttcggaatatcgataaagtcctgaaaagcctgggattcctggagagcggctctggctccggcggtggcaccctgaagtacgtggaggatgtgacaaacgtggtcagacgggatgtggagaagtggggccccttcgatctggtgtacggcagcacccaacccctgggcagctcttgtgaccggtgccctggctggtacatgtttcagttccaccggatcctgcagtacgccctgccgagacaggagtcccagcggccattcttttggattttcatggacaacttgctgctgaccgaggatgaccaggaaactaccactcggttcctgcagaccgaagccgtgaccctgcaggacgtgagaggccgggactaccagaacgccatgcgggtgtggtccaacatccctggactgaaaagcaagcacgcacctctgacccctaaagaagaggagtacctgcaggcccaggtgcggagcagaagcaagctggacgcccctaaggtggatctgctggtgaagaattgcctcctgcccctgagagagtacttcaagtatttcagccagaatagtctgcccctgggaggcagcggcggcggcgcccaccacctggtgatgttcagggacgtggccgtggacttcagccaggaggagtgggagtgcctgaacccctaccagaggaacctgtacagggacgtgatcctggagaactacagcaacctggtgagcgtggccggctgcagcatcagcaagcccgacgtgatcaccctgctggagcagggcaaggagccctggatggtggtgagggacgagaggaggaggagcctggacctggagagcaggggcggcccaagcagcggcgcccctcctcccagcggcggcagcccagccggctccccaacctctaccgaggagggcacctctgagtccgccacccccgagagcggccctggcacctccaccgagcccagcgagggcagcgcacccggcagccctgccggcagccccacctccacagaggagggaaccagcaccgagcccagcgaaggcagcgccccaggcaccagcaccgagcctagtgagcaggagattaaacggatcaacaagatcagaagaagacttgtgaaagacagcaacaccaagaaggccggcaagacaggccccatgaaaaccctgctggttagagtgatgacacccgatctgagagagcggctggaaaacctgagaaagaagcctgaaaatatcccccagcccatcagcaatacatctagagccaacctgaataagctgctgaccgattacaccgaaatgaagaaggcgatcctgcatgtgtactgggaagagttccagaaggaccctgtgggcctgatgagccgggtggcccagcctgccagcaagaagatcgatcagaacaagctgaaacctgagatggacgagaagggcaacctgaccaccgccggctttgcctgctctcagtgtggccagcccctgttcgtgtacaagctggagcaggtgtctgagaagggcaaggcttacaccaactacttcggacggtgcaatgtggccgagcacgaaaagctgatcctgctggcccagctgaagcccgagaaggatagcgacgaagccgtgacatatagcctgggaaagtttgggcagagggccctggatttctacagcattcatgtgaccaaggagtccacccaccccgtgaagcccctggcccagatcgccggaaacagatacgcctccggacctgtgggaaaggccctgagcgacgcatgtatgggcacaatcgcctccttcctgtctaagtaccaggacatcatcatcgaacaccagaaggtggtgaagggcaaccagaagagactggagagcctgcgggagctggccggcaaggaaaacctggaataccctagcgtgaccctgccacctcagcctcacaccaaggagggcgttgatgcctacaacgaagtgatcgcccgggtgcgaatgtgggtgaacctgaacctgtggcagaagctgaagctaagcagagatgatgccaagcctctgctgagactgaagggattcccttcctttcctctggtcgagagacaggccaacgaagtggactggtgggacatggtgtgtaacgtgaagaagctgatcaacgagaaaaaggaggatggcaaggtgttttggcagaatctggctggctacaagagacaggaagccctgagaccatacctgagcagcgaggaagatcggaagaagggaaagaaattcgctcggtaccagctgggcgacctgctgctgcacctggaaaagaagcacggcgaggactggggaaaggtgtacgacgaggcctgggagcggattgacaagaaagtggaaggcctgagcaagcacatcaagctggaagaggaacggagaagcgaggacgcccagagcaaggccgccctgaccgactggctgcgggctaaggccagcttcgtgatcgagggcctgaaggaggccgacaaggacgagttctgcagatgcgagctgaagctgcagaagtggtacggggacctgcggggaaagcccttcgccatcgaagccgagaacagcatcctggacatcagcggcttcagcaagcagtacaactgtgccttcatctggcagaaggacggcgtgaagaagctgaacctgtacctgatcatcaactacttcaagggcggcaagctgcggttcaagaagatcaaacctgaagccttcgaagccaacagattctacaccgtgatcaacaaaaagagcggcgagatcgtgcccatggaggtgaacttcaacttcgacgaccccaacctgatcatcctgcctctggcctttggcaagagacagggcagagaattcatctggaacgacctgctgtccctggaaaccggcagcctgaagctggccaacggaagagtgatcgagaagacactgtacaacagaagaacccggcaggatgagcctgccctgttcgtggccctgaccttcgagcggcgggaggtcctggactcctccaatatcaaaccaatgaacctgatcggcgtggcaagaggcgaaaacatccccgccgtgatcgccctgaccgaccccgagggctgcccactgagccggtttaaggatagcctgggaaacccaacccacatcctgagaatcggcgagagctataaggagaagcagcggaccatccaggccaagaaggaggtggagcagcggagagccggcggctacagccggaagtacgccagcaaagccaagaatctggcagacgatatggtgagaaacaccgctagagatctgctgtactacgccgtgacccaggatgccatgctgatcttcgccaacctgagccggggcttcggccggcagggcaagcggaccttcatggccgagagacagtacacacggatggaggactggctgaccgccaagctggcctacgagggcctgagcaagacctacctgtccaagacactggcccagtacacctccaagacatgcagcaactgtgggtttaccatcaccagcgccgactacgacagggtgctggagaagctgaagaagacagcaacaggctggatgaccacaattaacggcaaggagctgaaggtggagggccagattacctactacaacagatacaagagacagaacgtagtcaaggacctgtccgtcgagctggatagactgagcgaagaatctgtgaacaacgacatctcctcctggacaaagggcagaagcggagaagctctgagcctcctgaagaaaagattctcccatagacccgtgcaggagaagttcgtgtgcctgaactgcggcttcgagacacacgcagccgagcaagccgccctgaacatcgccagatcctggctgttcctgcggagccaggagtacaagaaataccagacaaacaagacaaccggcaacaccgataagagagccttcgtcgagacctggcagtccttttaccggaagaagcttaaggaggtgtggaaacctgccgtgcggtctggcggatctggcggaggctccaccagccccaagaaaaagagaaaagtctaagctgccttctgcggggcttgccttctggccatgcccttcttctctcccttgcacctgtacctcttggtctttgaataaagcctgagtaggaaggctagcaaaaaaaaaaaaaaaaaaaaaaaaaaaaaaaaaaaaaaaaaaaaaaaaaaaaaaaaaaaaaaaaaaaaaaaaaaaaaaaa

SEQ ID NO: 12273 - RNA, 5785 nt, synthetic construct
  source 1..5785: mol_type = other RNA
aggaaataagagagaaaagaagagtaagaagaaatataagagccaccatggcccctaagaagaagcgtaaagtgagccggatggaacgcctcgtctacgaggtgcggcagaagtgcagaaacatcgaggacatctgcatctcctgcggatctctgaacgtgaccctggagcacccactgttcatcggcggcatgtgccagaactgtaaaaactgttttctggagtgtgcctatcaatacgacgatgacggctaccagagctactgcaccatctgttgcggcggaagagaggtgctgatgtgtggaaataacaactgctgccggtgcttctgcgtggaatgcgtggacctgctggtgggccccggcgccgcccaggccgctattaaggaagatccttggaactgctacatgtgcggccacaagggcacatacggcctgctgagacggagagaggactggcctagcagactgcagatgttcttcgccaataaccacgaccaggagttcgacccccctaaggtgtaccctcccgtccccgccgagaagagaaagcccatccgggtcctgagcctgttcgatggcatcgccaccggtctgctggtgctgaaggacctgggcatccaggtggataggtacattgcctccgaggtgtgcgaggactccatcaccgtgggaatggtgcgtcatcagggcaagatcatgtacgtgggcgacgtgcggagcgtgacacagaagcatatccaggagtggggccctttcgacctggtgatcggcggcagcccttgcaatgacctgagcatcgtgaacccagcccggaagggcctgtacgagggaaccggcagactgttcttcgagttttacagactgctgcacgacgcccggcctaaggaaggcgacgaccggcccttcttttggctgttcgagaatgtggtggccatgggagtcagcgacaagcgggatattagccggttcctggagagcaaccccgtgatgatcgatgccaaggaagtgagcgccgcccaccgggccagatacttctggggcaatctgcctggcatgaacagacccctggccagcaccgtgaacgacaagctggagctgcaggagtgcctggagcacggccggatcgccaagttcagcaaggtgagaaccatcaccacccgaagcaacagcatcaaacaaggcaaggaccagcactttcctgtgttcatgaacgagaaggaggacatcctgtggtgtaccgagatggagagagtgttcgggttcccagtccactacacagatgtcagcaacatgtctagactggccagacagagactgctgggaagaagctggtccgtccctgtgatcagacacctgttcgcccctctgaaggagtacttcgcctgcgtgagcagcggcaacagcaacgccaacagccggggccccagcttctctagcggcctggtgccactgtccctgagagggagccacatgggccccatggagatctacaaaaccgtgagcgcctggaagcggcagcctgtgcgcgtgctgagcctgtttcggaatatcgataaagtcctgaaaagcctgggattcctggagagcggctctggctccggcggtggcaccctgaagtacgtggaggatgtgacaaacgtggtcagacgggatgtggagaagtggggccccttcgatctggtgtacggcagcacccaacccctgggcagctcttgtgaccggtgccctggctggtacatgtttcagttccaccggatcctgcagtacgccctgccgagacaggagtcccagcggccattcttttggattttcatggacaacttgctgctgaccgaggatgaccaggaaactaccactcggttcctgcagaccgaagccgtgaccctgcaggacgtgagaggccgggactaccagaacgccatgcgggtgtggtccaacatccctggactgaaaagcaagcacgcacctctgacccctaaagaagaggagtacctgcaggcccaggtgcggagcagaagcaagctggacgcccctaaggtggatctgctggtgaagaattgcctcctgcccctgagagagtacttcaagtatttcagccagaatagtctgcccctgggaggcagcggcggcggcgcccacggcagcgtgatgttcagcgacgtgagcatcgacttcagccaggaggagtgggactacctggacctggagcagagggacctgtacagggacgtgatgctggagaactacagcaacctggtgagcctgggctgcttcgtgagcaagcccgacgtgatcagcctgctggagcagggcaaggagccctggaaggtggtgaggaagggcaggaggaggtaccccgacctggagaccaactacggcggcccaagcagcggcgcccctcctcccagcggcggcagcccagccggctccccaacctctaccgaggagggcacctctgagtccgccacccccgagagcggccctggcacctccaccgagcccagcgagggcagcgcacccggcagccctgccggcagccccacctccacagaggagggaaccagcaccgagcccagcgaaggcagcgccccaggcaccagcaccgagcctagtgagcaggagattaaacggatcaacaagatcagaagaagacttgtgaaagacagcaacaccaagaaggccggcaagacaggccccatgaaaaccctgctggttagagtgatgacacccgatctgagagagcggctggaaaacctgagaaagaagcctgaaaatatcccccagcccatcagcaatacatctagagccaacctgaataagctgctgaccgattacaccgaaatgaagaaggcgatcctgcatgtgtactgggaagagttccagaaggaccctgtgggcctgatgagccgggtggcccagcctgccagcaagaagatcgatcagaacaagctgaaacctgagatggacgagaagggcaacctgaccaccgccggctttgcctgctctcagtgtggccagcccctgttcgtgtacaagctggagcaggtgtctgagaagggcaaggcttacaccaactacttcggacggtgcaatgtggccgagcacgaaaagctgatcctgctggcccagctgaagcccgagaaggatagcgacgaagccgtgacatatagcctgggaaagtttgggcagagggccctggatttctacagcattcatgtgaccaaggagtccacccaccccgtgaagcccctggcccagatcgccggaaacagatacgcctccggacctgtgggaaaggccctgagcgacgcatgtatgggcacaatcgcctccttcctgtctaagtaccaggacatcatcatcgaacaccagaaggtggtgaagggcaaccagaagagactggagagcctgcgggagctggccggcaaggaaaacctggaataccctagcgtgaccctgccacctcagcctcacaccaaggagggcgttgatgcctacaacgaagtgatcgcccgggtgcgaatgtgggtgaacctgaacctgtggcagaagctgaagctaagcagagatgatgccaagcctctgctgagactgaagggattcccttcctttcctctggtcgagagacaggccaacgaagtggactggtgggacatggtgtgtaacgtgaagaagctgatcaacgagaaaaaggaggatggcaaggtgttttggcagaatctggctggctacaagagacaggaagccctgagaccatacctgagcagcgaggaagatcggaagaagggaaagaaattcgctcggtaccagctgggcgacctgctgctgcacctggaaaagaagcacggcgaggactggggaaaggtgtacgacgaggcctgggagcggattgacaagaaagtggaaggcctgagcaagcacatcaagctggaagaggaacggagaagcgaggacgcccagagcaaggccgccctgaccgactggctgcgggctaaggccagcttcgtgatcgagggcctgaaggaggccgacaaggacgagttctgcagatgcgagctgaagctgcagaagtggtacggggacctgcggggaaagcccttcgccatcgaagccgagaacagcatcctggacatcagcggcttcagcaagcagtacaactgtgccttcatctggcagaaggacggcgtgaagaagctgaacctgtacctgatcatcaactacttcaagggcggcaagctgcggttcaagaagatcaaacctgaagccttcgaagccaacagattctacaccgtgatcaacaaaaagagcggcgagatcgtgcccatggaggtgaacttcaacttcgacgaccccaacctgatcatcctgcctctggcctttggcaagagacagggcagagaattcatctggaacgacctgctgtccctggaaaccggcagcctgaagctggccaacggaagagtgatcgagaagacactgtacaacagaagaacccggcaggatgagcctgccctgttcgtggccctgaccttcgagcggcgggaggtcctggactcctccaatatcaaaccaatgaacctgatcggcgtggcaagaggcgaaaacatccccgccgtgatcgccctgaccgaccccgagggctgcccactgagccggtttaaggatagcctgggaaacccaacccacatcctgagaatcggcgagagctataaggagaagcagcggaccatccaggccaagaaggaggtggagcagcggagagccggcggctacagccggaagtacgccagcaaagccaagaatctggcagacgatatggtgagaaacaccgctagagatctgctgtactacgccgtgacccaggatgccatgctgatcttcgccaacctgagccggggcttcggccggcagggcaagcggaccttcatggccgagagacagtacacacggatggaggactggctgaccgccaagctggcctacgagggcctgagcaagacctacctgtccaagacactggcccagtacacctccaagacatgcagcaactgtgggtttaccatcaccagcgccgactacgacagggtgctggagaagctgaagaagacagcaacaggctggatgaccacaattaacggcaaggagctgaaggtggagggccagattacctactacaacagatacaagagacagaacgtagtcaaggacctgtccgtcgagctggatagactgagcgaagaatctgtgaacaacgacatctcctcctggacaaagggcagaagcggagaagctctgagcctcctgaagaaaagattctcccatagacccgtgcaggagaagttcgtgtgcctgaactgcggcttcgagacacacgcagccgagcaagccgccctgaacatcgccagatcctggctgttcctgcggagccaggagtacaagaaataccagacaaacaagacaaccggcaacaccgataagagagccttcgtcgagacctggcagtccttttaccggaagaagcttaaggaggtgtggaaacctgccgtgcggtctggcggatctggcggaggctccaccagccccaagaaaaagagaaaagtctaagctgccttctgcggggcttgccttctggccatgcccttcttctctcccttgcacctgtacctcttggtctttgaataaagcctgagtaggaaggctagcaaaaaaaaaaaaaaaaaaaaaaaaaaaaaaaaaaaaaaaaaaaaaaaaaaaaaaaaaaaaaaaaaaaaaaaaaaaaaaaa

SEQ ID NO: 12274 - RNA, 5785 nt, synthetic construct
  source 1..5785: mol_type = other RNA
aggaaataagagagaaaagaagagtaagaagaaatataagagccaccatggcccctaagaagaagcgtaaagtgagccggatggaacgcctcgtctacgaggtgcggcagaagtgcagaaacatcgaggacatctgcatctcctgcggatctctgaacgtgaccctggagcacccactgttcatcggcggcatgtgccagaactgtaaaaactgttttctggagtgtgcctatcaatacgacgatgacggctaccagagctactgcaccatctgttgcggcggaagagaggtgctgatgtgtggaaataacaactgctgccggtgcttctgcgtggaatgcgtggacctgctggtgggccccggcgccgcccaggccgctattaaggaagatccttggaactgctacatgtgcggccacaagggcacatacggcctgctgagacggagagaggactggcctagcagactgcagatgttcttcgccaataaccacgaccaggagttcgacccccctaaggtgtaccctcccgtccccgccgagaagagaaagcccatccgggtcctgagcctgttcgatggcatcgccaccggtctgctggtgctgaaggacctgggcatccaggtggataggtacattgcctccgaggtgtgcgaggactccatcaccgtgggaatggtgcgtcatcagggcaagatcatgtacgtgggcgacgtgcggagcgtgacacagaagcatatccaggagtggggccctttcgacctggtgatcggcggcagcccttgcaatgacctgagcatcgtgaacccagcccggaagggcctgtacgagggaaccggcagactgttcttcgagttttacagactgctgcacgacgcccggcctaaggaaggcgacgaccggcccttcttttggctgttcgagaatgtggtggccatgggagtcagcgacaagcgggatattagccggttcctggagagcaaccccgtgatgatcgatgccaaggaagtgagcgccgcccaccgggccagatacttctggggcaatctgcctggcatgaacagacccctggccagcaccgtgaacgacaagctggagctgcaggagtgcctggagcacggccggatcgccaagttcagcaaggtgagaaccatcaccacccgaagcaacagcatcaaacaaggcaaggaccagcactttcctgtgttcatgaacgagaaggaggacatcctgtggtgtaccgagatggagagagtgttcgggttcccagtccactacacagatgtcagcaacatgtctagactggccagacagagactgctgggaagaagctggtccgtccctgtgatcagacacctgttcgcccctctgaaggagtacttcgcctgcgtgagcagcggcaacagcaacgccaacagccggggccccagcttctctagcggcctggtgccactgtccctgagagggagccacatgggccccatggagatctacaaaaccgtgagcgcctggaagcggcagcctgtgcgcgtgctgagcctgtttcggaatatcgataaagtcctgaaaagcctgggattcctggagagcggctctggctccggcggtggcaccctgaagtacgtggaggatgtgacaaacgtggtcagacgggatgtggagaagtggggccccttcgatctggtgtacggcagcacccaacccctgggcagctcttgtgaccggtgccctggctggtacatgtttcagttccaccggatcctgcagtacgccctgccgagacaggagtcccagcggccattcttttggattttcatggacaacttgctgctgaccgaggatgaccaggaaactaccactcggttcctgcagaccgaagccgtgaccctgcaggacgtgagaggccgggactaccagaacgccatgcgggtgtggtccaacatccctggactgaaaagcaagcacgcacctctgacccctaaagaagaggagtacctgcaggcccaggtgcggagcagaagcaagctggacgcccctaaggtggatctgctggtgaagaattgcctcctgcccctgagagagtacttcaagtatttcagccagaatagtctgcccctgggaggcagcggcggcggcttccaggtgagcgtgaccttccaggacgtggccgtggacttcagcagggacgagtggaagaggctggacgacgcccagaaggccctgtacagggacgtgatgctggagaactacgagaacctggtgagcctgggcctgcccgtgagcaagctggacgtgatcagcctgctggagaggagggaggcccccaggagggccaaggagagggtgcccagggacctgccccccgacagcatcagccagggcggcccaagcagcggcgcccctcctcccagcggcggcagcccagccggctccccaacctctaccgaggagggcacctctgagtccgccacccccgagagcggccctggcacctccaccgagcccagcgagggcagcgcacccggcagccctgccggcagccccacctccacagaggagggaaccagcaccgagcccagcgaaggcagcgccccaggcaccagcaccgagcctagtgagcaggagattaaacggatcaacaagatcagaagaagacttgtgaaagacagcaacaccaagaaggccggcaagacaggccccatgaaaaccctgctggttagagtgatgacacccgatctgagagagcggctggaaaacctgagaaagaagcctgaaaatatcccccagcccatcagcaatacatctagagccaacctgaataagctgctgaccgattacaccgaaatgaagaaggcgatcctgcatgtgtactgggaagagttccagaaggaccctgtgggcctgatgagccgggtggcccagcctgccagcaagaagatcgatcagaacaagctgaaacctgagatggacgagaagggcaacctgaccaccgccggctttgcctgctctcagtgtggccagcccctgttcgtgtacaagctggagcaggtgtctgagaagggcaaggcttacaccaactacttcggacggtgcaatgtggccgagcacgaaaagctgatcctgctggcccagctgaagcccgagaaggatagcgacgaagccgtgacatatagcctgggaaagtttgggcagagggccctggatttctacagcattcatgtgaccaaggagtccacccaccccgtgaagcccctggcccagatcgccggaaacagatacgcctccggacctgtgggaaaggccctgagcgacgcatgtatgggcacaatcgcctccttcctgtctaagtaccaggacatcatcatcgaacaccagaaggtggtgaagggcaaccagaagagactggagagcctgcgggagctggccggcaaggaaaacctggaataccctagcgtgaccctgccacctcagcctcacaccaaggagggcgttgatgcctacaacgaagtgatcgcccgggtgcgaatgtgggtgaacctgaacctgtggcagaagctgaagctaagcagagatgatgccaagcctctgctgagactgaagggattcccttcctttcctctggtcgagagacaggccaacgaagtggactggtgggacatggtgtgtaacgtgaagaagctgatcaacgagaaaaaggaggatggcaaggtgttttggcagaatctggctggctacaagagacaggaagccctgagaccatacctgagcagcgaggaagatcggaagaagggaaagaaattcgctcggtaccagctgggcgacctgctgctgcacctggaaaagaagcacggcgaggactggggaaaggtgtacgacgaggcctgggagcggattgacaagaaagtggaaggcctgagcaagcacatcaagctggaagaggaacggagaagcgaggacgcccagagcaaggccgccctgaccgactggctgcgggctaaggccagcttcgtgatcgagggcctgaaggaggccgacaaggacgagttctgcagatgcgagctgaagctgcagaagtggtacggggacctgcggggaaagcccttcgccatcgaagccgagaacagcatcctggacatcagcggcttcagcaagcagtacaactgtgccttcatctggcagaaggacggcgtgaagaagctgaacctgtacctgatcatcaactacttcaagggcggcaagctgcggttcaagaagatcaaacctgaagccttcgaagccaacagattctacaccgtgatcaacaaaaagagcggcgagatcgtgcccatggaggtgaacttcaacttcgacgaccccaacctgatcatcctgcctctggcctttggcaagagacagggcagagaattcatctggaacgacctgctgtccctggaaaccggcagcctgaagctggccaacggaagagtgatcgagaagacactgtacaacagaagaacccggcaggatgagcctgccctgttcgtggccctgaccttcgagcggcgggaggtcctggactcctccaatatcaaaccaatgaacctgatcggcgtggcaagaggcgaaaacatccccgccgtgatcgccctgaccgaccccgagggctgcccactgagccggtttaaggatagcctgggaaacccaacccacatcctgagaatcggcgagagctataaggagaagcagcggaccatccaggccaagaaggaggtggagcagcggagagccggcggctacagccggaagtacgccagcaaagccaagaatctggcagacgatatggtgagaaacaccgctagagatctgctgtactacgccgtgacccaggatgccatgctgatcttcgccaacctgagccggggcttcggccggcagggcaagcggaccttcatggccgagagacagtacacacggatggaggactggctgaccgccaagctggcctacgagggcctgagcaagacctacctgtccaagacactggcccagtacacctccaagacatgcagcaactgtgggtttaccatcaccagcgccgactacgacagggtgctggagaagctgaagaagacagcaacaggctggatgaccacaattaacggcaaggagctgaaggtggagggccagattacctactacaacagatacaagagacagaacgtagtcaaggacctgtccgtcgagctggatagactgagcgaagaatctgtgaacaacgacatctcctcctggacaaagggcagaagcggagaagctctgagcctcctgaagaaaagattctcccatagacccgtgcaggagaagttcgtgtgcctgaactgcggcttcgagacacacgcagccgagcaagccgccctgaacatcgccagatcctggctgttcctgcggagccaggagtacaagaaataccagacaaacaagacaaccggcaacaccgataagagagccttcgtcgagacctggcagtccttttaccggaagaagcttaaggaggtgtggaaacctgccgtgcggtctggcggatctggcggaggctccaccagccccaagaaaaagagaaaagtctaagctgccttctgcggggcttgccttctggccatgcccttcttctctcccttgcacctgtacctcttggtctttgaataaagcctgagtaggaaggctagcaaaaaaaaaaaaaaaaaaaaaaaaaaaaaaaaaaaaaaaaaaaaaaaaaaaaaaaaaaaaaaaaaaaaaaaaaaaaaaaa

SEQ ID NO: 12275 - RNA, 5785 nt, synthetic construct
  source 1..5785: mol_type = other RNA
aggaaataagagagaaaagaagagtaagaagaaatataagagccaccatggcccctaagaagaagcgtaaagtgagccggatggaacgcctcgtctacgaggtgcggcagaagtgcagaaacatcgaggacatctgcatctcctgcggatctctgaacgtgaccctggagcacccactgttcatcggcggcatgtgccagaactgtaaaaactgttttctggagtgtgcctatcaatacgacgatgacggctaccagagctactgcaccatctgttgcggcggaagagaggtgctgatgtgtggaaataacaactgctgccggtgcttctgcgtggaatgcgtggacctgctggtgggccccggcgccgcccaggccgctattaaggaagatccttggaactgctacatgtgcggccacaagggcacatacggcctgctgagacggagagaggactggcctagcagactgcagatgttcttcgccaataaccacgaccaggagttcgacccccctaaggtgtaccctcccgtccccgccgagaagagaaagcccatccgggtcctgagcctgttcgatggcatcgccaccggtctgctggtgctgaaggacctgggcatccaggtggataggtacattgcctccgaggtgtgcgaggactccatcaccgtgggaatggtgcgtcatcagggcaagatcatgtacgtgggcgacgtgcggagcgtgacacagaagcatatccaggagtggggccctttcgacctggtgatcggcggcagcccttgcaatgacctgagcatcgtgaacccagcccggaagggcctgtacgagggaaccggcagactgttcttcgagttttacagactgctgcacgacgcccggcctaaggaaggcgacgaccggcccttcttttggctgttcgagaatgtggtggccatgggagtcagcgacaagcgggatattagccggttcctggagagcaaccccgtgatgatcgatgccaaggaagtgagcgccgcccaccgggccagatacttctggggcaatctgcctggcatgaacagacccctggccagcaccgtgaacgacaagctggagctgcaggagtgcctggagcacggccggatcgccaagttcagcaaggtgagaaccatcaccacccgaagcaacagcatcaaacaaggcaaggaccagcactttcctgtgttcatgaacgagaaggaggacatcctgtggtgtaccgagatggagagagtgttcgggttcccagtccactacacagatgtcagcaacatgtctagactggccagacagagactgctgggaagaagctggtccgtccctgtgatcagacacctgttcgcccctctgaaggagtacttcgcctgcgtgagcagcggcaacagcaacgccaacagccggggccccagcttctctagcggcctggtgccactgtccctgagagggagccacatgggccccatggagatctacaaaaccgtgagcgcctggaagcggcagcctgtgcgcgtgctgagcctgtttcggaatatcgataaagtcctgaaaagcctgggattcctggagagcggctctggctccggcggtggcaccctgaagtacgtggaggatgtgacaaacgtggtcagacgggatgtggagaagtggggccccttcgatctggtgtacggcagcacccaacccctgggcagctcttgtgaccggtgccctggctggtacatgtttcagttccaccggatcctgcagtacgccctgccgagacaggagtcccagcggccattcttttggattttcatggacaacttgctgctgaccgaggatgaccaggaaactaccactcggttcctgcagaccgaagccgtgaccctgcaggacgtgagaggccgggactaccagaacgccatgcgggtgtggtccaacatccctggactgaaaagcaagcacgcacctctgacccctaaagaagaggagtacctgcaggcccaggtgcggagcagaagcaagctggacgcccctaaggtggatctgctggtgaagaattgcctcctgcccctgagagagtacttcaagtatttcagccagaatagtctgcccctgggaggcagcggcggcggccaggccgaggtgaccttcgaggacgtggccgtgctgttcagcagggaggagtggggcaggctgagccccgcccagaggggcctgtacagggacgtgatgctggagacctacaggaacctggtgagcctgggcgccggccccgccggccccaagcccggcgtgatcacccagctggagaggggcgacgagccctgggtgctggacgcccagggcgccaagggcaaggagaggctgagggtgagcggcggcccaagcagcggcgcccctcctcccagcggcggcagcccagccggctccccaacctctaccgaggagggcacctctgagtccgccacccccgagagcggccctggcacctccaccgagcccagcgagggcagcgcacccggcagccctgccggcagccccacctccacagaggagggaaccagcaccgagcccagcgaaggcagcgccccaggcaccagcaccgagcctagtgagcaggagattaaacggatcaacaagatcagaagaagacttgtgaaagacagcaacaccaagaaggccggcaagacaggccccatgaaaaccctgctggttagagtgatgacacccgatctgagagagcggctggaaaacctgagaaagaagcctgaaaatatcccccagcccatcagcaatacatctagagccaacctgaataagctgctgaccgattacaccgaaatgaagaaggcgatcctgcatgtgtactgggaagagttccagaaggaccctgtgggcctgatgagccgggtggcccagcctgccagcaagaagatcgatcagaacaagctgaaacctgagatggacgagaagggcaacctgaccaccgccggctttgcctgctctcagtgtggccagcccctgttcgtgtacaagctggagcaggtgtctgagaagggcaaggcttacaccaactacttcggacggtgcaatgtggccgagcacgaaaagctgatcctgctggcccagctgaagcccgagaaggatagcgacgaagccgtgacatatagcctgggaaagtttgggcagagggccctggatttctacagcattcatgtgaccaaggagtccacccaccccgtgaagcccctggcccagatcgccggaaacagatacgcctccggacctgtgggaaaggccctgagcgacgcatgtatgggcacaatcgcctccttcctgtctaagtaccaggacatcatcatcgaacaccagaaggtggtgaagggcaaccagaagagactggagagcctgcgggagctggccggcaaggaaaacctggaataccctagcgtgaccctgccacctcagcctcacaccaaggagggcgttgatgcctacaacgaagtgatcgcccgggtgcgaatgtgggtgaacctgaacctgtggcagaagctgaagctaagcagagatgatgccaagcctctgctgagactgaagggattcccttcctttcctctggtcgagagacaggccaacgaagtggactggtgggacatggtgtgtaacgtgaagaagctgatcaacgagaaaaaggaggatggcaaggtgttttggcagaatctggctggctacaagagacaggaagccctgagaccatacctgagcagcgaggaagatcggaagaagggaaagaaattcgctcggtaccagctgggcgacctgctgctgcacctggaaaagaagcacggcgaggactggggaaaggtgtacgacgaggcctgggagcggattgacaagaaagtggaaggcctgagcaagcacatcaagctggaagaggaacggagaagcgaggacgcccagagcaaggccgccctgaccgactggctgcgggctaaggccagcttcgtgatcgagggcctgaaggaggccgacaaggacgagttctgcagatgcgagctgaagctgcagaagtggtacggggacctgcggggaaagcccttcgccatcgaagccgagaacagcatcctggacatcagcggcttcagcaagcagtacaactgtgccttcatctggcagaaggacggcgtgaagaagctgaacctgtacctgatcatcaactacttcaagggcggcaagctgcggttcaagaagatcaaacctgaagccttcgaagccaacagattctacaccgtgatcaacaaaaagagcggcgagatcgtgcccatggaggtgaacttcaacttcgacgaccccaacctgatcatcctgcctctggcctttggcaagagacagggcagagaattcatctggaacgacctgctgtccctggaaaccggcagcctgaagctggccaacggaagagtgatcgagaagacactgtacaacagaagaacccggcaggatgagcctgccctgttcgtggccctgaccttcgagcggcgggaggtcctggactcctccaatatcaaaccaatgaacctgatcggcgtggcaagaggcgaaaacatccccgccgtgatcgccctgaccgaccccgagggctgcccactgagccggtttaaggatagcctgggaaacccaacccacatcctgagaatcggcgagagctataaggagaagcagcggaccatccaggccaagaaggaggtggagcagcggagagccggcggctacagccggaagtacgccagcaaagccaagaatctggcagacgatatggtgagaaacaccgctagagatctgctgtactacgccgtgacccaggatgccatgctgatcttcgccaacctgagccggggcttcggccggcagggcaagcggaccttcatggccgagagacagtacacacggatggaggactggctgaccgccaagctggcctacgagggcctgagcaagacctacctgtccaagacactggcccagtacacctccaagacatgcagcaactgtgggtttaccatcaccagcgccgactacgacagggtgctggagaagctgaagaagacagcaacaggctggatgaccacaattaacggcaaggagctgaaggtggagggccagattacctactacaacagatacaagagacagaacgtagtcaaggacctgtccgtcgagctggatagactgagcgaagaatctgtgaacaacgacatctcctcctggacaaagggcagaagcggagaagctctgagcctcctgaagaaaagattctcccatagacccgtgcaggagaagttcgtgtgcctgaactgcggcttcgagacacacgcagccgagcaagccgccctgaacatcgccagatcctggctgttcctgcggagccaggagtacaagaaataccagacaaacaagacaaccggcaacaccgataagagagccttcgtcgagacctggcagtccttttaccggaagaagcttaaggaggtgtggaaacctgccgtgcggtctggcggatctggcggaggctccaccagccccaagaaaaagagaaaagtctaagctgccttctgcggggcttgccttctggccatgcccttcttctctcccttgcacctgtacctcttggtctttgaataaagcctgagtaggaaggctagcaaaaaaaaaaaaaaaaaaaaaaaaaaaaaaaaaaaaaaaaaaaaaaaaaaaaaaaaaaaaaaaaaaaaaaaaaaaaaaaa

SEQ ID NO: 12276 - RNA, 5785 nt, synthetic construct
  source 1..5785: mol_type = other RNA
aggaaataagagagaaaagaagagtaagaagaaatataagagccaccatggcccctaagaagaagcgtaaagtgagccggatggaacgcctcgtctacgaggtgcggcagaagtgcagaaacatcgaggacatctgcatctcctgcggatctctgaacgtgaccctggagcacccactgttcatcggcggcatgtgccagaactgtaaaaactgttttctggagtgtgcctatcaatacgacgatgacggctaccagagctactgcaccatctgttgcggcggaagagaggtgctgatgtgtggaaataacaactgctgccggtgcttctgcgtggaatgcgtggacctgctggtgggccccggcgccgcccaggccgctattaaggaagatccttggaactgctacatgtgcggccacaagggcacatacggcctgctgagacggagagaggactggcctagcagactgcagatgttcttcgccaataaccacgaccaggagttcgacccccctaaggtgtaccctcccgtccccgccgagaagagaaagcccatccgggtcctgagcctgttcgatggcatcgccaccggtctgctggtgctgaaggacctgggcatccaggtggataggtacattgcctccgaggtgtgcgaggactccatcaccgtgggaatggtgcgtcatcagggcaagatcatgtacgtgggcgacgtgcggagcgtgacacagaagcatatccaggagtggggccctttcgacctggtgatcggcggcagcccttgcaatgacctgagcatcgtgaacccagcccggaagggcctgtacgagggaaccggcagactgttcttcgagttttacagactgctgcacgacgcccggcctaaggaaggcgacgaccggcccttcttttggctgttcgagaatgtggtggccatgggagtcagcgacaagcgggatattagccggttcctggagagcaaccccgtgatgatcgatgccaaggaagtgagcgccgcccaccgggccagatacttctggggcaatctgcctggcatgaacagacccctggccagcaccgtgaacgacaagctggagctgcaggagtgcctggagcacggccggatcgccaagttcagcaaggtgagaaccatcaccacccgaagcaacagcatcaaacaaggcaaggaccagcactttcctgtgttcatgaacgagaaggaggacatcctgtggtgtaccgagatggagagagtgttcgggttcccagtccactacacagatgtcagcaacatgtctagactggccagacagagactgctgggaagaagctggtccgtccctgtgatcagacacctgttcgcccctctgaaggagtacttcgcctgcgtgagcagcggcaacagcaacgccaacagccggggccccagcttctctagcggcctggtgccactgtccctgagagggagccacatgggccccatggagatctacaaaaccgtgagcgcctggaagcggcagcctgtgcgcgtgctgagcctgtttcggaatatcgataaagtcctgaaaagcctgggattcctggagagcggctctggctccggcggtggcaccctgaagtacgtggaggatgtgacaaacgtggtcagacgggatgtggagaagtggggccccttcgatctggtgtacggcagcacccaacccctgggcagctcttgtgaccggtgccctggctggtacatgtttcagttccaccggatcctgcagtacgccctgccgagacaggagtcccagcggccattcttttggattttcatggacaacttgctgctgaccgaggatgaccaggaaactaccactcggttcctgcagaccgaagccgtgaccctgcaggacgtgagaggccgggactaccagaacgccatgcgggtgtggtccaacatccctggactgaaaagcaagcacgcacctctgacccctaaagaagaggagtacctgcaggcccaggtgcggagcagaagcaagctggacgcccctaaggtggatctgctggtgaagaattgcctcctgcccctgagagagtacttcaagtatttcagccagaatagtctgcccctgggaggcagcggcggcggcggcaagatgagcgtgaccttcgaggacgtggccctgtacttcagccccgaggagtgggccaagctgagcggctgccagaggcagctgtaccaggaggtgatgctggagaactaccagatggtggccagcctgggctgggccaacgtgaagcccgagatcatctgcaagatggagagggaggagaccccctgcgtgcccgacgtgcccggcaagcagcagaggcaccagagccccgtgcccgtgggcggcccaagcagcggcgcccctcctcccagcggcggcagcccagccggctccccaacctctaccgaggagggcacctctgagtccgccacccccgagagcggccctggcacctccaccgagcccagcgagggcagcgcacccggcagccctgccggcagccccacctccacagaggagggaaccagcaccgagcccagcgaaggcagcgccccaggcaccagcaccgagcctagtgagcaggagattaaacggatcaacaagatcagaagaagacttgtgaaagacagcaacaccaagaaggccggcaagacaggccccatgaaaaccctgctggttagagtgatgacacccgatctgagagagcggctggaaaacctgagaaagaagcctgaaaatatcccccagcccatcagcaatacatctagagccaacctgaataagctgctgaccgattacaccgaaatgaagaaggcgatcctgcatgtgtactgggaagagttccagaaggaccctgtgggcctgatgagccgggtggcccagcctgccagcaagaagatcgatcagaacaagctgaaacctgagatggacgagaagggcaacctgaccaccgccggctttgcctgctctcagtgtggccagcccctgttcgtgtacaagctggagcaggtgtctgagaagggcaaggcttacaccaactacttcggacggtgcaatgtggccgagcacgaaaagctgatcctgctggcccagctgaagcccgagaaggatagcgacgaagccgtgacatatagcctgggaaagtttgggcagagggccctggatttctacagcattcatgtgaccaaggagtccacccaccccgtgaagcccctggcccagatcgccggaaacagatacgcctccggacctgtgggaaaggccctgagcgacgcatgtatgggcacaatcgcctccttcctgtctaagtaccaggacatcatcatcgaacaccagaaggtggtgaagggcaaccagaagagactggagagcctgcgggagctggccggcaaggaaaacctggaataccctagcgtgaccctgccacctcagcctcacaccaaggagggcgttgatgcctacaacgaagtgatcgcccgggtgcgaatgtgggtgaacctgaacctgtggcagaagctgaagctaagcagagatgatgccaagcctctgctgagactgaagggattcccttcctttcctctggtcgagagacaggccaacgaagtggactggtgggacatggtgtgtaacgtgaagaagctgatcaacgagaaaaaggaggatggcaaggtgttttggcagaatctggctggctacaagagacaggaagccctgagaccatacctgagcagcgaggaagatcggaagaagggaaagaaattcgctcggtaccagctgggcgacctgctgctgcacctggaaaagaagcacggcgaggactggggaaaggtgtacgacgaggcctgggagcggattgacaagaaagtggaaggcctgagcaagcacatcaagctggaagaggaacggagaagcgaggacgcccagagcaaggccgccctgaccgactggctgcgggctaaggccagcttcgtgatcgagggcctgaaggaggccgacaaggacgagttctgcagatgcgagctgaagctgcagaagtggtacggggacctgcggggaaagcccttcgccatcgaagccgagaacagcatcctggacatcagcggcttcagcaagcagtacaactgtgccttcatctggcagaaggacggcgtgaagaagctgaacctgtacctgatcatcaactacttcaagggcggcaagctgcggttcaagaagatcaaacctgaagccttcgaagccaacagattctacaccgtgatcaacaaaaagagcggcgagatcgtgcccatggaggtgaacttcaacttcgacgaccccaacctgatcatcctgcctctggcctttggcaagagacagggcagagaattcatctggaacgacctgctgtccctggaaaccggcagcctgaagctggccaacggaagagtgatcgagaagacactgtacaacagaagaacccggcaggatgagcctgccctgttcgtggccctgaccttcgagcggcgggaggtcctggactcctccaatatcaaaccaatgaacctgatcggcgtggcaagaggcgaaaacatccccgccgtgatcgccctgaccgaccccgagggctgcccactgagccggtttaaggatagcctgggaaacccaacccacatcctgagaatcggcgagagctataaggagaagcagcggaccatccaggccaagaaggaggtggagcagcggagagccggcggctacagccggaagtacgccagcaaagccaagaatctggcagacgatatggtgagaaacaccgctagagatctgctgtactacgccgtgacccaggatgccatgctgatcttcgccaacctgagccggggcttcggccggcagggcaagcggaccttcatggccgagagacagtacacacggatggaggactggctgaccgccaagctggcctacgagggcctgagcaagacctacctgtccaagacactggcccagtacacctccaagacatgcagcaactgtgggtttaccatcaccagcgccgactacgacagggtgctggagaagctgaagaagacagcaacaggctggatgaccacaattaacggcaaggagctgaaggtggagggccagattacctactacaacagatacaagagacagaacgtagtcaaggacctgtccgtcgagctggatagactgagcgaagaatctgtgaacaacgacatctcctcctggacaaagggcagaagcggagaagctctgagcctcctgaagaaaagattctcccatagacccgtgcaggagaagttcgtgtgcctgaactgcggcttcgagacacacgcagccgagcaagccgccctgaacatcgccagatcctggctgttcctgcggagccaggagtacaagaaataccagacaaacaagacaaccggcaacaccgataagagagccttcgtcgagacctggcagtccttttaccggaagaagcttaaggaggtgtggaaacctgccgtgcggtctggcggatctggcggaggctccaccagccccaagaaaaagagaaaagtctaagctgccttctgcggggcttgccttctggccatgcccttcttctctcccttgcacctgtacctcttggtctttgaataaagcctgagtaggaaggctagcaaaaaaaaaaaaaaaaaaaaaaaaaaaaaaaaaaaaaaaaaaaaaaaaaaaaaaaaaaaaaaaaaaaaaaaaaaaaaaaa

SEQ ID NO: 12277 - RNA, 5782 nt, synthetic construct
  source 1..5782: mol_type = other RNA
aggaaataagagagaaaagaagagtaagaagaaatataagagccaccatggcccctaagaagaagcgtaaagtgagccggatggaacgcctcgtctacgaggtgcggcagaagtgcagaaacatcgaggacatctgcatctcctgcggatctctgaacgtgaccctggagcacccactgttcatcggcggcatgtgccagaactgtaaaaactgttttctggagtgtgcctatcaatacgacgatgacggctaccagagctactgcaccatctgttgcggcggaagagaggtgctgatgtgtggaaataacaactgctgccggtgcttctgcgtggaatgcgtggacctgctggtgggccccggcgccgcccaggccgctattaaggaagatccttggaactgctacatgtgcggccacaagggcacatacggcctgctgagacggagagaggactggcctagcagactgcagatgttcttcgccaataaccacgaccaggagttcgacccccctaaggtgtaccctcccgtccccgccgagaagagaaagcccatccgggtcctgagcctgttcgatggcatcgccaccggtctgctggtgctgaaggacctgggcatccaggtggataggtacattgcctccgaggtgtgcgaggactccatcaccgtgggaatggtgcgtcatcagggcaagatcatgtacgtgggcgacgtgcggagcgtgacacagaagcatatccaggagtggggccctttcgacctggtgatcggcggcagcccttgcaatgacctgagcatcgtgaacccagcccggaagggcctgtacgagggaaccggcagactgttcttcgagttttacagactgctgcacgacgcccggcctaaggaaggcgacgaccggcccttcttttggctgttcgagaatgtggtggccatgggagtcagcgacaagcgggatattagccggttcctggagagcaaccccgtgatgatcgatgccaaggaagtgagcgccgcccaccgggccagatacttctggggcaatctgcctggcatgaacagacccctggccagcaccgtgaacgacaagctggagctgcaggagtgcctggagcacggccggatcgccaagttcagcaaggtgagaaccatcaccacccgaagcaacagcatcaaacaaggcaaggaccagcactttcctgtgttcatgaacgagaaggaggacatcctgtggtgtaccgagatggagagagtgttcgggttcccagtccactacacagatgtcagcaacatgtctagactggccagacagagactgctgggaagaagctggtccgtccctgtgatcagacacctgttcgcccctctgaaggagtacttcgcctgcgtgagcagcggcaacagcaacgccaacagccggggccccagcttctctagcggcctggtgccactgtccctgagagggagccacatgggccccatggagatctacaaaaccgtgagcgcctggaagcggcagcctgtgcgcgtgctgagcctgtttcggaatatcgataaagtcctgaaaagcctgggattcctggagagcggctctggctccggcggtggcaccctgaagtacgtggaggatgtgacaaacgtggtcagacgggatgtggagaagtggggccccttcgatctggtgtacggcagcacccaacccctgggcagctcttgtgaccggtgccctggctggtacatgtttcagttccaccggatcctgcagtacgccctgccgagacaggagtcccagcggccattcttttggattttcatggacaacttgctgctgaccgaggatgaccaggaaactaccactcggttcctgcagaccgaagccgtgaccctgcaggacgtgagaggccgggactaccagaacgccatgcgggtgtggtccaacatccctggactgaaaagcaagcacgcacctctgacccctaaagaagaggagtacctgcaggcccaggtgcggagcagaagcaagctggacgcccctaaggtggatctgctggtgaagaattgcctcctgcccctgagagagtacttcaagtatttcagccagaatagtctgcccctgggaggcagcggcggcggcagagagagcctggaggacgaggtgacccccggcctgcccaccgccgagagccaggagctgctgaccttcaaggacatcagcatcgacttcacccaggaggagtggggccagctggcccccgcccaccagaacctgtacagagaggtgatgctggagaactacagcaacctggtgagcgtgggctaccagctgagcaagcccagcgtgatcagccagctggagaagggcgaggagccctggggcggcccaagcagcggcgcccctcctcccagcggcggcagcccagccggctccccaacctctaccgaggagggcacctctgagtccgccacccccgagagcggccctggcacctccaccgagcccagcgagggcagcgcacccggcagccctgccggcagccccacctccacagaggagggaaccagcaccgagcccagcgaaggcagcgccccaggcaccagcaccgagcctagtgagcaggagattaaacggatcaacaagatcagaagaagacttgtgaaagacagcaacaccaagaaggccggcaagacaggccccatgaaaaccctgctggttagagtgatgacacccgatctgagagagcggctggaaaacctgagaaagaagcctgaaaatatcccccagcccatcagcaatacatctagagccaacctgaataagctgctgaccgattacaccgaaatgaagaaggcgatcctgcatgtgtactgggaagagttccagaaggaccctgtgggcctgatgagccgggtggcccagcctgccagcaagaagatcgatcagaacaagctgaaacctgagatggacgagaagggcaacctgaccaccgccggctttgcctgctctcagtgtggccagcccctgttcgtgtacaagctggagcaggtgtctgagaagggcaaggcttacaccaactacttcggacggtgcaatgtggccgagcacgaaaagctgatcctgctggcccagctgaagcccgagaaggatagcgacgaagccgtgacatatagcctgggaaagtttgggcagagggccctggatttctacagcattcatgtgaccaaggagtccacccaccccgtgaagcccctggcccagatcgccggaaacagatacgcctccggacctgtgggaaaggccctgagcgacgcatgtatgggcacaatcgcctccttcctgtctaagtaccaggacatcatcatcgaacaccagaaggtggtgaagggcaaccagaagagactggagagcctgcgggagctggccggcaaggaaaacctggaataccctagcgtgaccctgccacctcagcctcacaccaaggagggcgttgatgcctacaacgaagtgatcgcccgggtgcgaatgtgggtgaacctgaacctgtggcagaagctgaagctaagcagagatgatgccaagcctctgctgagactgaagggattcccttcctttcctctggtcgagagacaggccaacgaagtggactggtgggacatggtgtgtaacgtgaagaagctgatcaacgagaaaaaggaggatggcaaggtgttttggcagaatctggctggctacaagagacaggaagccctgagaccatacctgagcagcgaggaagatcggaagaagggaaagaaattcgctcggtaccagctgggcgacctgctgctgcacctggaaaagaagcacggcgaggactggggaaaggtgtacgacgaggcctgggagcggattgacaagaaagtggaaggcctgagcaagcacatcaagctggaagaggaacggagaagcgaggacgcccagagcaaggccgccctgaccgactggctgcgggctaaggccagcttcgtgatcgagggcctgaaggaggccgacaaggacgagttctgcagatgcgagctgaagctgcagaagtggtacggggacctgcggggaaagcccttcgccatcgaagccgagaacagcatcctggacatcagcggcttcagcaagcagtacaactgtgccttcatctggcagaaggacggcgtgaagaagctgaacctgtacctgatcatcaactacttcaagggcggcaagctgcggttcaagaagatcaaacctgaagccttcgaagccaacagattctacaccgtgatcaacaaaaagagcggcgagatcgtgcccatggaggtgaacttcaacttcgacgaccccaacctgatcatcctgcctctggcctttggcaagagacagggcagagaattcatctggaacgacctgctgtccctggaaaccggcagcctgaagctggccaacggaagagtgatcgagaagacactgtacaacagaagaacccggcaggatgagcctgccctgttcgtggccctgaccttcgagcggcgggaggtcctggactcctccaatatcaaaccaatgaacctgatcggcgtggcaagaggcgaaaacatccccgccgtgatcgccctgaccgaccccgagggctgcccactgagccggtttaaggatagcctgggaaacccaacccacatcctgagaatcggcgagagctataaggagaagcagcggaccatccaggccaagaaggaggtggagcagcggagagccggcggctacagccggaagtacgccagcaaagccaagaatctggcagacgatatggtgagaaacaccgctagagatctgctgtactacgccgtgacccaggatgccatgctgatcttcgccaacctgagccggggcttcggccggcagggcaagcggaccttcatggccgagagacagtacacacggatggaggactggctgaccgccaagctggcctacgagggcctgagcaagacctacctgtccaagacactggcccagtacacctccaagacatgcagcaactgtgggtttaccatcaccagcgccgactacgacagggtgctggagaagctgaagaagacagcaacaggctggatgaccacaattaacggcaaggagctgaaggtggagggccagattacctactacaacagatacaagagacagaacgtagtcaaggacctgtccgtcgagctggatagactgagcgaagaatctgtgaacaacgacatctcctcctggacaaagggcagaagcggagaagctctgagcctcctgaagaaaagattctcccatagacccgtgcaggagaagttcgtgtgcctgaactgcggcttcgagacacacgcagccgagcaagccgccctgaacatcgccagatcctggctgttcctgcggagccaggagtacaagaaataccagacaaacaagacaaccggcaacaccgataagagagccttcgtcgagacctggcagtccttttaccggaagaagcttaaggaggtgtggaaacctgccgtgcggtctggcggatctggcggaggctccaccagccccaagaaaaagagaaaagtctaagctgccttctgcggggcttgccttctggccatgcccttcttctctcccttgcacctgtacctcttggtctttgaataaagcctgagtaggaaggctagcaaaaaaaaaaaaaaaaaaaaaaaaaaaaaaaaaaaaaaaaaaaaaaaaaaaaaaaaaaaaaaaaaaaaaaaaaaaaaaaa

SEQ ID NO: 12278 - RNA, 5785 nt, synthetic construct
  source 1..5785: mol_type = other RNA
aggaaataagagagaaaagaagagtaagaagaaatataagagccaccatggcccctaagaagaagcgtaaagtgagccggatggaacgcctcgtctacgaggtgcggcagaagtgcagaaacatcgaggacatctgcatctcctgcggatctctgaacgtgaccctggagcacccactgttcatcggcggcatgtgccagaactgtaaaaactgttttctggagtgtgcctatcaatacgacgatgacggctaccagagctactgcaccatctgttgcggcggaagagaggtgctgatgtgtggaaataacaactgctgccggtgcttctgcgtggaatgcgtggacctgctggtgggccccggcgccgcccaggccgctattaaggaagatccttggaactgctacatgtgcggccacaagggcacatacggcctgctgagacggagagaggactggcctagcagactgcagatgttcttcgccaataaccacgaccaggagttcgacccccctaaggtgtaccctcccgtccccgccgagaagagaaagcccatccgggtcctgagcctgttcgatggcatcgccaccggtctgctggtgctgaaggacctgggcatccaggtggataggtacattgcctccgaggtgtgcgaggactccatcaccgtgggaatggtgcgtcatcagggcaagatcatgtacgtgggcgacgtgcggagcgtgacacagaagcatatccaggagtggggccctttcgacctggtgatcggcggcagcccttgcaatgacctgagcatcgtgaacccagcccggaagggcctgtacgagggaaccggcagactgttcttcgagttttacagactgctgcacgacgcccggcctaaggaaggcgacgaccggcccttcttttggctgttcgagaatgtggtggccatgggagtcagcgacaagcgggatattagccggttcctggagagcaaccccgtgatgatcgatgccaaggaagtgagcgccgcccaccgggccagatacttctggggcaatctgcctggcatgaacagacccctggccagcaccgtgaacgacaagctggagctgcaggagtgcctggagcacggccggatcgccaagttcagcaaggtgagaaccatcaccacccgaagcaacagcatcaaacaaggcaaggaccagcactttcctgtgttcatgaacgagaaggaggacatcctgtggtgtaccgagatggagagagtgttcgggttcccagtccactacacagatgtcagcaacatgtctagactggccagacagagactgctgggaagaagctggtccgtccctgtgatcagacacctgttcgcccctctgaaggagtacttcgcctgcgtgagcagcggcaacagcaacgccaacagccggggccccagcttctctagcggcctggtgccactgtccctgagagggagccacatgggccccatggagatctacaaaaccgtgagcgcctggaagcggcagcctgtgcgcgtgctgagcctgtttcggaatatcgataaagtcctgaaaagcctgggattcctggagagcggctctggctccggcggtggcaccctgaagtacgtggaggatgtgacaaacgtggtcagacgggatgtggagaagtggggccccttcgatctggtgtacggcagcacccaacccctgggcagctcttgtgaccggtgccctggctggtacatgtttcagttccaccggatcctgcagtacgccctgccgagacaggagtcccagcggccattcttttggattttcatggacaacttgctgctgaccgaggatgaccaggaaactaccactcggttcctgcagaccgaagccgtgaccctgcaggacgtgagaggccgggactaccagaacgccatgcgggtgtggtccaacatccctggactgaaaagcaagcacgcacctctgacccctaaagaagaggagtacctgcaggcccaggtgcggagcagaagcaagctggacgcccctaaggtggatctgctggtgaagaattgcctcctgcccctgagagagtacttcaagtatttcagccagaatagtctgcccctgggaggcagcggcggcggcgcccaccacctggtgatgttcagggacgtggccgtggacttcagcaaggaggagtgggagtgcctgaacagctaccagaggaacctgtacagggacgtgatcctggagaactacagcaacctggtgagcgtgggctgcagcatcagcaagcccgacgtgatcaccctgctggagcagggcaaggagccctggatggtggtgagggacgagaggaggaggaggagcctggacctggagagcaggggcggcccaagcagcggcgcccctcctcccagcggcggcagcccagccggctccccaacctctaccgaggagggcacctctgagtccgccacccccgagagcggccctggcacctccaccgagcccagcgagggcagcgcacccggcagccctgccggcagccccacctccacagaggagggaaccagcaccgagcccagcgaaggcagcgccccaggcaccagcaccgagcctagtgagcaggagattaaacggatcaacaagatcagaagaagacttgtgaaagacagcaacaccaagaaggccggcaagacaggccccatgaaaaccctgctggttagagtgatgacacccgatctgagagagcggctggaaaacctgagaaagaagcctgaaaatatcccccagcccatcagcaatacatctagagccaacctgaataagctgctgaccgattacaccgaaatgaagaaggcgatcctgcatgtgtactgggaagagttccagaaggaccctgtgggcctgatgagccgggtggcccagcctgccagcaagaagatcgatcagaacaagctgaaacctgagatggacgagaagggcaacctgaccaccgccggctttgcctgctctcagtgtggccagcccctgttcgtgtacaagctggagcaggtgtctgagaagggcaaggcttacaccaactacttcggacggtgcaatgtggccgagcacgaaaagctgatcctgctggcccagctgaagcccgagaaggatagcgacgaagccgtgacatatagcctgggaaagtttgggcagagggccctggatttctacagcattcatgtgaccaaggagtccacccaccccgtgaagcccctggcccagatcgccggaaacagatacgcctccggacctgtgggaaaggccctgagcgacgcatgtatgggcacaatcgcctccttcctgtctaagtaccaggacatcatcatcgaacaccagaaggtggtgaagggcaaccagaagagactggagagcctgcgggagctggccggcaaggaaaacctggaataccctagcgtgaccctgccacctcagcctcacaccaaggagggcgttgatgcctacaacgaagtgatcgcccgggtgcgaatgtgggtgaacctgaacctgtggcagaagctgaagctaagcagagatgatgccaagcctctgctgagactgaagggattcccttcctttcctctggtcgagagacaggccaacgaagtggactggtgggacatggtgtgtaacgtgaagaagctgatcaacgagaaaaaggaggatggcaaggtgttttggcagaatctggctggctacaagagacaggaagccctgagaccatacctgagcagcgaggaagatcggaagaagggaaagaaattcgctcggtaccagctgggcgacctgctgctgcacctggaaaagaagcacggcgaggactggggaaaggtgtacgacgaggcctgggagcggattgacaagaaagtggaaggcctgagcaagcacatcaagctggaagaggaacggagaagcgaggacgcccagagcaaggccgccctgaccgactggctgcgggctaaggccagcttcgtgatcgagggcctgaaggaggccgacaaggacgagttctgcagatgcgagctgaagctgcagaagtggtacggggacctgcggggaaagcccttcgccatcgaagccgagaacagcatcctggacatcagcggcttcagcaagcagtacaactgtgccttcatctggcagaaggacggcgtgaagaagctgaacctgtacctgatcatcaactacttcaagggcggcaagctgcggttcaagaagatcaaacctgaagccttcgaagccaacagattctacaccgtgatcaacaaaaagagcggcgagatcgtgcccatggaggtgaacttcaacttcgacgaccccaacctgatcatcctgcctctggcctttggcaagagacagggcagagaattcatctggaacgacctgctgtccctggaaaccggcagcctgaagctggccaacggaagagtgatcgagaagacactgtacaacagaagaacccggcaggatgagcctgccctgttcgtggccctgaccttcgagcggcgggaggtcctggactcctccaatatcaaaccaatgaacctgatcggcgtggcaagaggcgaaaacatccccgccgtgatcgccctgaccgaccccgagggctgcccactgagccggtttaaggatagcctgggaaacccaacccacatcctgagaatcggcgagagctataaggagaagcagcggaccatccaggccaagaaggaggtggagcagcggagagccggcggctacagccggaagtacgccagcaaagccaagaatctggcagacgatatggtgagaaacaccgctagagatctgctgtactacgccgtgacccaggatgccatgctgatcttcgccaacctgagccggggcttcggccggcagggcaagcggaccttcatggccgagagacagtacacacggatggaggactggctgaccgccaagctggcctacgagggcctgagcaagacctacctgtccaagacactggcccagtacacctccaagacatgcagcaactgtgggtttaccatcaccagcgccgactacgacagggtgctggagaagctgaagaagacagcaacaggctggatgaccacaattaacggcaaggagctgaaggtggagggccagattacctactacaacagatacaagagacagaacgtagtcaaggacctgtccgtcgagctggatagactgagcgaagaatctgtgaacaacgacatctcctcctggacaaagggcagaagcggagaagctctgagcctcctgaagaaaagattctcccatagacccgtgcaggagaagttcgtgtgcctgaactgcggcttcgagacacacgcagccgagcaagccgccctgaacatcgccagatcctggctgttcctgcggagccaggagtacaagaaataccagacaaacaagacaaccggcaacaccgataagagagccttcgtcgagacctggcagtccttttaccggaagaagcttaaggaggtgtggaaacctgccgtgcggtctggcggatctggcggaggctccaccagccccaagaaaaagagaaaagtctaagctgccttctgcggggcttgccttctggccatgcccttcttctctcccttgcacctgtacctcttggtctttgaataaagcctgagtaggaaggctagcaaaaaaaaaaaaaaaaaaaaaaaaaaaaaaaaaaaaaaaaaaaaaaaaaaaaaaaaaaaaaaaaaaaaaaaaaaaaaaaa

SEQ ID NO: 12279 - RNA, 5785 nt, synthetic construct
  source 1..5785: mol_type = other RNA
aggaaataagagagaaaagaagagtaagaagaaatataagagccaccatggcccctaagaagaagcgtaaagtgagccggatggaacgcctcgtctacgaggtgcggcagaagtgcagaaacatcgaggacatctgcatctcctgcggatctctgaacgtgaccctggagcacccactgttcatcggcggcatgtgccagaactgtaaaaactgttttctggagtgtgcctatcaatacgacgatgacggctaccagagctactgcaccatctgttgcggcggaagagaggtgctgatgtgtggaaataacaactgctgccggtgcttctgcgtggaatgcgtggacctgctggtgggccccggcgccgcccaggccgctattaaggaagatccttggaactgctacatgtgcggccacaagggcacatacggcctgctgagacggagagaggactggcctagcagactgcagatgttcttcgccaataaccacgaccaggagttcgacccccctaaggtgtaccctcccgtccccgccgagaagagaaagcccatccgggtcctgagcctgttcgatggcatcgccaccggtctgctggtgctgaaggacctgggcatccaggtggataggtacattgcctccgaggtgtgcgaggactccatcaccgtgggaatggtgcgtcatcagggcaagatcatgtacgtgggcgacgtgcggagcgtgacacagaagcatatccaggagtggggccctttcgacctggtgatcggcggcagcccttgcaatgacctgagcatcgtgaacccagcccggaagggcctgtacgagggaaccggcagactgttcttcgagttttacagactgctgcacgacgcccggcctaaggaaggcgacgaccggcccttcttttggctgttcgagaatgtggtggccatgggagtcagcgacaagcgggatattagccggttcctggagagcaaccccgtgatgatcgatgccaaggaagtgagcgccgcccaccgggccagatacttctggggcaatctgcctggcatgaacagacccctggccagcaccgtgaacgacaagctggagctgcaggagtgcctggagcacggccggatcgccaagttcagcaaggtgagaaccatcaccacccgaagcaacagcatcaaacaaggcaaggaccagcactttcctgtgttcatgaacgagaaggaggacatcctgtggtgtaccgagatggagagagtgttcgggttcccagtccactacacagatgtcagcaacatgtctagactggccagacagagactgctgggaagaagctggtccgtccctgtgatcagacacctgttcgcccctctgaaggagtacttcgcctgcgtgagcagcggcaacagcaacgccaacagccggggccccagcttctctagcggcctggtgccactgtccctgagagggagccacatgggccccatggagatctacaaaaccgtgagcgcctggaagcggcagcctgtgcgcgtgctgagcctgtttcggaatatcgataaagtcctgaaaagcctgggattcctggagagcggctctggctccggcggtggcaccctgaagtacgtggaggatgtgacaaacgtggtcagacgggatgtggagaagtggggccccttcgatctggtgtacggcagcacccaacccctgggcagctcttgtgaccggtgccctggctggtacatgtttcagttccaccggatcctgcagtacgccctgccgagacaggagtcccagcggccattcttttggattttcatggacaacttgctgctgaccgaggatgaccaggaaactaccactcggttcctgcagaccgaagccgtgaccctgcaggacgtgagaggccgggactaccagaacgccatgcgggtgtggtccaacatccctggactgaaaagcaagcacgcacctctgacccctaaagaagaggagtacctgcaggcccaggtgcggagcagaagcaagctggacgcccctaaggtggatctgctggtgaagaattgcctcctgcccctgagagagtacttcaagtatttcagccagaatagtctgcccctgggaggcagcggcggcggcagccaggagcccgtgaccttcgaggacgtggccgtgtacttcacccagaaccagtgggccagcctggaccccatgcagagggccctgtacctggaggtgatgctggagaactacgccaacatcaccagcctggccgccctgcccttccccaagcccgacctgatcctgcagctggagcagggcgaggccccctgggacctggacccctggacccccctggagggcgaggccctggagggcgtgggcggcccaagcagcggcgcccctcctcccagcggcggcagcccagccggctccccaacctctaccgaggagggcacctctgagtccgccacccccgagagcggccctggcacctccaccgagcccagcgagggcagcgcacccggcagccctgccggcagccccacctccacagaggagggaaccagcaccgagcccagcgaaggcagcgccccaggcaccagcaccgagcctagtgagcaggagattaaacggatcaacaagatcagaagaagacttgtgaaagacagcaacaccaagaaggccggcaagacaggccccatgaaaaccctgctggttagagtgatgacacccgatctgagagagcggctggaaaacctgagaaagaagcctgaaaatatcccccagcccatcagcaatacatctagagccaacctgaataagctgctgaccgattacaccgaaatgaagaaggcgatcctgcatgtgtactgggaagagttccagaaggaccctgtgggcctgatgagccgggtggcccagcctgccagcaagaagatcgatcagaacaagctgaaacctgagatggacgagaagggcaacctgaccaccgccggctttgcctgctctcagtgtggccagcccctgttcgtgtacaagctggagcaggtgtctgagaagggcaaggcttacaccaactacttcggacggtgcaatgtggccgagcacgaaaagctgatcctgctggcccagctgaagcccgagaaggatagcgacgaagccgtgacatatagcctgggaaagtttgggcagagggccctggatttctacagcattcatgtgaccaaggagtccacccaccccgtgaagcccctggcccagatcgccggaaacagatacgcctccggacctgtgggaaaggccctgagcgacgcatgtatgggcacaatcgcctccttcctgtctaagtaccaggacatcatcatcgaacaccagaaggtggtgaagggcaaccagaagagactggagagcctgcgggagctggccggcaaggaaaacctggaataccctagcgtgaccctgccacctcagcctcacaccaaggagggcgttgatgcctacaacgaagtgatcgcccgggtgcgaatgtgggtgaacctgaacctgtggcagaagctgaagctaagcagagatgatgccaagcctctgctgagactgaagggattcccttcctttcctctggtcgagagacaggccaacgaagtggactggtgggacatggtgtgtaacgtgaagaagctgatcaacgagaaaaaggaggatggcaaggtgttttggcagaatctggctggctacaagagacaggaagccctgagaccatacctgagcagcgaggaagatcggaagaagggaaagaaattcgctcggtaccagctgggcgacctgctgctgcacctggaaaagaagcacggcgaggactggggaaaggtgtacgacgaggcctgggagcggattgacaagaaagtggaaggcctgagcaagcacatcaagctggaagaggaacggagaagcgaggacgcccagagcaaggccgccctgaccgactggctgcgggctaaggccagcttcgtgatcgagggcctgaaggaggccgacaaggacgagttctgcagatgcgagctgaagctgcagaagtggtacggggacctgcggggaaagcccttcgccatcgaagccgagaacagcatcctggacatcagcggcttcagcaagcagtacaactgtgccttcatctggcagaaggacggcgtgaagaagctgaacctgtacctgatcatcaactacttcaagggcggcaagctgcggttcaagaagatcaaacctgaagccttcgaagccaacagattctacaccgtgatcaacaaaaagagcggcgagatcgtgcccatggaggtgaacttcaacttcgacgaccccaacctgatcatcctgcctctggcctttggcaagagacagggcagagaattcatctggaacgacctgctgtccctggaaaccggcagcctgaagctggccaacggaagagtgatcgagaagacactgtacaacagaagaacccggcaggatgagcctgccctgttcgtggccctgaccttcgagcggcgggaggtcctggactcctccaatatcaaaccaatgaacctgatcggcgtggcaagaggcgaaaacatccccgccgtgatcgccctgaccgaccccgagggctgcccactgagccggtttaaggatagcctgggaaacccaacccacatcctgagaatcggcgagagctataaggagaagcagcggaccatccaggccaagaaggaggtggagcagcggagagccggcggctacagccggaagtacgccagcaaagccaagaatctggcagacgatatggtgagaaacaccgctagagatctgctgtactacgccgtgacccaggatgccatgctgatcttcgccaacctgagccggggcttcggccggcagggcaagcggaccttcatggccgagagacagtacacacggatggaggactggctgaccgccaagctggcctacgagggcctgagcaagacctacctgtccaagacactggcccagtacacctccaagacatgcagcaactgtgggtttaccatcaccagcgccgactacgacagggtgctggagaagctgaagaagacagcaacaggctggatgaccacaattaacggcaaggagctgaaggtggagggccagattacctactacaacagatacaagagacagaacgtagtcaaggacctgtccgtcgagctggatagactgagcgaagaatctgtgaacaacgacatctcctcctggacaaagggcagaagcggagaagctctgagcctcctgaagaaaagattctcccatagacccgtgcaggagaagttcgtgtgcctgaactgcggcttcgagacacacgcagccgagcaagccgccctgaacatcgccagatcctggctgttcctgcggagccaggagtacaagaaataccagacaaacaagacaaccggcaacaccgataagagagccttcgtcgagacctggcagtccttttaccggaagaagcttaaggaggtgtggaaacctgccgtgcggtctggcggatctggcggaggctccaccagccccaagaaaaagagaaaagtctaagctgccttctgcggggcttgccttctggccatgcccttcttctctcccttgcacctgtacctcttggtctttgaataaagcctgagtaggaaggctagcaaaaaaaaaaaaaaaaaaaaaaaaaaaaaaaaaaaaaaaaaaaaaaaaaaaaaaaaaaaaaaaaaaaaaaaaaaaaaaaa

SEQ ID NO: 12280 - RNA, 5785 nt, synthetic construct
  source 1..5785: mol_type = other RNA
aggaaataagagagaaaagaagagtaagaagaaatataagagccaccatggcccctaagaagaagcgtaaagtgagccggatggaacgcctcgtctacgaggtgcggcagaagtgcagaaacatcgaggacatctgcatctcctgcggatctctgaacgtgaccctggagcacccactgttcatcggcggcatgtgccagaactgtaaaaactgttttctggagtgtgcctatcaatacgacgatgacggctaccagagctactgcaccatctgttgcggcggaagagaggtgctgatgtgtggaaataacaactgctgccggtgcttctgcgtggaatgcgtggacctgctggtgggccccggcgccgcccaggccgctattaaggaagatccttggaactgctacatgtgcggccacaagggcacatacggcctgctgagacggagagaggactggcctagcagactgcagatgttcttcgccaataaccacgaccaggagttcgacccccctaaggtgtaccctcccgtccccgccgagaagagaaagcccatccgggtcctgagcctgttcgatggcatcgccaccggtctgctggtgctgaaggacctgggcatccaggtggataggtacattgcctccgaggtgtgcgaggactccatcaccgtgggaatggtgcgtcatcagggcaagatcatgtacgtgggcgacgtgcggagcgtgacacagaagcatatccaggagtggggccctttcgacctggtgatcggcggcagcccttgcaatgacctgagcatcgtgaacccagcccggaagggcctgtacgagggaaccggcagactgttcttcgagttttacagactgctgcacgacgcccggcctaaggaaggcgacgaccggcccttcttttggctgttcgagaatgtggtggccatgggagtcagcgacaagcgggatattagccggttcctggagagcaaccccgtgatgatcgatgccaaggaagtgagcgccgcccaccgggccagatacttctggggcaatctgcctggcatgaacagacccctggccagcaccgtgaacgacaagctggagctgcaggagtgcctggagcacggccggatcgccaagttcagcaaggtgagaaccatcaccacccgaagcaacagcatcaaacaaggcaaggaccagcactttcctgtgttcatgaacgagaaggaggacatcctgtggtgtaccgagatggagagagtgttcgggttcccagtccactacacagatgtcagcaacatgtctagactggccagacagagactgctgggaagaagctggtccgtccctgtgatcagacacctgttcgcccctctgaaggagtacttcgcctgcgtgagcagcggcaacagcaacgccaacagccggggccccagcttctctagcggcctggtgccactgtccctgagagggagccacatgggccccatggagatctacaaaaccgtgagcgcctggaagcggcagcctgtgcgcgtgctgagcctgtttcggaatatcgataaagtcctgaaaagcctgggattcctggagagcggctctggctccggcggtggcaccctgaagtacgtggaggatgtgacaaacgtggtcagacgggatgtggagaagtggggccccttcgatctggtgtacggcagcacccaacccctgggcagctcttgtgaccggtgccctggctggtacatgtttcagttccaccggatcctgcagtacgccctgccgagacaggagtcccagcggccattcttttggattttcatggacaacttgctgctgaccgaggatgaccaggaaactaccactcggttcctgcagaccgaagccgtgaccctgcaggacgtgagaggccgggactaccagaacgccatgcgggtgtggtccaacatccctggactgaaaagcaagcacgcacctctgacccctaaagaagaggagtacctgcaggcccaggtgcggagcagaagcaagctggacgcccctaaggtggatctgctggtgaagaattgcctcctgcccctgagagagtacttcaagtatttcagccagaatagtctgcccctgggaggcagcggcggcggcctgcccggcctgatggccttcgaggacgtggccgtgtacttcagccaggaggagtggggcctgctggacgccgtgcagagggccctgtacaggcacgtgatgctggagaacttcgccctggtggccagcctgggcctgagcgccagccccccccacgtggtgatccagctgcagaggggcgaggagccctgggtgcccagcggcctggacatgaccagcgccaggaacggccacaggaggcccggcggcccaagcagcggcgcccctcctcccagcggcggcagcccagccggctccccaacctctaccgaggagggcacctctgagtccgccacccccgagagcggccctggcacctccaccgagcccagcgagggcagcgcacccggcagccctgccggcagccccacctccacagaggagggaaccagcaccgagcccagcgaaggcagcgccccaggcaccagcaccgagcctagtgagcaggagattaaacggatcaacaagatcagaagaagacttgtgaaagacagcaacaccaagaaggccggcaagacaggccccatgaaaaccctgctggttagagtgatgacacccgatctgagagagcggctggaaaacctgagaaagaagcctgaaaatatcccccagcccatcagcaatacatctagagccaacctgaataagctgctgaccgattacaccgaaatgaagaaggcgatcctgcatgtgtactgggaagagttccagaaggaccctgtgggcctgatgagccgggtggcccagcctgccagcaagaagatcgatcagaacaagctgaaacctgagatggacgagaagggcaacctgaccaccgccggctttgcctgctctcagtgtggccagcccctgttcgtgtacaagctggagcaggtgtctgagaagggcaaggcttacaccaactacttcggacggtgcaatgtggccgagcacgaaaagctgatcctgctggcccagctgaagcccgagaaggatagcgacgaagccgtgacatatagcctgggaaagtttgggcagagggccctggatttctacagcattcatgtgaccaaggagtccacccaccccgtgaagcccctggcccagatcgccggaaacagatacgcctccggacctgtgggaaaggccctgagcgacgcatgtatgggcacaatcgcctccttcctgtctaagtaccaggacatcatcatcgaacaccagaaggtggtgaagggcaaccagaagagactggagagcctgcgggagctggccggcaaggaaaacctggaataccctagcgtgaccctgccacctcagcctcacaccaaggagggcgttgatgcctacaacgaagtgatcgcccgggtgcgaatgtgggtgaacctgaacctgtggcagaagctgaagctaagcagagatgatgccaagcctctgctgagactgaagggattcccttcctttcctctggtcgagagacaggccaacgaagtggactggtgggacatggtgtgtaacgtgaagaagctgatcaacgagaaaaaggaggatggcaaggtgttttggcagaatctggctggctacaagagacaggaagccctgagaccatacctgagcagcgaggaagatcggaagaagggaaagaaattcgctcggtaccagctgggcgacctgctgctgcacctggaaaagaagcacggcgaggactggggaaaggtgtacgacgaggcctgggagcggattgacaagaaagtggaaggcctgagcaagcacatcaagctggaagaggaacggagaagcgaggacgcccagagcaaggccgccctgaccgactggctgcgggctaaggccagcttcgtgatcgagggcctgaaggaggccgacaaggacgagttctgcagatgcgagctgaagctgcagaagtggtacggggacctgcggggaaagcccttcgccatcgaagccgagaacagcatcctggacatcagcggcttcagcaagcagtacaactgtgccttcatctggcagaaggacggcgtgaagaagctgaacctgtacctgatcatcaactacttcaagggcggcaagctgcggttcaagaagatcaaacctgaagccttcgaagccaacagattctacaccgtgatcaacaaaaagagcggcgagatcgtgcccatggaggtgaacttcaacttcgacgaccccaacctgatcatcctgcctctggcctttggcaagagacagggcagagaattcatctggaacgacctgctgtccctggaaaccggcagcctgaagctggccaacggaagagtgatcgagaagacactgtacaacagaagaacccggcaggatgagcctgccctgttcgtggccctgaccttcgagcggcgggaggtcctggactcctccaatatcaaaccaatgaacctgatcggcgtggcaagaggcgaaaacatccccgccgtgatcgccctgaccgaccccgagggctgcccactgagccggtttaaggatagcctgggaaacccaacccacatcctgagaatcggcgagagctataaggagaagcagcggaccatccaggccaagaaggaggtggagcagcggagagccggcggctacagccggaagtacgccagcaaagccaagaatctggcagacgatatggtgagaaacaccgctagagatctgctgtactacgccgtgacccaggatgccatgctgatcttcgccaacctgagccggggcttcggccggcagggcaagcggaccttcatggccgagagacagtacacacggatggaggactggctgaccgccaagctggcctacgagggcctgagcaagacctacctgtccaagacactggcccagtacacctccaagacatgcagcaactgtgggtttaccatcaccagcgccgactacgacagggtgctggagaagctgaagaagacagcaacaggctggatgaccacaattaacggcaaggagctgaaggtggagggccagattacctactacaacagatacaagagacagaacgtagtcaaggacctgtccgtcgagctggatagactgagcgaagaatctgtgaacaacgacatctcctcctggacaaagggcagaagcggagaagctctgagcctcctgaagaaaagattctcccatagacccgtgcaggagaagttcgtgtgcctgaactgcggcttcgagacacacgcagccgagcaagccgccctgaacatcgccagatcctggctgttcctgcggagccaggagtacaagaaataccagacaaacaagacaaccggcaacaccgataagagagccttcgtcgagacctggcagtccttttaccggaagaagcttaaggaggtgtggaaacctgccgtgcggtctggcggatctggcggaggctccaccagccccaagaaaaagagaaaagtctaagctgccttctgcggggcttgccttctggccatgcccttcttctctcccttgcacctgtacctcttggtctttgaataaagcctgagtaggaaggctagcaaaaaaaaaaaaaaaaaaaaaaaaaaaaaaaaaaaaaaaaaaaaaaaaaaaaaaaaaaaaaaaaaaaaaaaaaaaaaaaa

SEQ ID NO: 12281 - RNA, 5785 nt, synthetic construct
  source 1..5785: mol_type = other RNA
aggaaataagagagaaaagaagagtaagaagaaatataagagccaccatggcccctaagaagaagcgtaaagtgagccggatggaacgcctcgtctacgaggtgcggcagaagtgcagaaacatcgaggacatctgcatctcctgcggatctctgaacgtgaccctggagcacccactgttcatcggcggcatgtgccagaactgtaaaaactgttttctggagtgtgcctatcaatacgacgatgacggctaccagagctactgcaccatctgttgcggcggaagagaggtgctgatgtgtggaaataacaactgctgccggtgcttctgcgtggaatgcgtggacctgctggtgggccccggcgccgcccaggccgctattaaggaagatccttggaactgctacatgtgcggccacaagggcacatacggcctgctgagacggagagaggactggcctagcagactgcagatgttcttcgccaataaccacgaccaggagttcgacccccctaaggtgtaccctcccgtccccgccgagaagagaaagcccatccgggtcctgagcctgttcgatggcatcgccaccggtctgctggtgctgaaggacctgggcatccaggtggataggtacattgcctccgaggtgtgcgaggactccatcaccgtgggaatggtgcgtcatcagggcaagatcatgtacgtgggcgacgtgcggagcgtgacacagaagcatatccaggagtggggccctttcgacctggtgatcggcggcagcccttgcaatgacctgagcatcgtgaacccagcccggaagggcctgtacgagggaaccggcagactgttcttcgagttttacagactgctgcacgacgcccggcctaaggaaggcgacgaccggcccttcttttggctgttcgagaatgtggtggccatgggagtcagcgacaagcgggatattagccggttcctggagagcaaccccgtgatgatcgatgccaaggaagtgagcgccgcccaccgggccagatacttctggggcaatctgcctggcatgaacagacccctggccagcaccgtgaacgacaagctggagctgcaggagtgcctggagcacggccggatcgccaagttcagcaaggtgagaaccatcaccacccgaagcaacagcatcaaacaaggcaaggaccagcactttcctgtgttcatgaacgagaaggaggacatcctgtggtgtaccgagatggagagagtgttcgggttcccagtccactacacagatgtcagcaacatgtctagactggccagacagagactgctgggaagaagctggtccgtccctgtgatcagacacctgttcgcccctctgaaggagtacttcgcctgcgtgagcagcggcaacagcaacgccaacagccggggccccagcttctctagcggcctggtgccactgtccctgagagggagccacatgggccccatggagatctacaaaaccgtgagcgcctggaagcggcagcctgtgcgcgtgctgagcctgtttcggaatatcgataaagtcctgaaaagcctgggattcctggagagcggctctggctccggcggtggcaccctgaagtacgtggaggatgtgacaaacgtggtcagacgggatgtggagaagtggggccccttcgatctggtgtacggcagcacccaacccctgggcagctcttgtgaccggtgccctggctggtacatgtttcagttccaccggatcctgcagtacgccctgccgagacaggagtcccagcggccattcttttggattttcatggacaacttgctgctgaccgaggatgaccaggaaactaccactcggttcctgcagaccgaagccgtgaccctgcaggacgtgagaggccgggactaccagaacgccatgcgggtgtggtccaacatccctggactgaaaagcaagcacgcacctctgacccctaaagaagaggagtacctgcaggcccaggtgcggagcagaagcaagctggacgcccctaaggtggatctgctggtgaagaattgcctcctgcccctgagagagtacttcaagtatttcagccagaatagtctgcccctgggaggcagcggcggcggctgctaccaggacagcgtgaccttcgacgacgtggccgtggacttcacccaggaggagtggaccctgctggacagcacccagaggagcctgtacagcgacgtgatgctggagaactacaagaacctggccaccgtgggcggccagatcatcaagcccagcctgatcagctggctggagcaggaggagagcaggaccgtgcagggcggcgtgctgaggggcaggaagacccagtggaggggcaccggcggcccaagcagcggcgcccctcctcccagcggcggcagcccagccggctccccaacctctaccgaggagggcacctctgagtccgccacccccgagagcggccctggcacctccaccgagcccagcgagggcagcgcacccggcagccctgccggcagccccacctccacagaggagggaaccagcaccgagcccagcgaaggcagcgccccaggcaccagcaccgagcctagtgagcaggagattaaacggatcaacaagatcagaagaagacttgtgaaagacagcaacaccaagaaggccggcaagacaggccccatgaaaaccctgctggttagagtgatgacacccgatctgagagagcggctggaaaacctgagaaagaagcctgaaaatatcccccagcccatcagcaatacatctagagccaacctgaataagctgctgaccgattacaccgaaatgaagaaggcgatcctgcatgtgtactgggaagagttccagaaggaccctgtgggcctgatgagccgggtggcccagcctgccagcaagaagatcgatcagaacaagctgaaacctgagatggacgagaagggcaacctgaccaccgccggctttgcctgctctcagtgtggccagcccctgttcgtgtacaagctggagcaggtgtctgagaagggcaaggcttacaccaactacttcggacggtgcaatgtggccgagcacgaaaagctgatcctgctggcccagctgaagcccgagaaggatagcgacgaagccgtgacatatagcctgggaaagtttgggcagagggccctggatttctacagcattcatgtgaccaaggagtccacccaccccgtgaagcccctggcccagatcgccggaaacagatacgcctccggacctgtgggaaaggccctgagcgacgcatgtatgggcacaatcgcctccttcctgtctaagtaccaggacatcatcatcgaacaccagaaggtggtgaagggcaaccagaagagactggagagcctgcgggagctggccggcaaggaaaacctggaataccctagcgtgaccctgccacctcagcctcacaccaaggagggcgttgatgcctacaacgaagtgatcgcccgggtgcgaatgtgggtgaacctgaacctgtggcagaagctgaagctaagcagagatgatgccaagcctctgctgagactgaagggattcccttcctttcctctggtcgagagacaggccaacgaagtggactggtgggacatggtgtgtaacgtgaagaagctgatcaacgagaaaaaggaggatggcaaggtgttttggcagaatctggctggctacaagagacaggaagccctgagaccatacctgagcagcgaggaagatcggaagaagggaaagaaattcgctcggtaccagctgggcgacctgctgctgcacctggaaaagaagcacggcgaggactggggaaaggtgtacgacgaggcctgggagcggattgacaagaaagtggaaggcctgagcaagcacatcaagctggaagaggaacggagaagcgaggacgcccagagcaaggccgccctgaccgactggctgcgggctaaggccagcttcgtgatcgagggcctgaaggaggccgacaaggacgagttctgcagatgcgagctgaagctgcagaagtggtacggggacctgcggggaaagcccttcgccatcgaagccgagaacagcatcctggacatcagcggcttcagcaagcagtacaactgtgccttcatctggcagaaggacggcgtgaagaagctgaacctgtacctgatcatcaactacttcaagggcggcaagctgcggttcaagaagatcaaacctgaagccttcgaagccaacagattctacaccgtgatcaacaaaaagagcggcgagatcgtgcccatggaggtgaacttcaacttcgacgaccccaacctgatcatcctgcctctggcctttggcaagagacagggcagagaattcatctggaacgacctgctgtccctggaaaccggcagcctgaagctggccaacggaagagtgatcgagaagacactgtacaacagaagaacccggcaggatgagcctgccctgttcgtggccctgaccttcgagcggcgggaggtcctggactcctccaatatcaaaccaatgaacctgatcggcgtggcaagaggcgaaaacatccccgccgtgatcgccctgaccgaccccgagggctgcccactgagccggtttaaggatagcctgggaaacccaacccacatcctgagaatcggcgagagctataaggagaagcagcggaccatccaggccaagaaggaggtggagcagcggagagccggcggctacagccggaagtacgccagcaaagccaagaatctggcagacgatatggtgagaaacaccgctagagatctgctgtactacgccgtgacccaggatgccatgctgatcttcgccaacctgagccggggcttcggccggcagggcaagcggaccttcatggccgagagacagtacacacggatggaggactggctgaccgccaagctggcctacgagggcctgagcaagacctacctgtccaagacactggcccagtacacctccaagacatgcagcaactgtgggtttaccatcaccagcgccgactacgacagggtgctggagaagctgaagaagacagcaacaggctggatgaccacaattaacggcaaggagctgaaggtggagggccagattacctactacaacagatacaagagacagaacgtagtcaaggacctgtccgtcgagctggatagactgagcgaagaatctgtgaacaacgacatctcctcctggacaaagggcagaagcggagaagctctgagcctcctgaagaaaagattctcccatagacccgtgcaggagaagttcgtgtgcctgaactgcggcttcgagacacacgcagccgagcaagccgccctgaacatcgccagatcctggctgttcctgcggagccaggagtacaagaaataccagacaaacaagacaaccggcaacaccgataagagagccttcgtcgagacctggcagtccttttaccggaagaagcttaaggaggtgtggaaacctgccgtgcggtctggcggatctggcggaggctccaccagccccaagaaaaagagaaaagtctaagctgccttctgcggggcttgccttctggccatgcccttcttctctcccttgcacctgtacctcttggtctttgaataaagcctgagtaggaaggctagcaaaaaaaaaaaaaaaaaaaaaaaaaaaaaaaaaaaaaaaaaaaaaaaaaaaaaaaaaaaaaaaaaaaaaaaaaaaaaaaa

SEQ ID NO: 12282 - RNA, 5785 nt, synthetic construct
  source 1..5785: mol_type = other RNA
aggaaataagagagaaaagaagagtaagaagaaatataagagccaccatggcccctaagaagaagcgtaaagtgagccggatggaacgcctcgtctacgaggtgcggcagaagtgcagaaacatcgaggacatctgcatctcctgcggatctctgaacgtgaccctggagcacccactgttcatcggcggcatgtgccagaactgtaaaaactgttttctggagtgtgcctatcaatacgacgatgacggctaccagagctactgcaccatctgttgcggcggaagagaggtgctgatgtgtggaaataacaactgctgccggtgcttctgcgtggaatgcgtggacctgctggtgggccccggcgccgcccaggccgctattaaggaagatccttggaactgctacatgtgcggccacaagggcacatacggcctgctgagacggagagaggactggcctagcagactgcagatgttcttcgccaataaccacgaccaggagttcgacccccctaaggtgtaccctcccgtccccgccgagaagagaaagcccatccgggtcctgagcctgttcgatggcatcgccaccggtctgctggtgctgaaggacctgggcatccaggtggataggtacattgcctccgaggtgtgcgaggactccatcaccgtgggaatggtgcgtcatcagggcaagatcatgtacgtgggcgacgtgcggagcgtgacacagaagcatatccaggagtggggccctttcgacctggtgatcggcggcagcccttgcaatgacctgagcatcgtgaacccagcccggaagggcctgtacgagggaaccggcagactgttcttcgagttttacagactgctgcacgacgcccggcctaaggaaggcgacgaccggcccttcttttggctgttcgagaatgtggtggccatgggagtcagcgacaagcgggatattagccggttcctggagagcaaccccgtgatgatcgatgccaaggaagtgagcgccgcccaccgggccagatacttctggggcaatctgcctggcatgaacagacccctggccagcaccgtgaacgacaagctggagctgcaggagtgcctggagcacggccggatcgccaagttcagcaaggtgagaaccatcaccacccgaagcaacagcatcaaacaaggcaaggaccagcactttcctgtgttcatgaacgagaaggaggacatcctgtggtgtaccgagatggagagagtgttcgggttcccagtccactacacagatgtcagcaacatgtctagactggccagacagagactgctgggaagaagctggtccgtccctgtgatcagacacctgttcgcccctctgaaggagtacttcgcctgcgtgagcagcggcaacagcaacgccaacagccggggccccagcttctctagcggcctggtgccactgtccctgagagggagccacatgggccccatggagatctacaaaaccgtgagcgcctggaagcggcagcctgtgcgcgtgctgagcctgtttcggaatatcgataaagtcctgaaaagcctgggattcctggagagcggctctggctccggcggtggcaccctgaagtacgtggaggatgtgacaaacgtggtcagacgggatgtggagaagtggggccccttcgatctggtgtacggcagcacccaacccctgggcagctcttgtgaccggtgccctggctggtacatgtttcagttccaccggatcctgcagtacgccctgccgagacaggagtcccagcggccattcttttggattttcatggacaacttgctgctgaccgaggatgaccaggaaactaccactcggttcctgcagaccgaagccgtgaccctgcaggacgtgagaggccgggactaccagaacgccatgcgggtgtggtccaacatccctggactgaaaagcaagcacgcacctctgacccctaaagaagaggagtacctgcaggcccaggtgcggagcagaagcaagctggacgcccctaaggtggatctgctggtgaagaattgcctcctgcccctgagagagtacttcaagtatttcagccagaatagtctgcccctgggaggcagcggcggcggccaggagcccgtgaccttcgaggacgtggccgtgtacttcacccagaaccagtgggccagcctggacagcgcccagagggccctgtacagggaggtgatgctggagaactacgccaacgtggccagcctggtggtgagccccttccccaggcccgacctgatcagccagctggagaggggcgaggccccctgggaccccgacccctgggaggccgaggacctgaggggcatctgccccggcggcggcggcccaagcagcggcgcccctcctcccagcggcggcagcccagccggctccccaacctctaccgaggagggcacctctgagtccgccacccccgagagcggccctggcacctccaccgagcccagcgagggcagcgcacccggcagccctgccggcagccccacctccacagaggagggaaccagcaccgagcccagcgaaggcagcgccccaggcaccagcaccgagcctagtgagcaggagattaaacggatcaacaagatcagaagaagacttgtgaaagacagcaacaccaagaaggccggcaagacaggccccatgaaaaccctgctggttagagtgatgacacccgatctgagagagcggctggaaaacctgagaaagaagcctgaaaatatcccccagcccatcagcaatacatctagagccaacctgaataagctgctgaccgattacaccgaaatgaagaaggcgatcctgcatgtgtactgggaagagttccagaaggaccctgtgggcctgatgagccgggtggcccagcctgccagcaagaagatcgatcagaacaagctgaaacctgagatggacgagaagggcaacctgaccaccgccggctttgcctgctctcagtgtggccagcccctgttcgtgtacaagctggagcaggtgtctgagaagggcaaggcttacaccaactacttcggacggtgcaatgtggccgagcacgaaaagctgatcctgctggcccagctgaagcccgagaaggatagcgacgaagccgtgacatatagcctgggaaagtttgggcagagggccctggatttctacagcattcatgtgaccaaggagtccacccaccccgtgaagcccctggcccagatcgccggaaacagatacgcctccggacctgtgggaaaggccctgagcgacgcatgtatgggcacaatcgcctccttcctgtctaagtaccaggacatcatcatcgaacaccagaaggtggtgaagggcaaccagaagagactggagagcctgcgggagctggccggcaaggaaaacctggaataccctagcgtgaccctgccacctcagcctcacaccaaggagggcgttgatgcctacaacgaagtgatcgcccgggtgcgaatgtgggtgaacctgaacctgtggcagaagctgaagctaagcagagatgatgccaagcctctgctgagactgaagggattcccttcctttcctctggtcgagagacaggccaacgaagtggactggtgggacatggtgtgtaacgtgaagaagctgatcaacgagaaaaaggaggatggcaaggtgttttggcagaatctggctggctacaagagacaggaagccctgagaccatacctgagcagcgaggaagatcggaagaagggaaagaaattcgctcggtaccagctgggcgacctgctgctgcacctggaaaagaagcacggcgaggactggggaaaggtgtacgacgaggcctgggagcggattgacaagaaagtggaaggcctgagcaagcacatcaagctggaagaggaacggagaagcgaggacgcccagagcaaggccgccctgaccgactggctgcgggctaaggccagcttcgtgatcgagggcctgaaggaggccgacaaggacgagttctgcagatgcgagctgaagctgcagaagtggtacggggacctgcggggaaagcccttcgccatcgaagccgagaacagcatcctggacatcagcggcttcagcaagcagtacaactgtgccttcatctggcagaaggacggcgtgaagaagctgaacctgtacctgatcatcaactacttcaagggcggcaagctgcggttcaagaagatcaaacctgaagccttcgaagccaacagattctacaccgtgatcaacaaaaagagcggcgagatcgtgcccatggaggtgaacttcaacttcgacgaccccaacctgatcatcctgcctctggcctttggcaagagacagggcagagaattcatctggaacgacctgctgtccctggaaaccggcagcctgaagctggccaacggaagagtgatcgagaagacactgtacaacagaagaacccggcaggatgagcctgccctgttcgtggccctgaccttcgagcggcgggaggtcctggactcctccaatatcaaaccaatgaacctgatcggcgtggcaagaggcgaaaacatccccgccgtgatcgccctgaccgaccccgagggctgcccactgagccggtttaaggatagcctgggaaacccaacccacatcctgagaatcggcgagagctataaggagaagcagcggaccatccaggccaagaaggaggtggagcagcggagagccggcggctacagccggaagtacgccagcaaagccaagaatctggcagacgatatggtgagaaacaccgctagagatctgctgtactacgccgtgacccaggatgccatgctgatcttcgccaacctgagccggggcttcggccggcagggcaagcggaccttcatggccgagagacagtacacacggatggaggactggctgaccgccaagctggcctacgagggcctgagcaagacctacctgtccaagacactggcccagtacacctccaagacatgcagcaactgtgggtttaccatcaccagcgccgactacgacagggtgctggagaagctgaagaagacagcaacaggctggatgaccacaattaacggcaaggagctgaaggtggagggccagattacctactacaacagatacaagagacagaacgtagtcaaggacctgtccgtcgagctggatagactgagcgaagaatctgtgaacaacgacatctcctcctggacaaagggcagaagcggagaagctctgagcctcctgaagaaaagattctcccatagacccgtgcaggagaagttcgtgtgcctgaactgcggcttcgagacacacgcagccgagcaagccgccctgaacatcgccagatcctggctgttcctgcggagccaggagtacaagaaataccagacaaacaagacaaccggcaacaccgataagagagccttcgtcgagacctggcagtccttttaccggaagaagcttaaggaggtgtggaaacctgccgtgcggtctggcggatctggcggaggctccaccagccccaagaaaaagagaaaagtctaagctgccttctgcggggcttgccttctggccatgcccttcttctctcccttgcacctgtacctcttggtctttgaataaagcctgagtaggaaggctagcaaaaaaaaaaaaaaaaaaaaaaaaaaaaaaaaaaaaaaaaaaaaaaaaaaaaaaaaaaaaaaaaaaaaaaaaaaaaaaaa

SEQ ID NO: 12283 - RNA, 5785 nt, synthetic construct
  source 1..5785: mol_type = other RNA
aggaaataagagagaaaagaagagtaagaagaaatataagagccaccatggcccctaagaagaagcgtaaagtgagccggatggaacgcctcgtctacgaggtgcggcagaagtgcagaaacatcgaggacatctgcatctcctgcggatctctgaacgtgaccctggagcacccactgttcatcggcggcatgtgccagaactgtaaaaactgttttctggagtgtgcctatcaatacgacgatgacggctaccagagctactgcaccatctgttgcggcggaagagaggtgctgatgtgtggaaataacaactgctgccggtgcttctgcgtggaatgcgtggacctgctggtgggccccggcgccgcccaggccgctattaaggaagatccttggaactgctacatgtgcggccacaagggcacatacggcctgctgagacggagagaggactggcctagcagactgcagatgttcttcgccaataaccacgaccaggagttcgacccccctaaggtgtaccctcccgtccccgccgagaagagaaagcccatccgggtcctgagcctgttcgatggcatcgccaccggtctgctggtgctgaaggacctgggcatccaggtggataggtacattgcctccgaggtgtgcgaggactccatcaccgtgggaatggtgcgtcatcagggcaagatcatgtacgtgggcgacgtgcggagcgtgacacagaagcatatccaggagtggggccctttcgacctggtgatcggcggcagcccttgcaatgacctgagcatcgtgaacccagcccggaagggcctgtacgagggaaccggcagactgttcttcgagttttacagactgctgcacgacgcccggcctaaggaaggcgacgaccggcccttcttttggctgttcgagaatgtggtggccatgggagtcagcgacaagcgggatattagccggttcctggagagcaaccccgtgatgatcgatgccaaggaagtgagcgccgcccaccgggccagatacttctggggcaatctgcctggcatgaacagacccctggccagcaccgtgaacgacaagctggagctgcaggagtgcctggagcacggccggatcgccaagttcagcaaggtgagaaccatcaccacccgaagcaacagcatcaaacaaggcaaggaccagcactttcctgtgttcatgaacgagaaggaggacatcctgtggtgtaccgagatggagagagtgttcgggttcccagtccactacacagatgtcagcaacatgtctagactggccagacagagactgctgggaagaagctggtccgtccctgtgatcagacacctgttcgcccctctgaaggagtacttcgcctgcgtgagcagcggcaacagcaacgccaacagccggggccccagcttctctagcggcctggtgccactgtccctgagagggagccacatgggccccatggagatctacaaaaccgtgagcgcctggaagcggcagcctgtgcgcgtgctgagcctgtttcggaatatcgataaagtcctgaaaagcctgggattcctggagagcggctctggctccggcggtggcaccctgaagtacgtggaggatgtgacaaacgtggtcagacgggatgtggagaagtggggccccttcgatctggtgtacggcagcacccaacccctgggcagctcttgtgaccggtgccctggctggtacatgtttcagttccaccggatcctgcagtacgccctgccgagacaggagtcccagcggccattcttttggattttcatggacaacttgctgctgaccgaggatgaccaggaaactaccactcggttcctgcagaccgaagccgtgaccctgcaggacgtgagaggccgggactaccagaacgccatgcgggtgtggtccaacatccctggactgaaaagcaagcacgcacctctgacccctaaagaagaggagtacctgcaggcccaggtgcggagcagaagcaagctggacgcccctaaggtggatctgctggtgaagaattgcctcctgcccctgagagagtacttcaagtatttcagccagaatagtctgcccctgggaggcagcggcggcggcatgcccctgggcagcgagctgttcagggacgtggccatcgtgttcagccaggaggagtggcagtggctggcccccgcccagagggacctgtacagggacgtgatgctggagacctacagcaacctggtgagcctgggcctggccatcagcaagcccgacgtgatcagcttcctggagcagggcaaggagccctggatggtggagagggtggtggccggcggcctgtgccccgtgctggagagcggcggcccaagcagcggcgcccctcctcccagcggcggcagcccagccggctccccaacctctaccgaggagggcacctctgagtccgccacccccgagagcggccctggcacctccaccgagcccagcgagggcagcgcacccggcagccctgccggcagccccacctccacagaggagggaaccagcaccgagcccagcgaaggcagcgccccaggcaccagcaccgagcctagtgagcaggagattaaacggatcaacaagatcagaagaagacttgtgaaagacagcaacaccaagaaggccggcaagacaggccccatgaaaaccctgctggttagagtgatgacacccgatctgagagagcggctggaaaacctgagaaagaagcctgaaaatatcccccagcccatcagcaatacatctagagccaacctgaataagctgctgaccgattacaccgaaatgaagaaggcgatcctgcatgtgtactgggaagagttccagaaggaccctgtgggcctgatgagccgggtggcccagcctgccagcaagaagatcgatcagaacaagctgaaacctgagatggacgagaagggcaacctgaccaccgccggctttgcctgctctcagtgtggccagcccctgttcgtgtacaagctggagcaggtgtctgagaagggcaaggcttacaccaactacttcggacggtgcaatgtggccgagcacgaaaagctgatcctgctggcccagctgaagcccgagaaggatagcgacgaagccgtgacatatagcctgggaaagtttgggcagagggccctggatttctacagcattcatgtgaccaaggagtccacccaccccgtgaagcccctggcccagatcgccggaaacagatacgcctccggacctgtgggaaaggccctgagcgacgcatgtatgggcacaatcgcctccttcctgtctaagtaccaggacatcatcatcgaacaccagaaggtggtgaagggcaaccagaagagactggagagcctgcgggagctggccggcaaggaaaacctggaataccctagcgtgaccctgccacctcagcctcacaccaaggagggcgttgatgcctacaacgaagtgatcgcccgggtgcgaatgtgggtgaacctgaacctgtggcagaagctgaagctaagcagagatgatgccaagcctctgctgagactgaagggattcccttcctttcctctggtcgagagacaggccaacgaagtggactggtgggacatggtgtgtaacgtgaagaagctgatcaacgagaaaaaggaggatggcaaggtgttttggcagaatctggctggctacaagagacaggaagccctgagaccatacctgagcagcgaggaagatcggaagaagggaaagaaattcgctcggtaccagctgggcgacctgctgctgcacctggaaaagaagcacggcgaggactggggaaaggtgtacgacgaggcctgggagcggattgacaagaaagtggaaggcctgagcaagcacatcaagctggaagaggaacggagaagcgaggacgcccagagcaaggccgccctgaccgactggctgcgggctaaggccagcttcgtgatcgagggcctgaaggaggccgacaaggacgagttctgcagatgcgagctgaagctgcagaagtggtacggggacctgcggggaaagcccttcgccatcgaagccgagaacagcatcctggacatcagcggcttcagcaagcagtacaactgtgccttcatctggcagaaggacggcgtgaagaagctgaacctgtacctgatcatcaactacttcaagggcggcaagctgcggttcaagaagatcaaacctgaagccttcgaagccaacagattctacaccgtgatcaacaaaaagagcggcgagatcgtgcccatggaggtgaacttcaacttcgacgaccccaacctgatcatcctgcctctggcctttggcaagagacagggcagagaattcatctggaacgacctgctgtccctggaaaccggcagcctgaagctggccaacggaagagtgatcgagaagacactgtacaacagaagaacccggcaggatgagcctgccctgttcgtggccctgaccttcgagcggcgggaggtcctggactcctccaatatcaaaccaatgaacctgatcggcgtggcaagaggcgaaaacatccccgccgtgatcgccctgaccgaccccgagggctgcccactgagccggtttaaggatagcctgggaaacccaacccacatcctgagaatcggcgagagctataaggagaagcagcggaccatccaggccaagaaggaggtggagcagcggagagccggcggctacagccggaagtacgccagcaaagccaagaatctggcagacgatatggtgagaaacaccgctagagatctgctgtactacgccgtgacccaggatgccatgctgatcttcgccaacctgagccggggcttcggccggcagggcaagcggaccttcatggccgagagacagtacacacggatggaggactggctgaccgccaagctggcctacgagggcctgagcaagacctacctgtccaagacactggcccagtacacctccaagacatgcagcaactgtgggtttaccatcaccagcgccgactacgacagggtgctggagaagctgaagaagacagcaacaggctggatgaccacaattaacggcaaggagctgaaggtggagggccagattacctactacaacagatacaagagacagaacgtagtcaaggacctgtccgtcgagctggatagactgagcgaagaatctgtgaacaacgacatctcctcctggacaaagggcagaagcggagaagctctgagcctcctgaagaaaagattctcccatagacccgtgcaggagaagttcgtgtgcctgaactgcggcttcgagacacacgcagccgagcaagccgccctgaacatcgccagatcctggctgttcctgcggagccaggagtacaagaaataccagacaaacaagacaaccggcaacaccgataagagagccttcgtcgagacctggcagtccttttaccggaagaagcttaaggaggtgtggaaacctgccgtgcggtctggcggatctggcggaggctccaccagccccaagaaaaagagaaaagtctaagctgccttctgcggggcttgccttctggccatgcccttcttctctcccttgcacctgtacctcttggtctttgaataaagcctgagtaggaaggctagcaaaaaaaaaaaaaaaaaaaaaaaaaaaaaaaaaaaaaaaaaaaaaaaaaaaaaaaaaaaaaaaaaaaaaaaaaaaaaaaa

SEQ ID NO: 12284 - RNA, 5785 nt, synthetic construct
  source 1..5785: mol_type = other RNA
aggaaataagagagaaaagaagagtaagaagaaatataagagccaccatggcccctaagaagaagcgtaaagtgagccggatggaacgcctcgtctacgaggtgcggcagaagtgcagaaacatcgaggacatctgcatctcctgcggatctctgaacgtgaccctggagcacccactgttcatcggcggcatgtgccagaactgtaaaaactgttttctggagtgtgcctatcaatacgacgatgacggctaccagagctactgcaccatctgttgcggcggaagagaggtgctgatgtgtggaaataacaactgctgccggtgcttctgcgtggaatgcgtggacctgctggtgggccccggcgccgcccaggccgctattaaggaagatccttggaactgctacatgtgcggccacaagggcacatacggcctgctgagacggagagaggactggcctagcagactgcagatgttcttcgccaataaccacgaccaggagttcgacccccctaaggtgtaccctcccgtccccgccgagaagagaaagcccatccgggtcctgagcctgttcgatggcatcgccaccggtctgctggtgctgaaggacctgggcatccaggtggataggtacattgcctccgaggtgtgcgaggactccatcaccgtgggaatggtgcgtcatcagggcaagatcatgtacgtgggcgacgtgcggagcgtgacacagaagcatatccaggagtggggccctttcgacctggtgatcggcggcagcccttgcaatgacctgagcatcgtgaacccagcccggaagggcctgtacgagggaaccggcagactgttcttcgagttttacagactgctgcacgacgcccggcctaaggaaggcgacgaccggcccttcttttggctgttcgagaatgtggtggccatgggagtcagcgacaagcgggatattagccggttcctggagagcaaccccgtgatgatcgatgccaaggaagtgagcgccgcccaccgggccagatacttctggggcaatctgcctggcatgaacagacccctggccagcaccgtgaacgacaagctggagctgcaggagtgcctggagcacggccggatcgccaagttcagcaaggtgagaaccatcaccacccgaagcaacagcatcaaacaaggcaaggaccagcactttcctgtgttcatgaacgagaaggaggacatcctgtggtgtaccgagatggagagagtgttcgggttcccagtccactacacagatgtcagcaacatgtctagactggccagacagagactgctgggaagaagctggtccgtccctgtgatcagacacctgttcgcccctctgaaggagtacttcgcctgcgtgagcagcggcaacagcaacgccaacagccggggccccagcttctctagcggcctggtgccactgtccctgagagggagccacatgggccccatggagatctacaaaaccgtgagcgcctggaagcggcagcctgtgcgcgtgctgagcctgtttcggaatatcgataaagtcctgaaaagcctgggattcctggagagcggctctggctccggcggtggcaccctgaagtacgtggaggatgtgacaaacgtggtcagacgggatgtggagaagtggggccccttcgatctggtgtacggcagcacccaacccctgggcagctcttgtgaccggtgccctggctggtacatgtttcagttccaccggatcctgcagtacgccctgccgagacaggagtcccagcggccattcttttggattttcatggacaacttgctgctgaccgaggatgaccaggaaactaccactcggttcctgcagaccgaagccgtgaccctgcaggacgtgagaggccgggactaccagaacgccatgcgggtgtggtccaacatccctggactgaaaagcaagcacgcacctctgacccctaaagaagaggagtacctgcaggcccaggtgcggagcagaagcaagctggacgcccctaaggtggatctgctggtgaagaattgcctcctgcccctgagagagtacttcaagtatttcagccagaatagtctgcccctgggaggcagcggcggcggcctggcccccgaggaccacggcagcagctacgagggcagcgtgagcttcagggacgtggccatcgacttcagcagggaggagtggaggcacctggacctgagccagaggaacctgtacagggacgtgatgctggagacctacagccacctgctgagcgtgggctaccaggtgcccgaggccgaggtggtgatgctggagcagggcaaggagccctgggccctgcagggcgagaggcccaggcacggcggcccaagcagcggcgcccctcctcccagcggcggcagcccagccggctccccaacctctaccgaggagggcacctctgagtccgccacccccgagagcggccctggcacctccaccgagcccagcgagggcagcgcacccggcagccctgccggcagccccacctccacagaggagggaaccagcaccgagcccagcgaaggcagcgccccaggcaccagcaccgagcctagtgagcaggagattaaacggatcaacaagatcagaagaagacttgtgaaagacagcaacaccaagaaggccggcaagacaggccccatgaaaaccctgctggttagagtgatgacacccgatctgagagagcggctggaaaacctgagaaagaagcctgaaaatatcccccagcccatcagcaatacatctagagccaacctgaataagctgctgaccgattacaccgaaatgaagaaggcgatcctgcatgtgtactgggaagagttccagaaggaccctgtgggcctgatgagccgggtggcccagcctgccagcaagaagatcgatcagaacaagctgaaacctgagatggacgagaagggcaacctgaccaccgccggctttgcctgctctcagtgtggccagcccctgttcgtgtacaagctggagcaggtgtctgagaagggcaaggcttacaccaactacttcggacggtgcaatgtggccgagcacgaaaagctgatcctgctggcccagctgaagcccgagaaggatagcgacgaagccgtgacatatagcctgggaaagtttgggcagagggccctggatttctacagcattcatgtgaccaaggagtccacccaccccgtgaagcccctggcccagatcgccggaaacagatacgcctccggacctgtgggaaaggccctgagcgacgcatgtatgggcacaatcgcctccttcctgtctaagtaccaggacatcatcatcgaacaccagaaggtggtgaagggcaaccagaagagactggagagcctgcgggagctggccggcaaggaaaacctggaataccctagcgtgaccctgccacctcagcctcacaccaaggagggcgttgatgcctacaacgaagtgatcgcccgggtgcgaatgtgggtgaacctgaacctgtggcagaagctgaagctaagcagagatgatgccaagcctctgctgagactgaagggattcccttcctttcctctggtcgagagacaggccaacgaagtggactggtgggacatggtgtgtaacgtgaagaagctgatcaacgagaaaaaggaggatggcaaggtgttttggcagaatctggctggctacaagagacaggaagccctgagaccatacctgagcagcgaggaagatcggaagaagggaaagaaattcgctcggtaccagctgggcgacctgctgctgcacctggaaaagaagcacggcgaggactggggaaaggtgtacgacgaggcctgggagcggattgacaagaaagtggaaggcctgagcaagcacatcaagctggaagaggaacggagaagcgaggacgcccagagcaaggccgccctgaccgactggctgcgggctaaggccagcttcgtgatcgagggcctgaaggaggccgacaaggacgagttctgcagatgcgagctgaagctgcagaagtggtacggggacctgcggggaaagcccttcgccatcgaagccgagaacagcatcctggacatcagcggcttcagcaagcagtacaactgtgccttcatctggcagaaggacggcgtgaagaagctgaacctgtacctgatcatcaactacttcaagggcggcaagctgcggttcaagaagatcaaacctgaagccttcgaagccaacagattctacaccgtgatcaacaaaaagagcggcgagatcgtgcccatggaggtgaacttcaacttcgacgaccccaacctgatcatcctgcctctggcctttggcaagagacagggcagagaattcatctggaacgacctgctgtccctggaaaccggcagcctgaagctggccaacggaagagtgatcgagaagacactgtacaacagaagaacccggcaggatgagcctgccctgttcgtggccctgaccttcgagcggcgggaggtcctggactcctccaatatcaaaccaatgaacctgatcggcgtggcaagaggcgaaaacatccccgccgtgatcgccctgaccgaccccgagggctgcccactgagccggtttaaggatagcctgggaaacccaacccacatcctgagaatcggcgagagctataaggagaagcagcggaccatccaggccaagaaggaggtggagcagcggagagccggcggctacagccggaagtacgccagcaaagccaagaatctggcagacgatatggtgagaaacaccgctagagatctgctgtactacgccgtgacccaggatgccatgctgatcttcgccaacctgagccggggcttcggccggcagggcaagcggaccttcatggccgagagacagtacacacggatggaggactggctgaccgccaagctggcctacgagggcctgagcaagacctacctgtccaagacactggcccagtacacctccaagacatgcagcaactgtgggtttaccatcaccagcgccgactacgacagggtgctggagaagctgaagaagacagcaacaggctggatgaccacaattaacggcaaggagctgaaggtggagggccagattacctactacaacagatacaagagacagaacgtagtcaaggacctgtccgtcgagctggatagactgagcgaagaatctgtgaacaacgacatctcctcctggacaaagggcagaagcggagaagctctgagcctcctgaagaaaagattctcccatagacccgtgcaggagaagttcgtgtgcctgaactgcggcttcgagacacacgcagccgagcaagccgccctgaacatcgccagatcctggctgttcctgcggagccaggagtacaagaaataccagacaaacaagacaaccggcaacaccgataagagagccttcgtcgagacctggcagtccttttaccggaagaagcttaaggaggtgtggaaacctgccgtgcggtctggcggatctggcggaggctccaccagccccaagaaaaagagaaaagtctaagctgccttctgcggggcttgccttctggccatgcccttcttctctcccttgcacctgtacctcttggtctttgaataaagcctgagtaggaaggctagcaaaaaaaaaaaaaaaaaaaaaaaaaaaaaaaaaaaaaaaaaaaaaaaaaaaaaaaaaaaaaaaaaaaaaaaaaaaaaaaa

SEQ ID NO: 12285 - RNA, 5785 nt, synthetic construct
  source 1..5785: mol_type = other RNA
aggaaataagagagaaaagaagagtaagaagaaatataagagccaccatggcccctaagaagaagcgtaaagtgagccggatggaacgcctcgtctacgaggtgcggcagaagtgcagaaacatcgaggacatctgcatctcctgcggatctctgaacgtgaccctggagcacccactgttcatcggcggcatgtgccagaactgtaaaaactgttttctggagtgtgcctatcaatacgacgatgacggctaccagagctactgcaccatctgttgcggcggaagagaggtgctgatgtgtggaaataacaactgctgccggtgcttctgcgtggaatgcgtggacctgctggtgggccccggcgccgcccaggccgctattaaggaagatccttggaactgctacatgtgcggccacaagggcacatacggcctgctgagacggagagaggactggcctagcagactgcagatgttcttcgccaataaccacgaccaggagttcgacccccctaaggtgtaccctcccgtccccgccgagaagagaaagcccatccgggtcctgagcctgttcgatggcatcgccaccggtctgctggtgctgaaggacctgggcatccaggtggataggtacattgcctccgaggtgtgcgaggactccatcaccgtgggaatggtgcgtcatcagggcaagatcatgtacgtgggcgacgtgcggagcgtgacacagaagcatatccaggagtggggccctttcgacctggtgatcggcggcagcccttgcaatgacctgagcatcgtgaacccagcccggaagggcctgtacgagggaaccggcagactgttcttcgagttttacagactgctgcacgacgcccggcctaaggaaggcgacgaccggcccttcttttggctgttcgagaatgtggtggccatgggagtcagcgacaagcgggatattagccggttcctggagagcaaccccgtgatgatcgatgccaaggaagtgagcgccgcccaccgggccagatacttctggggcaatctgcctggcatgaacagacccctggccagcaccgtgaacgacaagctggagctgcaggagtgcctggagcacggccggatcgccaagttcagcaaggtgagaaccatcaccacccgaagcaacagcatcaaacaaggcaaggaccagcactttcctgtgttcatgaacgagaaggaggacatcctgtggtgtaccgagatggagagagtgttcgggttcccagtccactacacagatgtcagcaacatgtctagactggccagacagagactgctgggaagaagctggtccgtccctgtgatcagacacctgttcgcccctctgaaggagtacttcgcctgcgtgagcagcggcaacagcaacgccaacagccggggccccagcttctctagcggcctggtgccactgtccctgagagggagccacatgggccccatggagatctacaaaaccgtgagcgcctggaagcggcagcctgtgcgcgtgctgagcctgtttcggaatatcgataaagtcctgaaaagcctgggattcctggagagcggctctggctccggcggtggcaccctgaagtacgtggaggatgtgacaaacgtggtcagacgggatgtggagaagtggggccccttcgatctggtgtacggcagcacccaacccctgggcagctcttgtgaccggtgccctggctggtacatgtttcagttccaccggatcctgcagtacgccctgccgagacaggagtcccagcggccattcttttggattttcatggacaacttgctgctgaccgaggatgaccaggaaactaccactcggttcctgcagaccgaagccgtgaccctgcaggacgtgagaggccgggactaccagaacgccatgcgggtgtggtccaacatccctggactgaaaagcaagcacgcacctctgacccctaaagaagaggagtacctgcaggcccaggtgcggagcagaagcaagctggacgcccctaaggtggatctgctggtgaagaattgcctcctgcccctgagagagtacttcaagtatttcagccagaatagtctgcccctgggaggcagcggcggcggcgacgaggccctgatggccttcaaggacgtggccgtggccttcacccagaaggagtggaagctgctgagccccgcccagaggaccctgtacagggacgtgatgctggagaactacagccacatggtgagcctgggcatcgccttccccaagcccaagctgatcacccagctggagcagggcgaggagccctggagggaggagagcgagagcctgctggacctgtgccccgccgagcccaggaccggcggcccaagcagcggcgcccctcctcccagcggcggcagcccagccggctccccaacctctaccgaggagggcacctctgagtccgccacccccgagagcggccctggcacctccaccgagcccagcgagggcagcgcacccggcagccctgccggcagccccacctccacagaggagggaaccagcaccgagcccagcgaaggcagcgccccaggcaccagcaccgagcctagtgagcaggagattaaacggatcaacaagatcagaagaagacttgtgaaagacagcaacaccaagaaggccggcaagacaggccccatgaaaaccctgctggttagagtgatgacacccgatctgagagagcggctggaaaacctgagaaagaagcctgaaaatatcccccagcccatcagcaatacatctagagccaacctgaataagctgctgaccgattacaccgaaatgaagaaggcgatcctgcatgtgtactgggaagagttccagaaggaccctgtgggcctgatgagccgggtggcccagcctgccagcaagaagatcgatcagaacaagctgaaacctgagatggacgagaagggcaacctgaccaccgccggctttgcctgctctcagtgtggccagcccctgttcgtgtacaagctggagcaggtgtctgagaagggcaaggcttacaccaactacttcggacggtgcaatgtggccgagcacgaaaagctgatcctgctggcccagctgaagcccgagaaggatagcgacgaagccgtgacatatagcctgggaaagtttgggcagagggccctggatttctacagcattcatgtgaccaaggagtccacccaccccgtgaagcccctggcccagatcgccggaaacagatacgcctccggacctgtgggaaaggccctgagcgacgcatgtatgggcacaatcgcctccttcctgtctaagtaccaggacatcatcatcgaacaccagaaggtggtgaagggcaaccagaagagactggagagcctgcgggagctggccggcaaggaaaacctggaataccctagcgtgaccctgccacctcagcctcacaccaaggagggcgttgatgcctacaacgaagtgatcgcccgggtgcgaatgtgggtgaacctgaacctgtggcagaagctgaagctaagcagagatgatgccaagcctctgctgagactgaagggattcccttcctttcctctggtcgagagacaggccaacgaagtggactggtgggacatggtgtgtaacgtgaagaagctgatcaacgagaaaaaggaggatggcaaggtgttttggcagaatctggctggctacaagagacaggaagccctgagaccatacctgagcagcgaggaagatcggaagaagggaaagaaattcgctcggtaccagctgggcgacctgctgctgcacctggaaaagaagcacggcgaggactggggaaaggtgtacgacgaggcctgggagcggattgacaagaaagtggaaggcctgagcaagcacatcaagctggaagaggaacggagaagcgaggacgcccagagcaaggccgccctgaccgactggctgcgggctaaggccagcttcgtgatcgagggcctgaaggaggccgacaaggacgagttctgcagatgcgagctgaagctgcagaagtggtacggggacctgcggggaaagcccttcgccatcgaagccgagaacagcatcctggacatcagcggcttcagcaagcagtacaactgtgccttcatctggcagaaggacggcgtgaagaagctgaacctgtacctgatcatcaactacttcaagggcggcaagctgcggttcaagaagatcaaacctgaagccttcgaagccaacagattctacaccgtgatcaacaaaaagagcggcgagatcgtgcccatggaggtgaacttcaacttcgacgaccccaacctgatcatcctgcctctggcctttggcaagagacagggcagagaattcatctggaacgacctgctgtccctggaaaccggcagcctgaagctggccaacggaagagtgatcgagaagacactgtacaacagaagaacccggcaggatgagcctgccctgttcgtggccctgaccttcgagcggcgggaggtcctggactcctccaatatcaaaccaatgaacctgatcggcgtggcaagaggcgaaaacatccccgccgtgatcgccctgaccgaccccgagggctgcccactgagccggtttaaggatagcctgggaaacccaacccacatcctgagaatcggcgagagctataaggagaagcagcggaccatccaggccaagaaggaggtggagcagcggagagccggcggctacagccggaagtacgccagcaaagccaagaatctggcagacgatatggtgagaaacaccgctagagatctgctgtactacgccgtgacccaggatgccatgctgatcttcgccaacctgagccggggcttcggccggcagggcaagcggaccttcatggccgagagacagtacacacggatggaggactggctgaccgccaagctggcctacgagggcctgagcaagacctacctgtccaagacactggcccagtacacctccaagacatgcagcaactgtgggtttaccatcaccagcgccgactacgacagggtgctggagaagctgaagaagacagcaacaggctggatgaccacaattaacggcaaggagctgaaggtggagggccagattacctactacaacagatacaagagacagaacgtagtcaaggacctgtccgtcgagctggatagactgagcgaagaatctgtgaacaacgacatctcctcctggacaaagggcagaagcggagaagctctgagcctcctgaagaaaagattctcccatagacccgtgcaggagaagttcgtgtgcctgaactgcggcttcgagacacacgcagccgagcaagccgccctgaacatcgccagatcctggctgttcctgcggagccaggagtacaagaaataccagacaaacaagacaaccggcaacaccgataagagagccttcgtcgagacctggcagtccttttaccggaagaagcttaaggaggtgtggaaacctgccgtgcggtctggcggatctggcggaggctccaccagccccaagaaaaagagaaaagtctaagctgccttctgcggggcttgccttctggccatgcccttcttctctcccttgcacctgtacctcttggtctttgaataaagcctgagtaggaaggctagcaaaaaaaaaaaaaaaaaaaaaaaaaaaaaaaaaaaaaaaaaaaaaaaaaaaaaaaaaaaaaaaaaaaaaaaaaaaaaaaa

SEQ ID NO: 12286 - RNA, 5785 nt, synthetic construct
  source 1..5785: mol_type = other RNA
aggaaataagagagaaaagaagagtaagaagaaatataagagccaccatggcccctaagaagaagcgtaaagtgagccggatggaacgcctcgtctacgaggtgcggcagaagtgcagaaacatcgaggacatctgcatctcctgcggatctctgaacgtgaccctggagcacccactgttcatcggcggcatgtgccagaactgtaaaaactgttttctggagtgtgcctatcaatacgacgatgacggctaccagagctactgcaccatctgttgcggcggaagagaggtgctgatgtgtggaaataacaactgctgccggtgcttctgcgtggaatgcgtggacctgctggtgggccccggcgccgcccaggccgctattaaggaagatccttggaactgctacatgtgcggccacaagggcacatacggcctgctgagacggagagaggactggcctagcagactgcagatgttcttcgccaataaccacgaccaggagttcgacccccctaaggtgtaccctcccgtccccgccgagaagagaaagcccatccgggtcctgagcctgttcgatggcatcgccaccggtctgctggtgctgaaggacctgggcatccaggtggataggtacattgcctccgaggtgtgcgaggactccatcaccgtgggaatggtgcgtcatcagggcaagatcatgtacgtgggcgacgtgcggagcgtgacacagaagcatatccaggagtggggccctttcgacctggtgatcggcggcagcccttgcaatgacctgagcatcgtgaacccagcccggaagggcctgtacgagggaaccggcagactgttcttcgagttttacagactgctgcacgacgcccggcctaaggaaggcgacgaccggcccttcttttggctgttcgagaatgtggtggccatgggagtcagcgacaagcgggatattagccggttcctggagagcaaccccgtgatgatcgatgccaaggaagtgagcgccgcccaccgggccagatacttctggggcaatctgcctggcatgaacagacccctggccagcaccgtgaacgacaagctggagctgcaggagtgcctggagcacggccggatcgccaagttcagcaaggtgagaaccatcaccacccgaagcaacagcatcaaacaaggcaaggaccagcactttcctgtgttcatgaacgagaaggaggacatcctgtggtgtaccgagatggagagagtgttcgggttcccagtccactacacagatgtcagcaacatgtctagactggccagacagagactgctgggaagaagctggtccgtccctgtgatcagacacctgttcgcccctctgaaggagtacttcgcctgcgtgagcagcggcaacagcaacgccaacagccggggccccagcttctctagcggcctggtgccactgtccctgagagggagccacatgggccccatggagatctacaaaaccgtgagcgcctggaagcggcagcctgtgcgcgtgctgagcctgtttcggaatatcgataaagtcctgaaaagcctgggattcctggagagcggctctggctccggcggtggcaccctgaagtacgtggaggatgtgacaaacgtggtcagacgggatgtggagaagtggggccccttcgatctggtgtacggcagcacccaacccctgggcagctcttgtgaccggtgccctggctggtacatgtttcagttccaccggatcctgcagtacgccctgccgagacaggagtcccagcggccattcttttggattttcatggacaacttgctgctgaccgaggatgaccaggaaactaccactcggttcctgcagaccgaagccgtgaccctgcaggacgtgagaggccgggactaccagaacgccatgcgggtgtggtccaacatccctggactgaaaagcaagcacgcacctctgacccctaaagaagaggagtacctgcaggcccaggtgcggagcagaagcaagctggacgcccctaaggtggatctgctggtgaagaattgcctcctgcccctgagagagtacttcaagtatttcagccagaatagtctgcccctgggaggcagcggcggcggcgcccaggagagcgtgatgttcagcgacgtgagcatcgacttcagccaggaggagtgggagtgcctgaacgacgaccagagggccctgtacagggacgtgatgctggagaactacagcaacctggtgagcatgggccacagcatcagcaagcccgacgtgatcagcttcctggagcagggcaaggagccctggctggtggacagggagctgaccaggggccagtggcccgtgctggagagcaggggcggcccaagcagcggcgcccctcctcccagcggcggcagcccagccggctccccaacctctaccgaggagggcacctctgagtccgccacccccgagagcggccctggcacctccaccgagcccagcgagggcagcgcacccggcagccctgccggcagccccacctccacagaggagggaaccagcaccgagcccagcgaaggcagcgccccaggcaccagcaccgagcctagtgagcaggagattaaacggatcaacaagatcagaagaagacttgtgaaagacagcaacaccaagaaggccggcaagacaggccccatgaaaaccctgctggttagagtgatgacacccgatctgagagagcggctggaaaacctgagaaagaagcctgaaaatatcccccagcccatcagcaatacatctagagccaacctgaataagctgctgaccgattacaccgaaatgaagaaggcgatcctgcatgtgtactgggaagagttccagaaggaccctgtgggcctgatgagccgggtggcccagcctgccagcaagaagatcgatcagaacaagctgaaacctgagatggacgagaagggcaacctgaccaccgccggctttgcctgctctcagtgtggccagcccctgttcgtgtacaagctggagcaggtgtctgagaagggcaaggcttacaccaactacttcggacggtgcaatgtggccgagcacgaaaagctgatcctgctggcccagctgaagcccgagaaggatagcgacgaagccgtgacatatagcctgggaaagtttgggcagagggccctggatttctacagcattcatgtgaccaaggagtccacccaccccgtgaagcccctggcccagatcgccggaaacagatacgcctccggacctgtgggaaaggccctgagcgacgcatgtatgggcacaatcgcctccttcctgtctaagtaccaggacatcatcatcgaacaccagaaggtggtgaagggcaaccagaagagactggagagcctgcgggagctggccggcaaggaaaacctggaataccctagcgtgaccctgccacctcagcctcacaccaaggagggcgttgatgcctacaacgaagtgatcgcccgggtgcgaatgtgggtgaacctgaacctgtggcagaagctgaagctaagcagagatgatgccaagcctctgctgagactgaagggattcccttcctttcctctggtcgagagacaggccaacgaagtggactggtgggacatggtgtgtaacgtgaagaagctgatcaacgagaaaaaggaggatggcaaggtgttttggcagaatctggctggctacaagagacaggaagccctgagaccatacctgagcagcgaggaagatcggaagaagggaaagaaattcgctcggtaccagctgggcgacctgctgctgcacctggaaaagaagcacggcgaggactggggaaaggtgtacgacgaggcctgggagcggattgacaagaaagtggaaggcctgagcaagcacatcaagctggaagaggaacggagaagcgaggacgcccagagcaaggccgccctgaccgactggctgcgggctaaggccagcttcgtgatcgagggcctgaaggaggccgacaaggacgagttctgcagatgcgagctgaagctgcagaagtggtacggggacctgcggggaaagcccttcgccatcgaagccgagaacagcatcctggacatcagcggcttcagcaagcagtacaactgtgccttcatctggcagaaggacggcgtgaagaagctgaacctgtacctgatcatcaactacttcaagggcggcaagctgcggttcaagaagatcaaacctgaagccttcgaagccaacagattctacaccgtgatcaacaaaaagagcggcgagatcgtgcccatggaggtgaacttcaacttcgacgaccccaacctgatcatcctgcctctggcctttggcaagagacagggcagagaattcatctggaacgacctgctgtccctggaaaccggcagcctgaagctggccaacggaagagtgatcgagaagacactgtacaacagaagaacccggcaggatgagcctgccctgttcgtggccctgaccttcgagcggcgggaggtcctggactcctccaatatcaaaccaatgaacctgatcggcgtggcaagaggcgaaaacatccccgccgtgatcgccctgaccgaccccgagggctgcccactgagccggtttaaggatagcctgggaaacccaacccacatcctgagaatcggcgagagctataaggagaagcagcggaccatccaggccaagaaggaggtggagcagcggagagccggcggctacagccggaagtacgccagcaaagccaagaatctggcagacgatatggtgagaaacaccgctagagatctgctgtactacgccgtgacccaggatgccatgctgatcttcgccaacctgagccggggcttcggccggcagggcaagcggaccttcatggccgagagacagtacacacggatggaggactggctgaccgccaagctggcctacgagggcctgagcaagacctacctgtccaagacactggcccagtacacctccaagacatgcagcaactgtgggtttaccatcaccagcgccgactacgacagggtgctggagaagctgaagaagacagcaacaggctggatgaccacaattaacggcaaggagctgaaggtggagggccagattacctactacaacagatacaagagacagaacgtagtcaaggacctgtccgtcgagctggatagactgagcgaagaatctgtgaacaacgacatctcctcctggacaaagggcagaagcggagaagctctgagcctcctgaagaaaagattctcccatagacccgtgcaggagaagttcgtgtgcctgaactgcggcttcgagacacacgcagccgagcaagccgccctgaacatcgccagatcctggctgttcctgcggagccaggagtacaagaaataccagacaaacaagacaaccggcaacaccgataagagagccttcgtcgagacctggcagtccttttaccggaagaagcttaaggaggtgtggaaacctgccgtgcggtctggcggatctggcggaggctccaccagccccaagaaaaagagaaaagtctaagctgccttctgcggggcttgccttctggccatgcccttcttctctcccttgcacctgtacctcttggtctttgaataaagcctgagtaggaaggctagcaaaaaaaaaaaaaaaaaaaaaaaaaaaaaaaaaaaaaaaaaaaaaaaaaaaaaaaaaaaaaaaaaaaaaaaaaaaaaaaa

SEQ ID NO: 12287 - RNA, 5785 nt, synthetic construct
  source 1..5785: mol_type = other RNA
aggaaataagagagaaaagaagagtaagaagaaatataagagccaccatggcccctaagaagaagcgtaaagtgagccggatggaacgcctcgtctacgaggtgcggcagaagtgcagaaacatcgaggacatctgcatctcctgcggatctctgaacgtgaccctggagcacccactgttcatcggcggcatgtgccagaactgtaaaaactgttttctggagtgtgcctatcaatacgacgatgacggctaccagagctactgcaccatctgttgcggcggaagagaggtgctgatgtgtggaaataacaactgctgccggtgcttctgcgtggaatgcgtggacctgctggtgggccccggcgccgcccaggccgctattaaggaagatccttggaactgctacatgtgcggccacaagggcacatacggcctgctgagacggagagaggactggcctagcagactgcagatgttcttcgccaataaccacgaccaggagttcgacccccctaaggtgtaccctcccgtccccgccgagaagagaaagcccatccgggtcctgagcctgttcgatggcatcgccaccggtctgctggtgctgaaggacctgggcatccaggtggataggtacattgcctccgaggtgtgcgaggactccatcaccgtgggaatggtgcgtcatcagggcaagatcatgtacgtgggcgacgtgcggagcgtgacacagaagcatatccaggagtggggccctttcgacctggtgatcggcggcagcccttgcaatgacctgagcatcgtgaacccagcccggaagggcctgtacgagggaaccggcagactgttcttcgagttttacagactgctgcacgacgcccggcctaaggaaggcgacgaccggcccttcttttggctgttcgagaatgtggtggccatgggagtcagcgacaagcgggatattagccggttcctggagagcaaccccgtgatgatcgatgccaaggaagtgagcgccgcccaccgggccagatacttctggggcaatctgcctggcatgaacagacccctggccagcaccgtgaacgacaagctggagctgcaggagtgcctggagcacggccggatcgccaagttcagcaaggtgagaaccatcaccacccgaagcaacagcatcaaacaaggcaaggaccagcactttcctgtgttcatgaacgagaaggaggacatcctgtggtgtaccgagatggagagagtgttcgggttcccagtccactacacagatgtcagcaacatgtctagactggccagacagagactgctgggaagaagctggtccgtccctgtgatcagacacctgttcgcccctctgaaggagtacttcgcctgcgtgagcagcggcaacagcaacgccaacagccggggccccagcttctctagcggcctggtgccactgtccctgagagggagccacatgggccccatggagatctacaaaaccgtgagcgcctggaagcggcagcctgtgcgcgtgctgagcctgtttcggaatatcgataaagtcctgaaaagcctgggattcctggagagcggctctggctccggcggtggcaccctgaagtacgtggaggatgtgacaaacgtggtcagacgggatgtggagaagtggggccccttcgatctggtgtacggcagcacccaacccctgggcagctcttgtgaccggtgccctggctggtacatgtttcagttccaccggatcctgcagtacgccctgccgagacaggagtcccagcggccattcttttggattttcatggacaacttgctgctgaccgaggatgaccaggaaactaccactcggttcctgcagaccgaagccgtgaccctgcaggacgtgagaggccgggactaccagaacgccatgcgggtgtggtccaacatccctggactgaaaagcaagcacgcacctctgacccctaaagaagaggagtacctgcaggcccaggtgcggagcagaagcaagctggacgcccctaaggtggatctgctggtgaagaattgcctcctgcccctgagagagtacttcaagtatttcagccagaatagtctgcccctgggaggcagcggcggcggcccccaggtgctggtgagcttcgaggaggtggccgtgctgctgagccaggaggagtggggccacctgggccccgaccagaagaggctgtacagggacgtgatgctggagacctacggcaacctggtgagcctgggcctgcagggcagcaagcccgacgtgatcagcaagctggagcagggcgaggagccctgggccccccacagccccaggatcgagggcagctggatctggaggaggaggaggggcggcccaagcagcggcgcccctcctcccagcggcggcagcccagccggctccccaacctctaccgaggagggcacctctgagtccgccacccccgagagcggccctggcacctccaccgagcccagcgagggcagcgcacccggcagccctgccggcagccccacctccacagaggagggaaccagcaccgagcccagcgaaggcagcgccccaggcaccagcaccgagcctagtgagcaggagattaaacggatcaacaagatcagaagaagacttgtgaaagacagcaacaccaagaaggccggcaagacaggccccatgaaaaccctgctggttagagtgatgacacccgatctgagagagcggctggaaaacctgagaaagaagcctgaaaatatcccccagcccatcagcaatacatctagagccaacctgaataagctgctgaccgattacaccgaaatgaagaaggcgatcctgcatgtgtactgggaagagttccagaaggaccctgtgggcctgatgagccgggtggcccagcctgccagcaagaagatcgatcagaacaagctgaaacctgagatggacgagaagggcaacctgaccaccgccggctttgcctgctctcagtgtggccagcccctgttcgtgtacaagctggagcaggtgtctgagaagggcaaggcttacaccaactacttcggacggtgcaatgtggccgagcacgaaaagctgatcctgctggcccagctgaagcccgagaaggatagcgacgaagccgtgacatatagcctgggaaagtttgggcagagggccctggatttctacagcattcatgtgaccaaggagtccacccaccccgtgaagcccctggcccagatcgccggaaacagatacgcctccggacctgtgggaaaggccctgagcgacgcatgtatgggcacaatcgcctccttcctgtctaagtaccaggacatcatcatcgaacaccagaaggtggtgaagggcaaccagaagagactggagagcctgcgggagctggccggcaaggaaaacctggaataccctagcgtgaccctgccacctcagcctcacaccaaggagggcgttgatgcctacaacgaagtgatcgcccgggtgcgaatgtgggtgaacctgaacctgtggcagaagctgaagctaagcagagatgatgccaagcctctgctgagactgaagggattcccttcctttcctctggtcgagagacaggccaacgaagtggactggtgggacatggtgtgtaacgtgaagaagctgatcaacgagaaaaaggaggatggcaaggtgttttggcagaatctggctggctacaagagacaggaagccctgagaccatacctgagcagcgaggaagatcggaagaagggaaagaaattcgctcggtaccagctgggcgacctgctgctgcacctggaaaagaagcacggcgaggactggggaaaggtgtacgacgaggcctgggagcggattgacaagaaagtggaaggcctgagcaagcacatcaagctggaagaggaacggagaagcgaggacgcccagagcaaggccgccctgaccgactggctgcgggctaaggccagcttcgtgatcgagggcctgaaggaggccgacaaggacgagttctgcagatgcgagctgaagctgcagaagtggtacggggacctgcggggaaagcccttcgccatcgaagccgagaacagcatcctggacatcagcggcttcagcaagcagtacaactgtgccttcatctggcagaaggacggcgtgaagaagctgaacctgtacctgatcatcaactacttcaagggcggcaagctgcggttcaagaagatcaaacctgaagccttcgaagccaacagattctacaccgtgatcaacaaaaagagcggcgagatcgtgcccatggaggtgaacttcaacttcgacgaccccaacctgatcatcctgcctctggcctttggcaagagacagggcagagaattcatctggaacgacctgctgtccctggaaaccggcagcctgaagctggccaacggaagagtgatcgagaagacactgtacaacagaagaacccggcaggatgagcctgccctgttcgtggccctgaccttcgagcggcgggaggtcctggactcctccaatatcaaaccaatgaacctgatcggcgtggcaagaggcgaaaacatccccgccgtgatcgccctgaccgaccccgagggctgcccactgagccggtttaaggatagcctgggaaacccaacccacatcctgagaatcggcgagagctataaggagaagcagcggaccatccaggccaagaaggaggtggagcagcggagagccggcggctacagccggaagtacgccagcaaagccaagaatctggcagacgatatggtgagaaacaccgctagagatctgctgtactacgccgtgacccaggatgccatgctgatcttcgccaacctgagccggggcttcggccggcagggcaagcggaccttcatggccgagagacagtacacacggatggaggactggctgaccgccaagctggcctacgagggcctgagcaagacctacctgtccaagacactggcccagtacacctccaagacatgcagcaactgtgggtttaccatcaccagcgccgactacgacagggtgctggagaagctgaagaagacagcaacaggctggatgaccacaattaacggcaaggagctgaaggtggagggccagattacctactacaacagatacaagagacagaacgtagtcaaggacctgtccgtcgagctggatagactgagcgaagaatctgtgaacaacgacatctcctcctggacaaagggcagaagcggagaagctctgagcctcctgaagaaaagattctcccatagacccgtgcaggagaagttcgtgtgcctgaactgcggcttcgagacacacgcagccgagcaagccgccctgaacatcgccagatcctggctgttcctgcggagccaggagtacaagaaataccagacaaacaagacaaccggcaacaccgataagagagccttcgtcgagacctggcagtccttttaccggaagaagcttaaggaggtgtggaaacctgccgtgcggtctggcggatctggcggaggctccaccagccccaagaaaaagagaaaagtctaagctgccttctgcggggcttgccttctggccatgcccttcttctctcccttgcacctgtacctcttggtctttgaataaagcctgagtaggaaggctagcaaaaaaaaaaaaaaaaaaaaaaaaaaaaaaaaaaaaaaaaaaaaaaaaaaaaaaaaaaaaaaaaaaaaaaaaaaaaaaaa

SEQ ID NO: 12288 - RNA, 5785 nt, synthetic construct
  source 1..5785: mol_type = other RNA
aggaaataagagagaaaagaagagtaagaagaaatataagagccaccatggcccctaagaagaagcgtaaagtgagccggatggaacgcctcgtctacgaggtgcggcagaagtgcagaaacatcgaggacatctgcatctcctgcggatctctgaacgtgaccctggagcacccactgttcatcggcggcatgtgccagaactgtaaaaactgttttctggagtgtgcctatcaatacgacgatgacggctaccagagctactgcaccatctgttgcggcggaagagaggtgctgatgtgtggaaataacaactgctgccggtgcttctgcgtggaatgcgtggacctgctggtgggccccggcgccgcccaggccgctattaaggaagatccttggaactgctacatgtgcggccacaagggcacatacggcctgctgagacggagagaggactggcctagcagactgcagatgttcttcgccaataaccacgaccaggagttcgacccccctaaggtgtaccctcccgtccccgccgagaagagaaagcccatccgggtcctgagcctgttcgatggcatcgccaccggtctgctggtgctgaaggacctgggcatccaggtggataggtacattgcctccgaggtgtgcgaggactccatcaccgtgggaatggtgcgtcatcagggcaagatcatgtacgtgggcgacgtgcggagcgtgacacagaagcatatccaggagtggggccctttcgacctggtgatcggcggcagcccttgcaatgacctgagcatcgtgaacccagcccggaagggcctgtacgagggaaccggcagactgttcttcgagttttacagactgctgcacgacgcccggcctaaggaaggcgacgaccggcccttcttttggctgttcgagaatgtggtggccatgggagtcagcgacaagcgggatattagccggttcctggagagcaaccccgtgatgatcgatgccaaggaagtgagcgccgcccaccgggccagatacttctggggcaatctgcctggcatgaacagacccctggccagcaccgtgaacgacaagctggagctgcaggagtgcctggagcacggccggatcgccaagttcagcaaggtgagaaccatcaccacccgaagcaacagcatcaaacaaggcaaggaccagcactttcctgtgttcatgaacgagaaggaggacatcctgtggtgtaccgagatggagagagtgttcgggttcccagtccactacacagatgtcagcaacatgtctagactggccagacagagactgctgggaagaagctggtccgtccctgtgatcagacacctgttcgcccctctgaaggagtacttcgcctgcgtgagcagcggcaacagcaacgccaacagccggggccccagcttctctagcggcctggtgccactgtccctgagagggagccacatgggccccatggagatctacaaaaccgtgagcgcctggaagcggcagcctgtgcgcgtgctgagcctgtttcggaatatcgataaagtcctgaaaagcctgggattcctggagagcggctctggctccggcggtggcaccctgaagtacgtggaggatgtgacaaacgtggtcagacgggatgtggagaagtggggccccttcgatctggtgtacggcagcacccaacccctgggcagctcttgtgaccggtgccctggctggtacatgtttcagttccaccggatcctgcagtacgccctgccgagacaggagtcccagcggccattcttttggattttcatggacaacttgctgctgaccgaggatgaccaggaaactaccactcggttcctgcagaccgaagccgtgaccctgcaggacgtgagaggccgggactaccagaacgccatgcgggtgtggtccaacatccctggactgaaaagcaagcacgcacctctgacccctaaagaagaggagtacctgcaggcccaggtgcggagcagaagcaagctggacgcccctaaggtggatctgctggtgaagaattgcctcctgcccctgagagagtacttcaagtatttcagccagaatagtctgcccctgggaggcagcggcggcggcctgatcaacgccgtgacctacaacgacgtgcacatcaacttcacccaggaggagtgggccctgctggaccccagccagaagagcctgtacaaggacgtgatgctggagacctacaggaacctgaccgccatcggctacagctgcgaggaccacaacatcgaggagcactgccagagcagcaccaggcacaggaggtacgagaggaggcacagcagggagaagcccagcgagtacagccagtgcggcggcccaagcagcggcgcccctcctcccagcggcggcagcccagccggctccccaacctctaccgaggagggcacctctgagtccgccacccccgagagcggccctggcacctccaccgagcccagcgagggcagcgcacccggcagccctgccggcagccccacctccacagaggagggaaccagcaccgagcccagcgaaggcagcgccccaggcaccagcaccgagcctagtgagcaggagattaaacggatcaacaagatcagaagaagacttgtgaaagacagcaacaccaagaaggccggcaagacaggccccatgaaaaccctgctggttagagtgatgacacccgatctgagagagcggctggaaaacctgagaaagaagcctgaaaatatcccccagcccatcagcaatacatctagagccaacctgaataagctgctgaccgattacaccgaaatgaagaaggcgatcctgcatgtgtactgggaagagttccagaaggaccctgtgggcctgatgagccgggtggcccagcctgccagcaagaagatcgatcagaacaagctgaaacctgagatggacgagaagggcaacctgaccaccgccggctttgcctgctctcagtgtggccagcccctgttcgtgtacaagctggagcaggtgtctgagaagggcaaggcttacaccaactacttcggacggtgcaatgtggccgagcacgaaaagctgatcctgctggcccagctgaagcccgagaaggatagcgacgaagccgtgacatatagcctgggaaagtttgggcagagggccctggatttctacagcattcatgtgaccaaggagtccacccaccccgtgaagcccctggcccagatcgccggaaacagatacgcctccggacctgtgggaaaggccctgagcgacgcatgtatgggcacaatcgcctccttcctgtctaagtaccaggacatcatcatcgaacaccagaaggtggtgaagggcaaccagaagagactggagagcctgcgggagctggccggcaaggaaaacctggaataccctagcgtgaccctgccacctcagcctcacaccaaggagggcgttgatgcctacaacgaagtgatcgcccgggtgcgaatgtgggtgaacctgaacctgtggcagaagctgaagctaagcagagatgatgccaagcctctgctgagactgaagggattcccttcctttcctctggtcgagagacaggccaacgaagtggactggtgggacatggtgtgtaacgtgaagaagctgatcaacgagaaaaaggaggatggcaaggtgttttggcagaatctggctggctacaagagacaggaagccctgagaccatacctgagcagcgaggaagatcggaagaagggaaagaaattcgctcggtaccagctgggcgacctgctgctgcacctggaaaagaagcacggcgaggactggggaaaggtgtacgacgaggcctgggagcggattgacaagaaagtggaaggcctgagcaagcacatcaagctggaagaggaacggagaagcgaggacgcccagagcaaggccgccctgaccgactggctgcgggctaaggccagcttcgtgatcgagggcctgaaggaggccgacaaggacgagttctgcagatgcgagctgaagctgcagaagtggtacggggacctgcggggaaagcccttcgccatcgaagccgagaacagcatcctggacatcagcggcttcagcaagcagtacaactgtgccttcatctggcagaaggacggcgtgaagaagctgaacctgtacctgatcatcaactacttcaagggcggcaagctgcggttcaagaagatcaaacctgaagccttcgaagccaacagattctacaccgtgatcaacaaaaagagcggcgagatcgtgcccatggaggtgaacttcaacttcgacgaccccaacctgatcatcctgcctctggcctttggcaagagacagggcagagaattcatctggaacgacctgctgtccctggaaaccggcagcctgaagctggccaacggaagagtgatcgagaagacactgtacaacagaagaacccggcaggatgagcctgccctgttcgtggccctgaccttcgagcggcgggaggtcctggactcctccaatatcaaaccaatgaacctgatcggcgtggcaagaggcgaaaacatccccgccgtgatcgccctgaccgaccccgagggctgcccactgagccggtttaaggatagcctgggaaacccaacccacatcctgagaatcggcgagagctataaggagaagcagcggaccatccaggccaagaaggaggtggagcagcggagagccggcggctacagccggaagtacgccagcaaagccaagaatctggcagacgatatggtgagaaacaccgctagagatctgctgtactacgccgtgacccaggatgccatgctgatcttcgccaacctgagccggggcttcggccggcagggcaagcggaccttcatggccgagagacagtacacacggatggaggactggctgaccgccaagctggcctacgagggcctgagcaagacctacctgtccaagacactggcccagtacacctccaagacatgcagcaactgtgggtttaccatcaccagcgccgactacgacagggtgctggagaagctgaagaagacagcaacaggctggatgaccacaattaacggcaaggagctgaaggtggagggccagattacctactacaacagatacaagagacagaacgtagtcaaggacctgtccgtcgagctggatagactgagcgaagaatctgtgaacaacgacatctcctcctggacaaagggcagaagcggagaagctctgagcctcctgaagaaaagattctcccatagacccgtgcaggagaagttcgtgtgcctgaactgcggcttcgagacacacgcagccgagcaagccgccctgaacatcgccagatcctggctgttcctgcggagccaggagtacaagaaataccagacaaacaagacaaccggcaacaccgataagagagccttcgtcgagacctggcagtccttttaccggaagaagcttaaggaggtgtggaaacctgccgtgcggtctggcggatctggcggaggctccaccagccccaagaaaaagagaaaagtctaagctgccttctgcggggcttgccttctggccatgcccttcttctctcccttgcacctgtacctcttggtctttgaataaagcctgagtaggaaggctagcaaaaaaaaaaaaaaaaaaaaaaaaaaaaaaaaaaaaaaaaaaaaaaaaaaaaaaaaaaaaaaaaaaaaaaaaaaaaaaaa

SEQ ID NO: 12289 - RNA, 5785 nt, synthetic construct
  source 1..5785: mol_type = other RNA
aggaaataagagagaaaagaagagtaagaagaaatataagagccaccatggcccctaagaagaagcgtaaagtgagccggatggaacgcctcgtctacgaggtgcggcagaagtgcagaaacatcgaggacatctgcatctcctgcggatctctgaacgtgaccctggagcacccactgttcatcggcggcatgtgccagaactgtaaaaactgttttctggagtgtgcctatcaatacgacgatgacggctaccagagctactgcaccatctgttgcggcggaagagaggtgctgatgtgtggaaataacaactgctgccggtgcttctgcgtggaatgcgtggacctgctggtgggccccggcgccgcccaggccgctattaaggaagatccttggaactgctacatgtgcggccacaagggcacatacggcctgctgagacggagagaggactggcctagcagactgcagatgttcttcgccaataaccacgaccaggagttcgacccccctaaggtgtaccctcccgtccccgccgagaagagaaagcccatccgggtcctgagcctgttcgatggcatcgccaccggtctgctggtgctgaaggacctgggcatccaggtggataggtacattgcctccgaggtgtgcgaggactccatcaccgtgggaatggtgcgtcatcagggcaagatcatgtacgtgggcgacgtgcggagcgtgacacagaagcatatccaggagtggggccctttcgacctggtgatcggcggcagcccttgcaatgacctgagcatcgtgaacccagcccggaagggcctgtacgagggaaccggcagactgttcttcgagttttacagactgctgcacgacgcccggcctaaggaaggcgacgaccggcccttcttttggctgttcgagaatgtggtggccatgggagtcagcgacaagcgggatattagccggttcctggagagcaaccccgtgatgatcgatgccaaggaagtgagcgccgcccaccgggccagatacttctggggcaatctgcctggcatgaacagacccctggccagcaccgtgaacgacaagctggagctgcaggagtgcctggagcacggccggatcgccaagttcagcaaggtgagaaccatcaccacccgaagcaacagcatcaaacaaggcaaggaccagcactttcctgtgttcatgaacgagaaggaggacatcctgtggtgtaccgagatggagagagtgttcgggttcccagtccactacacagatgtcagcaacatgtctagactggccagacagagactgctgggaagaagctggtccgtccctgtgatcagacacctgttcgcccctctgaaggagtacttcgcctgcgtgagcagcggcaacagcaacgccaacagccggggccccagcttctctagcggcctggtgccactgtccctgagagggagccacatgggccccatggagatctacaaaaccgtgagcgcctggaagcggcagcctgtgcgcgtgctgagcctgtttcggaatatcgataaagtcctgaaaagcctgggattcctggagagcggctctggctccggcggtggcaccctgaagtacgtggaggatgtgacaaacgtggtcagacgggatgtggagaagtggggccccttcgatctggtgtacggcagcacccaacccctgggcagctcttgtgaccggtgccctggctggtacatgtttcagttccaccggatcctgcagtacgccctgccgagacaggagtcccagcggccattcttttggattttcatggacaacttgctgctgaccgaggatgaccaggaaactaccactcggttcctgcagaccgaagccgtgaccctgcaggacgtgagaggccgggactaccagaacgccatgcgggtgtggtccaacatccctggactgaaaagcaagcacgcacctctgacccctaaagaagaggagtacctgcaggcccaggtgcggagcagaagcaagctggacgcccctaaggtggatctgctggtgaagaattgcctcctgcccctgagagagtacttcaagtatttcagccagaatagtctgcccctgggaggcagcggcggcggcaggcccgagagcgtgaccttcgaggacgtggccgtgtacttcagcgagaacgagtggatcggcctgggccccgcccagagggccctgtacagggacgtgatgctggagaactacggcgccgtggccagcctggccgccttccccttccccaagcccgccctgatcagccagctggagaggggcgaggccccctggtgcagcgtgccctggggcgccctggacggcgaggaccccaggagcatcggcggcccaagcagcggcgcccctcctcccagcggcggcagcccagccggctccccaacctctaccgaggagggcacctctgagtccgccacccccgagagcggccctggcacctccaccgagcccagcgagggcagcgcacccggcagccctgccggcagccccacctccacagaggagggaaccagcaccgagcccagcgaaggcagcgccccaggcaccagcaccgagcctagtgagcaggagattaaacggatcaacaagatcagaagaagacttgtgaaagacagcaacaccaagaaggccggcaagacaggccccatgaaaaccctgctggttagagtgatgacacccgatctgagagagcggctggaaaacctgagaaagaagcctgaaaatatcccccagcccatcagcaatacatctagagccaacctgaataagctgctgaccgattacaccgaaatgaagaaggcgatcctgcatgtgtactgggaagagttccagaaggaccctgtgggcctgatgagccgggtggcccagcctgccagcaagaagatcgatcagaacaagctgaaacctgagatggacgagaagggcaacctgaccaccgccggctttgcctgctctcagtgtggccagcccctgttcgtgtacaagctggagcaggtgtctgagaagggcaaggcttacaccaactacttcggacggtgcaatgtggccgagcacgaaaagctgatcctgctggcccagctgaagcccgagaaggatagcgacgaagccgtgacatatagcctgggaaagtttgggcagagggccctggatttctacagcattcatgtgaccaaggagtccacccaccccgtgaagcccctggcccagatcgccggaaacagatacgcctccggacctgtgggaaaggccctgagcgacgcatgtatgggcacaatcgcctccttcctgtctaagtaccaggacatcatcatcgaacaccagaaggtggtgaagggcaaccagaagagactggagagcctgcgggagctggccggcaaggaaaacctggaataccctagcgtgaccctgccacctcagcctcacaccaaggagggcgttgatgcctacaacgaagtgatcgcccgggtgcgaatgtgggtgaacctgaacctgtggcagaagctgaagctaagcagagatgatgccaagcctctgctgagactgaagggattcccttcctttcctctggtcgagagacaggccaacgaagtggactggtgggacatggtgtgtaacgtgaagaagctgatcaacgagaaaaaggaggatggcaaggtgttttggcagaatctggctggctacaagagacaggaagccctgagaccatacctgagcagcgaggaagatcggaagaagggaaagaaattcgctcggtaccagctgggcgacctgctgctgcacctggaaaagaagcacggcgaggactggggaaaggtgtacgacgaggcctgggagcggattgacaagaaagtggaaggcctgagcaagcacatcaagctggaagaggaacggagaagcgaggacgcccagagcaaggccgccctgaccgactggctgcgggctaaggccagcttcgtgatcgagggcctgaaggaggccgacaaggacgagttctgcagatgcgagctgaagctgcagaagtggtacggggacctgcggggaaagcccttcgccatcgaagccgagaacagcatcctggacatcagcggcttcagcaagcagtacaactgtgccttcatctggcagaaggacggcgtgaagaagctgaacctgtacctgatcatcaactacttcaagggcggcaagctgcggttcaagaagatcaaacctgaagccttcgaagccaacagattctacaccgtgatcaacaaaaagagcggcgagatcgtgcccatggaggtgaacttcaacttcgacgaccccaacctgatcatcctgcctctggcctttggcaagagacagggcagagaattcatctggaacgacctgctgtccctggaaaccggcagcctgaagctggccaacggaagagtgatcgagaagacactgtacaacagaagaacccggcaggatgagcctgccctgttcgtggccctgaccttcgagcggcgggaggtcctggactcctccaatatcaaaccaatgaacctgatcggcgtggcaagaggcgaaaacatccccgccgtgatcgccctgaccgaccccgagggctgcccactgagccggtttaaggatagcctgggaaacccaacccacatcctgagaatcggcgagagctataaggagaagcagcggaccatccaggccaagaaggaggtggagcagcggagagccggcggctacagccggaagtacgccagcaaagccaagaatctggcagacgatatggtgagaaacaccgctagagatctgctgtactacgccgtgacccaggatgccatgctgatcttcgccaacctgagccggggcttcggccggcagggcaagcggaccttcatggccgagagacagtacacacggatggaggactggctgaccgccaagctggcctacgagggcctgagcaagacctacctgtccaagacactggcccagtacacctccaagacatgcagcaactgtgggtttaccatcaccagcgccgactacgacagggtgctggagaagctgaagaagacagcaacaggctggatgaccacaattaacggcaaggagctgaaggtggagggccagattacctactacaacagatacaagagacagaacgtagtcaaggacctgtccgtcgagctggatagactgagcgaagaatctgtgaacaacgacatctcctcctggacaaagggcagaagcggagaagctctgagcctcctgaagaaaagattctcccatagacccgtgcaggagaagttcgtgtgcctgaactgcggcttcgagacacacgcagccgagcaagccgccctgaacatcgccagatcctggctgttcctgcggagccaggagtacaagaaataccagacaaacaagacaaccggcaacaccgataagagagccttcgtcgagacctggcagtccttttaccggaagaagcttaaggaggtgtggaaacctgccgtgcggtctggcggatctggcggaggctccaccagccccaagaaaaagagaaaagtctaagctgccttctgcggggcttgccttctggccatgcccttcttctctcccttgcacctgtacctcttggtctttgaataaagcctgagtaggaaggctagcaaaaaaaaaaaaaaaaaaaaaaaaaaaaaaaaaaaaaaaaaaaaaaaaaaaaaaaaaaaaaaaaaaaaaaaaaaaaaaaa

SEQ ID NO: 12290 - RNA, 5785 nt, synthetic construct
  source 1..5785: mol_type = other RNA
aggaaataagagagaaaagaagagtaagaagaaatataagagccaccatggcccctaagaagaagcgtaaagtgagccggatggaacgcctcgtctacgaggtgcggcagaagtgcagaaacatcgaggacatctgcatctcctgcggatctctgaacgtgaccctggagcacccactgttcatcggcggcatgtgccagaactgtaaaaactgttttctggagtgtgcctatcaatacgacgatgacggctaccagagctactgcaccatctgttgcggcggaagagaggtgctgatgtgtggaaataacaactgctgccggtgcttctgcgtggaatgcgtggacctgctggtgggccccggcgccgcccaggccgctattaaggaagatccttggaactgctacatgtgcggccacaagggcacatacggcctgctgagacggagagaggactggcctagcagactgcagatgttcttcgccaataaccacgaccaggagttcgacccccctaaggtgtaccctcccgtccccgccgagaagagaaagcccatccgggtcctgagcctgttcgatggcatcgccaccggtctgctggtgctgaaggacctgggcatccaggtggataggtacattgcctccgaggtgtgcgaggactccatcaccgtgggaatggtgcgtcatcagggcaagatcatgtacgtgggcgacgtgcggagcgtgacacagaagcatatccaggagtggggccctttcgacctggtgatcggcggcagcccttgcaatgacctgagcatcgtgaacccagcccggaagggcctgtacgagggaaccggcagactgttcttcgagttttacagactgctgcacgacgcccggcctaaggaaggcgacgaccggcccttcttttggctgttcgagaatgtggtggccatgggagtcagcgacaagcgggatattagccggttcctggagagcaaccccgtgatgatcgatgccaaggaagtgagcgccgcccaccgggccagatacttctggggcaatctgcctggcatgaacagacccctggccagcaccgtgaacgacaagctggagctgcaggagtgcctggagcacggccggatcgccaagttcagcaaggtgagaaccatcaccacccgaagcaacagcatcaaacaaggcaaggaccagcactttcctgtgttcatgaacgagaaggaggacatcctgtggtgtaccgagatggagagagtgttcgggttcccagtccactacacagatgtcagcaacatgtctagactggccagacagagactgctgggaagaagctggtccgtccctgtgatcagacacctgttcgcccctctgaaggagtacttcgcctgcgtgagcagcggcaacagcaacgccaacagccggggccccagcttctctagcggcctggtgccactgtccctgagagggagccacatgggccccatggagatctacaaaaccgtgagcgcctggaagcggcagcctgtgcgcgtgctgagcctgtttcggaatatcgataaagtcctgaaaagcctgggattcctggagagcggctctggctccggcggtggcaccctgaagtacgtggaggatgtgacaaacgtggtcagacgggatgtggagaagtggggccccttcgatctggtgtacggcagcacccaacccctgggcagctcttgtgaccggtgccctggctggtacatgtttcagttccaccggatcctgcagtacgccctgccgagacaggagtcccagcggccattcttttggattttcatggacaacttgctgctgaccgaggatgaccaggaaactaccactcggttcctgcagaccgaagccgtgaccctgcaggacgtgagaggccgggactaccagaacgccatgcgggtgtggtccaacatccctggactgaaaagcaagcacgcacctctgacccctaaagaagaggagtacctgcaggcccaggtgcggagcagaagcaagctggacgcccctaaggtggatctgctggtgaagaattgcctcctgcccctgagagagtacttcaagtatttcagccagaatagtctgcccctgggaggcagcggcggcggcttccaggccagcgtgaccttcaaggacgtggccgtggacttcacctgggaggagtggaggctgctggaccccccccagaaggagctgttctgggaggtgatgctggagaactacaggaacctggtgtgcctgggcctggccgacagcaacaaggacgtgatgatgagcaagctggagagcggcgagccccactggatccccaccggcggcgtgctgaggagctgctggcccggctgggagagcggcggcccaagcagcggcgcccctcctcccagcggcggcagcccagccggctccccaacctctaccgaggagggcacctctgagtccgccacccccgagagcggccctggcacctccaccgagcccagcgagggcagcgcacccggcagccctgccggcagccccacctccacagaggagggaaccagcaccgagcccagcgaaggcagcgccccaggcaccagcaccgagcctagtgagcaggagattaaacggatcaacaagatcagaagaagacttgtgaaagacagcaacaccaagaaggccggcaagacaggccccatgaaaaccctgctggttagagtgatgacacccgatctgagagagcggctggaaaacctgagaaagaagcctgaaaatatcccccagcccatcagcaatacatctagagccaacctgaataagctgctgaccgattacaccgaaatgaagaaggcgatcctgcatgtgtactgggaagagttccagaaggaccctgtgggcctgatgagccgggtggcccagcctgccagcaagaagatcgatcagaacaagctgaaacctgagatggacgagaagggcaacctgaccaccgccggctttgcctgctctcagtgtggccagcccctgttcgtgtacaagctggagcaggtgtctgagaagggcaaggcttacaccaactacttcggacggtgcaatgtggccgagcacgaaaagctgatcctgctggcccagctgaagcccgagaaggatagcgacgaagccgtgacatatagcctgggaaagtttgggcagagggccctggatttctacagcattcatgtgaccaaggagtccacccaccccgtgaagcccctggcccagatcgccggaaacagatacgcctccggacctgtgggaaaggccctgagcgacgcatgtatgggcacaatcgcctccttcctgtctaagtaccaggacatcatcatcgaacaccagaaggtggtgaagggcaaccagaagagactggagagcctgcgggagctggccggcaaggaaaacctggaataccctagcgtgaccctgccacctcagcctcacaccaaggagggcgttgatgcctacaacgaagtgatcgcccgggtgcgaatgtgggtgaacctgaacctgtggcagaagctgaagctaagcagagatgatgccaagcctctgctgagactgaagggattcccttcctttcctctggtcgagagacaggccaacgaagtggactggtgggacatggtgtgtaacgtgaagaagctgatcaacgagaaaaaggaggatggcaaggtgttttggcagaatctggctggctacaagagacaggaagccctgagaccatacctgagcagcgaggaagatcggaagaagggaaagaaattcgctcggtaccagctgggcgacctgctgctgcacctggaaaagaagcacggcgaggactggggaaaggtgtacgacgaggcctgggagcggattgacaagaaagtggaaggcctgagcaagcacatcaagctggaagaggaacggagaagcgaggacgcccagagcaaggccgccctgaccgactggctgcgggctaaggccagcttcgtgatcgagggcctgaaggaggccgacaaggacgagttctgcagatgcgagctgaagctgcagaagtggtacggggacctgcggggaaagcccttcgccatcgaagccgagaacagcatcctggacatcagcggcttcagcaagcagtacaactgtgccttcatctggcagaaggacggcgtgaagaagctgaacctgtacctgatcatcaactacttcaagggcggcaagctgcggttcaagaagatcaaacctgaagccttcgaagccaacagattctacaccgtgatcaacaaaaagagcggcgagatcgtgcccatggaggtgaacttcaacttcgacgaccccaacctgatcatcctgcctctggcctttggcaagagacagggcagagaattcatctggaacgacctgctgtccctggaaaccggcagcctgaagctggccaacggaagagtgatcgagaagacactgtacaacagaagaacccggcaggatgagcctgccctgttcgtggccctgaccttcgagcggcgggaggtcctggactcctccaatatcaaaccaatgaacctgatcggcgtggcaagaggcgaaaacatccccgccgtgatcgccctgaccgaccccgagggctgcccactgagccggtttaaggatagcctgggaaacccaacccacatcctgagaatcggcgagagctataaggagaagcagcggaccatccaggccaagaaggaggtggagcagcggagagccggcggctacagccggaagtacgccagcaaagccaagaatctggcagacgatatggtgagaaacaccgctagagatctgctgtactacgccgtgacccaggatgccatgctgatcttcgccaacctgagccggggcttcggccggcagggcaagcggaccttcatggccgagagacagtacacacggatggaggactggctgaccgccaagctggcctacgagggcctgagcaagacctacctgtccaagacactggcccagtacacctccaagacatgcagcaactgtgggtttaccatcaccagcgccgactacgacagggtgctggagaagctgaagaagacagcaacaggctggatgaccacaattaacggcaaggagctgaaggtggagggccagattacctactacaacagatacaagagacagaacgtagtcaaggacctgtccgtcgagctggatagactgagcgaagaatctgtgaacaacgacatctcctcctggacaaagggcagaagcggagaagctctgagcctcctgaagaaaagattctcccatagacccgtgcaggagaagttcgtgtgcctgaactgcggcttcgagacacacgcagccgagcaagccgccctgaacatcgccagatcctggctgttcctgcggagccaggagtacaagaaataccagacaaacaagacaaccggcaacaccgataagagagccttcgtcgagacctggcagtccttttaccggaagaagcttaaggaggtgtggaaacctgccgtgcggtctggcggatctggcggaggctccaccagccccaagaaaaagagaaaagtctaagctgccttctgcggggcttgccttctggccatgcccttcttctctcccttgcacctgtacctcttggtctttgaataaagcctgagtaggaaggctagcaaaaaaaaaaaaaaaaaaaaaaaaaaaaaaaaaaaaaaaaaaaaaaaaaaaaaaaaaaaaaaaaaaaaaaaaaaaaaaaa

SEQ ID NO: 12291 - RNA, 5785 nt, synthetic construct
  source 1..5785: mol_type = other RNA
aggaaataagagagaaaagaagagtaagaagaaatataagagccaccatggcccctaagaagaagcgtaaagtgagccggatggaacgcctcgtctacgaggtgcggcagaagtgcagaaacatcgaggacatctgcatctcctgcggatctctgaacgtgaccctggagcacccactgttcatcggcggcatgtgccagaactgtaaaaactgttttctggagtgtgcctatcaatacgacgatgacggctaccagagctactgcaccatctgttgcggcggaagagaggtgctgatgtgtggaaataacaactgctgccggtgcttctgcgtggaatgcgtggacctgctggtgggccccggcgccgcccaggccgctattaaggaagatccttggaactgctacatgtgcggccacaagggcacatacggcctgctgagacggagagaggactggcctagcagactgcagatgttcttcgccaataaccacgaccaggagttcgacccccctaaggtgtaccctcccgtccccgccgagaagagaaagcccatccgggtcctgagcctgttcgatggcatcgccaccggtctgctggtgctgaaggacctgggcatccaggtggataggtacattgcctccgaggtgtgcgaggactccatcaccgtgggaatggtgcgtcatcagggcaagatcatgtacgtgggcgacgtgcggagcgtgacacagaagcatatccaggagtggggccctttcgacctggtgatcggcggcagcccttgcaatgacctgagcatcgtgaacccagcccggaagggcctgtacgagggaaccggcagactgttcttcgagttttacagactgctgcacgacgcccggcctaaggaaggcgacgaccggcccttcttttggctgttcgagaatgtggtggccatgggagtcagcgacaagcgggatattagccggttcctggagagcaaccccgtgatgatcgatgccaaggaagtgagcgccgcccaccgggccagatacttctggggcaatctgcctggcatgaacagacccctggccagcaccgtgaacgacaagctggagctgcaggagtgcctggagcacggccggatcgccaagttcagcaaggtgagaaccatcaccacccgaagcaacagcatcaaacaaggcaaggaccagcactttcctgtgttcatgaacgagaaggaggacatcctgtggtgtaccgagatggagagagtgttcgggttcccagtccactacacagatgtcagcaacatgtctagactggccagacagagactgctgggaagaagctggtccgtccctgtgatcagacacctgttcgcccctctgaaggagtacttcgcctgcgtgagcagcggcaacagcaacgccaacagccggggccccagcttctctagcggcctggtgccactgtccctgagagggagccacatgggccccatggagatctacaaaaccgtgagcgcctggaagcggcagcctgtgcgcgtgctgagcctgtttcggaatatcgataaagtcctgaaaagcctgggattcctggagagcggctctggctccggcggtggcaccctgaagtacgtggaggatgtgacaaacgtggtcagacgggatgtggagaagtggggccccttcgatctggtgtacggcagcacccaacccctgggcagctcttgtgaccggtgccctggctggtacatgtttcagttccaccggatcctgcagtacgccctgccgagacaggagtcccagcggccattcttttggattttcatggacaacttgctgctgaccgaggatgaccaggaaactaccactcggttcctgcagaccgaagccgtgaccctgcaggacgtgagaggccgggactaccagaacgccatgcgggtgtggtccaacatccctggactgaaaagcaagcacgcacctctgacccctaaagaagaggagtacctgcaggcccaggtgcggagcagaagcaagctggacgcccctaaggtggatctgctggtgaagaattgcctcctgcccctgagagagtacttcaagtatttcagccagaatagtctgcccctgggaggcagcggcggcggcagccaggagagcgtgaccttccaggacgtgaccgtggacttcacccaggaggagtggtgcatgctggactgcagccagaagaagctgtacagggaggtgatgctggagaacgtgcagaacctgctgagcgtgggcctgcccgtgcccagggagaacctgctgagcagctgccagcagggcgacagcccctggctgctggagcagaagggcaccaggatcttcagggccgacgccgagatctgcggcggcccaagcagcggcgcccctcctcccagcggcggcagcccagccggctccccaacctctaccgaggagggcacctctgagtccgccacccccgagagcggccctggcacctccaccgagcccagcgagggcagcgcacccggcagccctgccggcagccccacctccacagaggagggaaccagcaccgagcccagcgaaggcagcgccccaggcaccagcaccgagcctagtgagcaggagattaaacggatcaacaagatcagaagaagacttgtgaaagacagcaacaccaagaaggccggcaagacaggccccatgaaaaccctgctggttagagtgatgacacccgatctgagagagcggctggaaaacctgagaaagaagcctgaaaatatcccccagcccatcagcaatacatctagagccaacctgaataagctgctgaccgattacaccgaaatgaagaaggcgatcctgcatgtgtactgggaagagttccagaaggaccctgtgggcctgatgagccgggtggcccagcctgccagcaagaagatcgatcagaacaagctgaaacctgagatggacgagaagggcaacctgaccaccgccggctttgcctgctctcagtgtggccagcccctgttcgtgtacaagctggagcaggtgtctgagaagggcaaggcttacaccaactacttcggacggtgcaatgtggccgagcacgaaaagctgatcctgctggcccagctgaagcccgagaaggatagcgacgaagccgtgacatatagcctgggaaagtttgggcagagggccctggatttctacagcattcatgtgaccaaggagtccacccaccccgtgaagcccctggcccagatcgccggaaacagatacgcctccggacctgtgggaaaggccctgagcgacgcatgtatgggcacaatcgcctccttcctgtctaagtaccaggacatcatcatcgaacaccagaaggtggtgaagggcaaccagaagagactggagagcctgcgggagctggccggcaaggaaaacctggaataccctagcgtgaccctgccacctcagcctcacaccaaggagggcgttgatgcctacaacgaagtgatcgcccgggtgcgaatgtgggtgaacctgaacctgtggcagaagctgaagctaagcagagatgatgccaagcctctgctgagactgaagggattcccttcctttcctctggtcgagagacaggccaacgaagtggactggtgggacatggtgtgtaacgtgaagaagctgatcaacgagaaaaaggaggatggcaaggtgttttggcagaatctggctggctacaagagacaggaagccctgagaccatacctgagcagcgaggaagatcggaagaagggaaagaaattcgctcggtaccagctgggcgacctgctgctgcacctggaaaagaagcacggcgaggactggggaaaggtgtacgacgaggcctgggagcggattgacaagaaagtggaaggcctgagcaagcacatcaagctggaagaggaacggagaagcgaggacgcccagagcaaggccgccctgaccgactggctgcgggctaaggccagcttcgtgatcgagggcctgaaggaggccgacaaggacgagttctgcagatgcgagctgaagctgcagaagtggtacggggacctgcggggaaagcccttcgccatcgaagccgagaacagcatcctggacatcagcggcttcagcaagcagtacaactgtgccttcatctggcagaaggacggcgtgaagaagctgaacctgtacctgatcatcaactacttcaagggcggcaagctgcggttcaagaagatcaaacctgaagccttcgaagccaacagattctacaccgtgatcaacaaaaagagcggcgagatcgtgcccatggaggtgaacttcaacttcgacgaccccaacctgatcatcctgcctctggcctttggcaagagacagggcagagaattcatctggaacgacctgctgtccctggaaaccggcagcctgaagctggccaacggaagagtgatcgagaagacactgtacaacagaagaacccggcaggatgagcctgccctgttcgtggccctgaccttcgagcggcgggaggtcctggactcctccaatatcaaaccaatgaacctgatcggcgtggcaagaggcgaaaacatccccgccgtgatcgccctgaccgaccccgagggctgcccactgagccggtttaaggatagcctgggaaacccaacccacatcctgagaatcggcgagagctataaggagaagcagcggaccatccaggccaagaaggaggtggagcagcggagagccggcggctacagccggaagtacgccagcaaagccaagaatctggcagacgatatggtgagaaacaccgctagagatctgctgtactacgccgtgacccaggatgccatgctgatcttcgccaacctgagccggggcttcggccggcagggcaagcggaccttcatggccgagagacagtacacacggatggaggactggctgaccgccaagctggcctacgagggcctgagcaagacctacctgtccaagacactggcccagtacacctccaagacatgcagcaactgtgggtttaccatcaccagcgccgactacgacagggtgctggagaagctgaagaagacagcaacaggctggatgaccacaattaacggcaaggagctgaaggtggagggccagattacctactacaacagatacaagagacagaacgtagtcaaggacctgtccgtcgagctggatagactgagcgaagaatctgtgaacaacgacatctcctcctggacaaagggcagaagcggagaagctctgagcctcctgaagaaaagattctcccatagacccgtgcaggagaagttcgtgtgcctgaactgcggcttcgagacacacgcagccgagcaagccgccctgaacatcgccagatcctggctgttcctgcggagccaggagtacaagaaataccagacaaacaagacaaccggcaacaccgataagagagccttcgtcgagacctggcagtccttttaccggaagaagcttaaggaggtgtggaaacctgccgtgcggtctggcggatctggcggaggctccaccagccccaagaaaaagagaaaagtctaagctgccttctgcggggcttgccttctggccatgcccttcttctctcccttgcacctgtacctcttggtctttgaataaagcctgagtaggaaggctagcaaaaaaaaaaaaaaaaaaaaaaaaaaaaaaaaaaaaaaaaaaaaaaaaaaaaaaaaaaaaaaaaaaaaaaaaaaaaaaaa

SEQ ID NO: 12292 - RNA, 5785 nt, synthetic construct
  source 1..5785: mol_type = other RNA
aggaaataagagagaaaagaagagtaagaagaaatataagagccaccatggcccctaagaagaagcgtaaagtgagccggatggaacgcctcgtctacgaggtgcggcagaagtgcagaaacatcgaggacatctgcatctcctgcggatctctgaacgtgaccctggagcacccactgttcatcggcggcatgtgccagaactgtaaaaactgttttctggagtgtgcctatcaatacgacgatgacggctaccagagctactgcaccatctgttgcggcggaagagaggtgctgatgtgtggaaataacaactgctgccggtgcttctgcgtggaatgcgtggacctgctggtgggccccggcgccgcccaggccgctattaaggaagatccttggaactgctacatgtgcggccacaagggcacatacggcctgctgagacggagagaggactggcctagcagactgcagatgttcttcgccaataaccacgaccaggagttcgacccccctaaggtgtaccctcccgtccccgccgagaagagaaagcccatccgggtcctgagcctgttcgatggcatcgccaccggtctgctggtgctgaaggacctgggcatccaggtggataggtacattgcctccgaggtgtgcgaggactccatcaccgtgggaatggtgcgtcatcagggcaagatcatgtacgtgggcgacgtgcggagcgtgacacagaagcatatccaggagtggggccctttcgacctggtgatcggcggcagcccttgcaatgacctgagcatcgtgaacccagcccggaagggcctgtacgagggaaccggcagactgttcttcgagttttacagactgctgcacgacgcccggcctaaggaaggcgacgaccggcccttcttttggctgttcgagaatgtggtggccatgggagtcagcgacaagcgggatattagccggttcctggagagcaaccccgtgatgatcgatgccaaggaagtgagcgccgcccaccgggccagatacttctggggcaatctgcctggcatgaacagacccctggccagcaccgtgaacgacaagctggagctgcaggagtgcctggagcacggccggatcgccaagttcagcaaggtgagaaccatcaccacccgaagcaacagcatcaaacaaggcaaggaccagcactttcctgtgttcatgaacgagaaggaggacatcctgtggtgtaccgagatggagagagtgttcgggttcccagtccactacacagatgtcagcaacatgtctagactggccagacagagactgctgggaagaagctggtccgtccctgtgatcagacacctgttcgcccctctgaaggagtacttcgcctgcgtgagcagcggcaacagcaacgccaacagccggggccccagcttctctagcggcctggtgccactgtccctgagagggagccacatgggccccatggagatctacaaaaccgtgagcgcctggaagcggcagcctgtgcgcgtgctgagcctgtttcggaatatcgataaagtcctgaaaagcctgggattcctggagagcggctctggctccggcggtggcaccctgaagtacgtggaggatgtgacaaacgtggtcagacgggatgtggagaagtggggccccttcgatctggtgtacggcagcacccaacccctgggcagctcttgtgaccggtgccctggctggtacatgtttcagttccaccggatcctgcagtacgccctgccgagacaggagtcccagcggccattcttttggattttcatggacaacttgctgctgaccgaggatgaccaggaaactaccactcggttcctgcagaccgaagccgtgaccctgcaggacgtgagaggccgggactaccagaacgccatgcgggtgtggtccaacatccctggactgaaaagcaagcacgcacctctgacccctaaagaagaggagtacctgcaggcccaggtgcggagcagaagcaagctggacgcccctaaggtggatctgctggtgaagaattgcctcctgcccctgagagagtacttcaagtatttcagccagaatagtctgcccctgggaggcagcggcggcggcctgcaggagcccgtgagcttcgaggaggtggccgtgtacttcagcagggaggagtgggccctgctggaccccgcccagagggccctgtacagggacgtgatgctggagacctacgagtgcgtggccagcctggcccccctgcccgcccccaagcccatggtgatcagcctgctggaggagggcgaggagccctgggtgcccgacgtgggcagccccgaggccgtggccggcgacgtgagccccggcggcccaagcagcggcgcccctcctcccagcggcggcagcccagccggctccccaacctctaccgaggagggcacctctgagtccgccacccccgagagcggccctggcacctccaccgagcccagcgagggcagcgcacccggcagccctgccggcagccccacctccacagaggagggaaccagcaccgagcccagcgaaggcagcgccccaggcaccagcaccgagcctagtgagcaggagattaaacggatcaacaagatcagaagaagacttgtgaaagacagcaacaccaagaaggccggcaagacaggccccatgaaaaccctgctggttagagtgatgacacccgatctgagagagcggctggaaaacctgagaaagaagcctgaaaatatcccccagcccatcagcaatacatctagagccaacctgaataagctgctgaccgattacaccgaaatgaagaaggcgatcctgcatgtgtactgggaagagttccagaaggaccctgtgggcctgatgagccgggtggcccagcctgccagcaagaagatcgatcagaacaagctgaaacctgagatggacgagaagggcaacctgaccaccgccggctttgcctgctctcagtgtggccagcccctgttcgtgtacaagctggagcaggtgtctgagaagggcaaggcttacaccaactacttcggacggtgcaatgtggccgagcacgaaaagctgatcctgctggcccagctgaagcccgagaaggatagcgacgaagccgtgacatatagcctgggaaagtttgggcagagggccctggatttctacagcattcatgtgaccaaggagtccacccaccccgtgaagcccctggcccagatcgccggaaacagatacgcctccggacctgtgggaaaggccctgagcgacgcatgtatgggcacaatcgcctccttcctgtctaagtaccaggacatcatcatcgaacaccagaaggtggtgaagggcaaccagaagagactggagagcctgcgggagctggccggcaaggaaaacctggaataccctagcgtgaccctgccacctcagcctcacaccaaggagggcgttgatgcctacaacgaagtgatcgcccgggtgcgaatgtgggtgaacctgaacctgtggcagaagctgaagctaagcagagatgatgccaagcctctgctgagactgaagggattcccttcctttcctctggtcgagagacaggccaacgaagtggactggtgggacatggtgtgtaacgtgaagaagctgatcaacgagaaaaaggaggatggcaaggtgttttggcagaatctggctggctacaagagacaggaagccctgagaccatacctgagcagcgaggaagatcggaagaagggaaagaaattcgctcggtaccagctgggcgacctgctgctgcacctggaaaagaagcacggcgaggactggggaaaggtgtacgacgaggcctgggagcggattgacaagaaagtggaaggcctgagcaagcacatcaagctggaagaggaacggagaagcgaggacgcccagagcaaggccgccctgaccgactggctgcgggctaaggccagcttcgtgatcgagggcctgaaggaggccgacaaggacgagttctgcagatgcgagctgaagctgcagaagtggtacggggacctgcggggaaagcccttcgccatcgaagccgagaacagcatcctggacatcagcggcttcagcaagcagtacaactgtgccttcatctggcagaaggacggcgtgaagaagctgaacctgtacctgatcatcaactacttcaagggcggcaagctgcggttcaagaagatcaaacctgaagccttcgaagccaacagattctacaccgtgatcaacaaaaagagcggcgagatcgtgcccatggaggtgaacttcaacttcgacgaccccaacctgatcatcctgcctctggcctttggcaagagacagggcagagaattcatctggaacgacctgctgtccctggaaaccggcagcctgaagctggccaacggaagagtgatcgagaagacactgtacaacagaagaacccggcaggatgagcctgccctgttcgtggccctgaccttcgagcggcgggaggtcctggactcctccaatatcaaaccaatgaacctgatcggcgtggcaagaggcgaaaacatccccgccgtgatcgccctgaccgaccccgagggctgcccactgagccggtttaaggatagcctgggaaacccaacccacatcctgagaatcggcgagagctataaggagaagcagcggaccatccaggccaagaaggaggtggagcagcggagagccggcggctacagccggaagtacgccagcaaagccaagaatctggcagacgatatggtgagaaacaccgctagagatctgctgtactacgccgtgacccaggatgccatgctgatcttcgccaacctgagccggggcttcggccggcagggcaagcggaccttcatggccgagagacagtacacacggatggaggactggctgaccgccaagctggcctacgagggcctgagcaagacctacctgtccaagacactggcccagtacacctccaagacatgcagcaactgtgggtttaccatcaccagcgccgactacgacagggtgctggagaagctgaagaagacagcaacaggctggatgaccacaattaacggcaaggagctgaaggtggagggccagattacctactacaacagatacaagagacagaacgtagtcaaggacctgtccgtcgagctggatagactgagcgaagaatctgtgaacaacgacatctcctcctggacaaagggcagaagcggagaagctctgagcctcctgaagaaaagattctcccatagacccgtgcaggagaagttcgtgtgcctgaactgcggcttcgagacacacgcagccgagcaagccgccctgaacatcgccagatcctggctgttcctgcggagccaggagtacaagaaataccagacaaacaagacaaccggcaacaccgataagagagccttcgtcgagacctggcagtccttttaccggaagaagcttaaggaggtgtggaaacctgccgtgcggtctggcggatctggcggaggctccaccagccccaagaaaaagagaaaagtctaagctgccttctgcggggcttgccttctggccatgcccttcttctctcccttgcacctgtacctcttggtctttgaataaagcctgagtaggaaggctagcaaaaaaaaaaaaaaaaaaaaaaaaaaaaaaaaaaaaaaaaaaaaaaaaaaaaaaaaaaaaaaaaaaaaaaaaaaaaaaaa

SEQ ID NO: 12293 - RNA, 5785 nt, synthetic construct
  source 1..5785: mol_type = other RNA
aggaaataagagagaaaagaagagtaagaagaaatataagagccaccatggcccctaagaagaagcgtaaagtgagccggatggaacgcctcgtctacgaggtgcggcagaagtgcagaaacatcgaggacatctgcatctcctgcggatctctgaacgtgaccctggagcacccactgttcatcggcggcatgtgccagaactgtaaaaactgttttctggagtgtgcctatcaatacgacgatgacggctaccagagctactgcaccatctgttgcggcggaagagaggtgctgatgtgtggaaataacaactgctgccggtgcttctgcgtggaatgcgtggacctgctggtgggccccggcgccgcccaggccgctattaaggaagatccttggaactgctacatgtgcggccacaagggcacatacggcctgctgagacggagagaggactggcctagcagactgcagatgttcttcgccaataaccacgaccaggagttcgacccccctaaggtgtaccctcccgtccccgccgagaagagaaagcccatccgggtcctgagcctgttcgatggcatcgccaccggtctgctggtgctgaaggacctgggcatccaggtggataggtacattgcctccgaggtgtgcgaggactccatcaccgtgggaatggtgcgtcatcagggcaagatcatgtacgtgggcgacgtgcggagcgtgacacagaagcatatccaggagtggggccctttcgacctggtgatcggcggcagcccttgcaatgacctgagcatcgtgaacccagcccggaagggcctgtacgagggaaccggcagactgttcttcgagttttacagactgctgcacgacgcccggcctaaggaaggcgacgaccggcccttcttttggctgttcgagaatgtggtggccatgggagtcagcgacaagcgggatattagccggttcctggagagcaaccccgtgatgatcgatgccaaggaagtgagcgccgcccaccgggccagatacttctggggcaatctgcctggcatgaacagacccctggccagcaccgtgaacgacaagctggagctgcaggagtgcctggagcacggccggatcgccaagttcagcaaggtgagaaccatcaccacccgaagcaacagcatcaaacaaggcaaggaccagcactttcctgtgttcatgaacgagaaggaggacatcctgtggtgtaccgagatggagagagtgttcgggttcccagtccactacacagatgtcagcaacatgtctagactggccagacagagactgctgggaagaagctggtccgtccctgtgatcagacacctgttcgcccctctgaaggagtacttcgcctgcgtgagcagcggcaacagcaacgccaacagccggggccccagcttctctagcggcctggtgccactgtccctgagagggagccacatgggccccatggagatctacaaaaccgtgagcgcctggaagcggcagcctgtgcgcgtgctgagcctgtttcggaatatcgataaagtcctgaaaagcctgggattcctggagagcggctctggctccggcggtggcaccctgaagtacgtggaggatgtgacaaacgtggtcagacgggatgtggagaagtggggccccttcgatctggtgtacggcagcacccaacccctgggcagctcttgtgaccggtgccctggctggtacatgtttcagttccaccggatcctgcagtacgccctgccgagacaggagtcccagcggccattcttttggattttcatggacaacttgctgctgaccgaggatgaccaggaaactaccactcggttcctgcagaccgaagccgtgaccctgcaggacgtgagaggccgggactaccagaacgccatgcgggtgtggtccaacatccctggactgaaaagcaagcacgcacctctgacccctaaagaagaggagtacctgcaggcccaggtgcggagcagaagcaagctggacgcccctaaggtggatctgctggtgaagaattgcctcctgcccctgagagagtacttcaagtatttcagccagaatagtctgcccctgggaggcagcggcggcggcagccaggagctgctgaccttcaaggacatcttcgtggacttcacccaggaggagtggggccagctggcccccgcccacaggaacctgtacagggaggtgatgctggagaactacggcaacctggtgagcgtgggctaccagctgagcaagcccggcgtgatcagccagctggagaagggcgaggagccctggctgatcgagagggagatcagcggcagccccagcagcgacctggagaacaagggcggcccaagcagcggcgcccctcctcccagcggcggcagcccagccggctccccaacctctaccgaggagggcacctctgagtccgccacccccgagagcggccctggcacctccaccgagcccagcgagggcagcgcacccggcagccctgccggcagccccacctccacagaggagggaaccagcaccgagcccagcgaaggcagcgccccaggcaccagcaccgagcctagtgagcaggagattaaacggatcaacaagatcagaagaagacttgtgaaagacagcaacaccaagaaggccggcaagacaggccccatgaaaaccctgctggttagagtgatgacacccgatctgagagagcggctggaaaacctgagaaagaagcctgaaaatatcccccagcccatcagcaatacatctagagccaacctgaataagctgctgaccgattacaccgaaatgaagaaggcgatcctgcatgtgtactgggaagagttccagaaggaccctgtgggcctgatgagccgggtggcccagcctgccagcaagaagatcgatcagaacaagctgaaacctgagatggacgagaagggcaacctgaccaccgccggctttgcctgctctcagtgtggccagcccctgttcgtgtacaagctggagcaggtgtctgagaagggcaaggcttacaccaactacttcggacggtgcaatgtggccgagcacgaaaagctgatcctgctggcccagctgaagcccgagaaggatagcgacgaagccgtgacatatagcctgggaaagtttgggcagagggccctggatttctacagcattcatgtgaccaaggagtccacccaccccgtgaagcccctggcccagatcgccggaaacagatacgcctccggacctgtgggaaaggccctgagcgacgcatgtatgggcacaatcgcctccttcctgtctaagtaccaggacatcatcatcgaacaccagaaggtggtgaagggcaaccagaagagactggagagcctgcgggagctggccggcaaggaaaacctggaataccctagcgtgaccctgccacctcagcctcacaccaaggagggcgttgatgcctacaacgaagtgatcgcccgggtgcgaatgtgggtgaacctgaacctgtggcagaagctgaagctaagcagagatgatgccaagcctctgctgagactgaagggattcccttcctttcctctggtcgagagacaggccaacgaagtggactggtgggacatggtgtgtaacgtgaagaagctgatcaacgagaaaaaggaggatggcaaggtgttttggcagaatctggctggctacaagagacaggaagccctgagaccatacctgagcagcgaggaagatcggaagaagggaaagaaattcgctcggtaccagctgggcgacctgctgctgcacctggaaaagaagcacggcgaggactggggaaaggtgtacgacgaggcctgggagcggattgacaagaaagtggaaggcctgagcaagcacatcaagctggaagaggaacggagaagcgaggacgcccagagcaaggccgccctgaccgactggctgcgggctaaggccagcttcgtgatcgagggcctgaaggaggccgacaaggacgagttctgcagatgcgagctgaagctgcagaagtggtacggggacctgcggggaaagcccttcgccatcgaagccgagaacagcatcctggacatcagcggcttcagcaagcagtacaactgtgccttcatctggcagaaggacggcgtgaagaagctgaacctgtacctgatcatcaactacttcaagggcggcaagctgcggttcaagaagatcaaacctgaagccttcgaagccaacagattctacaccgtgatcaacaaaaagagcggcgagatcgtgcccatggaggtgaacttcaacttcgacgaccccaacctgatcatcctgcctctggcctttggcaagagacagggcagagaattcatctggaacgacctgctgtccctggaaaccggcagcctgaagctggccaacggaagagtgatcgagaagacactgtacaacagaagaacccggcaggatgagcctgccctgttcgtggccctgaccttcgagcggcgggaggtcctggactcctccaatatcaaaccaatgaacctgatcggcgtggcaagaggcgaaaacatccccgccgtgatcgccctgaccgaccccgagggctgcccactgagccggtttaaggatagcctgggaaacccaacccacatcctgagaatcggcgagagctataaggagaagcagcggaccatccaggccaagaaggaggtggagcagcggagagccggcggctacagccggaagtacgccagcaaagccaagaatctggcagacgatatggtgagaaacaccgctagagatctgctgtactacgccgtgacccaggatgccatgctgatcttcgccaacctgagccggggcttcggccggcagggcaagcggaccttcatggccgagagacagtacacacggatggaggactggctgaccgccaagctggcctacgagggcctgagcaagacctacctgtccaagacactggcccagtacacctccaagacatgcagcaactgtgggtttaccatcaccagcgccgactacgacagggtgctggagaagctgaagaagacagcaacaggctggatgaccacaattaacggcaaggagctgaaggtggagggccagattacctactacaacagatacaagagacagaacgtagtcaaggacctgtccgtcgagctggatagactgagcgaagaatctgtgaacaacgacatctcctcctggacaaagggcagaagcggagaagctctgagcctcctgaagaaaagattctcccatagacccgtgcaggagaagttcgtgtgcctgaactgcggcttcgagacacacgcagccgagcaagccgccctgaacatcgccagatcctggctgttcctgcggagccaggagtacaagaaataccagacaaacaagacaaccggcaacaccgataagagagccttcgtcgagacctggcagtccttttaccggaagaagcttaaggaggtgtggaaacctgccgtgcggtctggcggatctggcggaggctccaccagccccaagaaaaagagaaaagtctaagctgccttctgcggggcttgccttctggccatgcccttcttctctcccttgcacctgtacctcttggtctttgaataaagcctgagtaggaaggctagcaaaaaaaaaaaaaaaaaaaaaaaaaaaaaaaaaaaaaaaaaaaaaaaaaaaaaaaaaaaaaaaaaaaaaaaaaaaaaaaa

SEQ ID NO: 12294 - RNA, 5785 nt, synthetic construct
  source 1..5785: mol_type = other RNA
aggaaataagagagaaaagaagagtaagaagaaatataagagccaccatggcccctaagaagaagcgtaaagtgagccggatggaacgcctcgtctacgaggtgcggcagaagtgcagaaacatcgaggacatctgcatctcctgcggatctctgaacgtgaccctggagcacccactgttcatcggcggcatgtgccagaactgtaaaaactgttttctggagtgtgcctatcaatacgacgatgacggctaccagagctactgcaccatctgttgcggcggaagagaggtgctgatgtgtggaaataacaactgctgccggtgcttctgcgtggaatgcgtggacctgctggtgggccccggcgccgcccaggccgctattaaggaagatccttggaactgctacatgtgcggccacaagggcacatacggcctgctgagacggagagaggactggcctagcagactgcagatgttcttcgccaataaccacgaccaggagttcgacccccctaaggtgtaccctcccgtccccgccgagaagagaaagcccatccgggtcctgagcctgttcgatggcatcgccaccggtctgctggtgctgaaggacctgggcatccaggtggataggtacattgcctccgaggtgtgcgaggactccatcaccgtgggaatggtgcgtcatcagggcaagatcatgtacgtgggcgacgtgcggagcgtgacacagaagcatatccaggagtggggccctttcgacctggtgatcggcggcagcccttgcaatgacctgagcatcgtgaacccagcccggaagggcctgtacgagggaaccggcagactgttcttcgagttttacagactgctgcacgacgcccggcctaaggaaggcgacgaccggcccttcttttggctgttcgagaatgtggtggccatgggagtcagcgacaagcgggatattagccggttcctggagagcaaccccgtgatgatcgatgccaaggaagtgagcgccgcccaccgggccagatacttctggggcaatctgcctggcatgaacagacccctggccagcaccgtgaacgacaagctggagctgcaggagtgcctggagcacggccggatcgccaagttcagcaaggtgagaaccatcaccacccgaagcaacagcatcaaacaaggcaaggaccagcactttcctgtgttcatgaacgagaaggaggacatcctgtggtgtaccgagatggagagagtgttcgggttcccagtccactacacagatgtcagcaacatgtctagactggccagacagagactgctgggaagaagctggtccgtccctgtgatcagacacctgttcgcccctctgaaggagtacttcgcctgcgtgagcagcggcaacagcaacgccaacagccggggccccagcttctctagcggcctggtgccactgtccctgagagggagccacatgggccccatggagatctacaaaaccgtgagcgcctggaagcggcagcctgtgcgcgtgctgagcctgtttcggaatatcgataaagtcctgaaaagcctgggattcctggagagcggctctggctccggcggtggcaccctgaagtacgtggaggatgtgacaaacgtggtcagacgggatgtggagaagtggggccccttcgatctggtgtacggcagcacccaacccctgggcagctcttgtgaccggtgccctggctggtacatgtttcagttccaccggatcctgcagtacgccctgccgagacaggagtcccagcggccattcttttggattttcatggacaacttgctgctgaccgaggatgaccaggaaactaccactcggttcctgcagaccgaagccgtgaccctgcaggacgtgagaggccgggactaccagaacgccatgcgggtgtggtccaacatccctggactgaaaagcaagcacgcacctctgacccctaaagaagaggagtacctgcaggcccaggtgcggagcagaagcaagctggacgcccctaaggtggatctgctggtgaagaattgcctcctgcccctgagagagtacttcaagtatttcagccagaatagtctgcccctgggaggcagcggcggcggcccccagaagagcgtgaccttcgaggacgtggccgtgtacttcacccagaccgagtgggacggcctgagccccgcccagagggccctgtacagggacgtgatgctggagaactacggcaacgtggccagcctgggcttcagcctgctgaagcccgccgtgatcagccagctggagggcgccggcgagctggagggccccagccccctggtggccggcaccgagatcggcccccagggcctgtggggcggcccaagcagcggcgcccctcctcccagcggcggcagcccagccggctccccaacctctaccgaggagggcacctctgagtccgccacccccgagagcggccctggcacctccaccgagcccagcgagggcagcgcacccggcagccctgccggcagccccacctccacagaggagggaaccagcaccgagcccagcgaaggcagcgccccaggcaccagcaccgagcctagtgagcaggagattaaacggatcaacaagatcagaagaagacttgtgaaagacagcaacaccaagaaggccggcaagacaggccccatgaaaaccctgctggttagagtgatgacacccgatctgagagagcggctggaaaacctgagaaagaagcctgaaaatatcccccagcccatcagcaatacatctagagccaacctgaataagctgctgaccgattacaccgaaatgaagaaggcgatcctgcatgtgtactgggaagagttccagaaggaccctgtgggcctgatgagccgggtggcccagcctgccagcaagaagatcgatcagaacaagctgaaacctgagatggacgagaagggcaacctgaccaccgccggctttgcctgctctcagtgtggccagcccctgttcgtgtacaagctggagcaggtgtctgagaagggcaaggcttacaccaactacttcggacggtgcaatgtggccgagcacgaaaagctgatcctgctggcccagctgaagcccgagaaggatagcgacgaagccgtgacatatagcctgggaaagtttgggcagagggccctggatttctacagcattcatgtgaccaaggagtccacccaccccgtgaagcccctggcccagatcgccggaaacagatacgcctccggacctgtgggaaaggccctgagcgacgcatgtatgggcacaatcgcctccttcctgtctaagtaccaggacatcatcatcgaacaccagaaggtggtgaagggcaaccagaagagactggagagcctgcgggagctggccggcaaggaaaacctggaataccctagcgtgaccctgccacctcagcctcacaccaaggagggcgttgatgcctacaacgaagtgatcgcccgggtgcgaatgtgggtgaacctgaacctgtggcagaagctgaagctaagcagagatgatgccaagcctctgctgagactgaagggattcccttcctttcctctggtcgagagacaggccaacgaagtggactggtgggacatggtgtgtaacgtgaagaagctgatcaacgagaaaaaggaggatggcaaggtgttttggcagaatctggctggctacaagagacaggaagccctgagaccatacctgagcagcgaggaagatcggaagaagggaaagaaattcgctcggtaccagctgggcgacctgctgctgcacctggaaaagaagcacggcgaggactggggaaaggtgtacgacgaggcctgggagcggattgacaagaaagtggaaggcctgagcaagcacatcaagctggaagaggaacggagaagcgaggacgcccagagcaaggccgccctgaccgactggctgcgggctaaggccagcttcgtgatcgagggcctgaaggaggccgacaaggacgagttctgcagatgcgagctgaagctgcagaagtggtacggggacctgcggggaaagcccttcgccatcgaagccgagaacagcatcctggacatcagcggcttcagcaagcagtacaactgtgccttcatctggcagaaggacggcgtgaagaagctgaacctgtacctgatcatcaactacttcaagggcggcaagctgcggttcaagaagatcaaacctgaagccttcgaagccaacagattctacaccgtgatcaacaaaaagagcggcgagatcgtgcccatggaggtgaacttcaacttcgacgaccccaacctgatcatcctgcctctggcctttggcaagagacagggcagagaattcatctggaacgacctgctgtccctggaaaccggcagcctgaagctggccaacggaagagtgatcgagaagacactgtacaacagaagaacccggcaggatgagcctgccctgttcgtggccctgaccttcgagcggcgggaggtcctggactcctccaatatcaaaccaatgaacctgatcggcgtggcaagaggcgaaaacatccccgccgtgatcgccctgaccgaccccgagggctgcccactgagccggtttaaggatagcctgggaaacccaacccacatcctgagaatcggcgagagctataaggagaagcagcggaccatccaggccaagaaggaggtggagcagcggagagccggcggctacagccggaagtacgccagcaaagccaagaatctggcagacgatatggtgagaaacaccgctagagatctgctgtactacgccgtgacccaggatgccatgctgatcttcgccaacctgagccggggcttcggccggcagggcaagcggaccttcatggccgagagacagtacacacggatggaggactggctgaccgccaagctggcctacgagggcctgagcaagacctacctgtccaagacactggcccagtacacctccaagacatgcagcaactgtgggtttaccatcaccagcgccgactacgacagggtgctggagaagctgaagaagacagcaacaggctggatgaccacaattaacggcaaggagctgaaggtggagggccagattacctactacaacagatacaagagacagaacgtagtcaaggacctgtccgtcgagctggatagactgagcgaagaatctgtgaacaacgacatctcctcctggacaaagggcagaagcggagaagctctgagcctcctgaagaaaagattctcccatagacccgtgcaggagaagttcgtgtgcctgaactgcggcttcgagacacacgcagccgagcaagccgccctgaacatcgccagatcctggctgttcctgcggagccaggagtacaagaaataccagacaaacaagacaaccggcaacaccgataagagagccttcgtcgagacctggcagtccttttaccggaagaagcttaaggaggtgtggaaacctgccgtgcggtctggcggatctggcggaggctccaccagccccaagaaaaagagaaaagtctaagctgccttctgcggggcttgccttctggccatgcccttcttctctcccttgcacctgtacctcttggtctttgaataaagcctgagtaggaaggctagcaaaaaaaaaaaaaaaaaaaaaaaaaaaaaaaaaaaaaaaaaaaaaaaaaaaaaaaaaaaaaaaaaaaaaaaaaaaaaaaa

SEQ ID NO: 12295 - RNA, 5785 nt, synthetic construct
  source 1..5785: mol_type = other RNA
aggaaataagagagaaaagaagagtaagaagaaatataagagccaccatggcccctaagaagaagcgtaaagtgagccggatggaacgcctcgtctacgaggtgcggcagaagtgcagaaacatcgaggacatctgcatctcctgcggatctctgaacgtgaccctggagcacccactgttcatcggcggcatgtgccagaactgtaaaaactgttttctggagtgtgcctatcaatacgacgatgacggctaccagagctactgcaccatctgttgcggcggaagagaggtgctgatgtgtggaaataacaactgctgccggtgcttctgcgtggaatgcgtggacctgctggtgggccccggcgccgcccaggccgctattaaggaagatccttggaactgctacatgtgcggccacaagggcacatacggcctgctgagacggagagaggactggcctagcagactgcagatgttcttcgccaataaccacgaccaggagttcgacccccctaaggtgtaccctcccgtccccgccgagaagagaaagcccatccgggtcctgagcctgttcgatggcatcgccaccggtctgctggtgctgaaggacctgggcatccaggtggataggtacattgcctccgaggtgtgcgaggactccatcaccgtgggaatggtgcgtcatcagggcaagatcatgtacgtgggcgacgtgcggagcgtgacacagaagcatatccaggagtggggccctttcgacctggtgatcggcggcagcccttgcaatgacctgagcatcgtgaacccagcccggaagggcctgtacgagggaaccggcagactgttcttcgagttttacagactgctgcacgacgcccggcctaaggaaggcgacgaccggcccttcttttggctgttcgagaatgtggtggccatgggagtcagcgacaagcgggatattagccggttcctggagagcaaccccgtgatgatcgatgccaaggaagtgagcgccgcccaccgggccagatacttctggggcaatctgcctggcatgaacagacccctggccagcaccgtgaacgacaagctggagctgcaggagtgcctggagcacggccggatcgccaagttcagcaaggtgagaaccatcaccacccgaagcaacagcatcaaacaaggcaaggaccagcactttcctgtgttcatgaacgagaaggaggacatcctgtggtgtaccgagatggagagagtgttcgggttcccagtccactacacagatgtcagcaacatgtctagactggccagacagagactgctgggaagaagctggtccgtccctgtgatcagacacctgttcgcccctctgaaggagtacttcgcctgcgtgagcagcggcaacagcaacgccaacagccggggccccagcttctctagcggcctggtgccactgtccctgagagggagccacatgggccccatggagatctacaaaaccgtgagcgcctggaagcggcagcctgtgcgcgtgctgagcctgtttcggaatatcgataaagtcctgaaaagcctgggattcctggagagcggctctggctccggcggtggcaccctgaagtacgtggaggatgtgacaaacgtggtcagacgggatgtggagaagtggggccccttcgatctggtgtacggcagcacccaacccctgggcagctcttgtgaccggtgccctggctggtacatgtttcagttccaccggatcctgcagtacgccctgccgagacaggagtcccagcggccattcttttggattttcatggacaacttgctgctgaccgaggatgaccaggaaactaccactcggttcctgcagaccgaagccgtgaccctgcaggacgtgagaggccgggactaccagaacgccatgcgggtgtggtccaacatccctggactgaaaagcaagcacgcacctctgacccctaaagaagaggagtacctgcaggcccaggtgcggagcagaagcaagctggacgcccctaaggtggatctgctggtgaagaattgcctcctgcccctgagagagtacttcaagtatttcagccagaatagtctgcccctgggaggcagcggcggcggcagccagaaggccctgaccttccaggacgtggccgtggagttcacccaggaggagtggggcctgctggagcccgcccagaagaacatgcacagggacgtgatgctggagaactacgagaacttcgtgagcctgggcctgcccgtgcccaagagcgccctgatcttccacctggagaggagggagaccccctggctgcccagcggcgaggtgctgaggaacacctaccccgactacctggtgcagggcggcccaagcagcggcgcccctcctcccagcggcggcagcccagccggctccccaacctctaccgaggagggcacctctgagtccgccacccccgagagcggccctggcacctccaccgagcccagcgagggcagcgcacccggcagccctgccggcagccccacctccacagaggagggaaccagcaccgagcccagcgaaggcagcgccccaggcaccagcaccgagcctagtgagcaggagattaaacggatcaacaagatcagaagaagacttgtgaaagacagcaacaccaagaaggccggcaagacaggccccatgaaaaccctgctggttagagtgatgacacccgatctgagagagcggctggaaaacctgagaaagaagcctgaaaatatcccccagcccatcagcaatacatctagagccaacctgaataagctgctgaccgattacaccgaaatgaagaaggcgatcctgcatgtgtactgggaagagttccagaaggaccctgtgggcctgatgagccgggtggcccagcctgccagcaagaagatcgatcagaacaagctgaaacctgagatggacgagaagggcaacctgaccaccgccggctttgcctgctctcagtgtggccagcccctgttcgtgtacaagctggagcaggtgtctgagaagggcaaggcttacaccaactacttcggacggtgcaatgtggccgagcacgaaaagctgatcctgctggcccagctgaagcccgagaaggatagcgacgaagccgtgacatatagcctgggaaagtttgggcagagggccctggatttctacagcattcatgtgaccaaggagtccacccaccccgtgaagcccctggcccagatcgccggaaacagatacgcctccggacctgtgggaaaggccctgagcgacgcatgtatgggcacaatcgcctccttcctgtctaagtaccaggacatcatcatcgaacaccagaaggtggtgaagggcaaccagaagagactggagagcctgcgggagctggccggcaaggaaaacctggaataccctagcgtgaccctgccacctcagcctcacaccaaggagggcgttgatgcctacaacgaagtgatcgcccgggtgcgaatgtgggtgaacctgaacctgtggcagaagctgaagctaagcagagatgatgccaagcctctgctgagactgaagggattcccttcctttcctctggtcgagagacaggccaacgaagtggactggtgggacatggtgtgtaacgtgaagaagctgatcaacgagaaaaaggaggatggcaaggtgttttggcagaatctggctggctacaagagacaggaagccctgagaccatacctgagcagcgaggaagatcggaagaagggaaagaaattcgctcggtaccagctgggcgacctgctgctgcacctggaaaagaagcacggcgaggactggggaaaggtgtacgacgaggcctgggagcggattgacaagaaagtggaaggcctgagcaagcacatcaagctggaagaggaacggagaagcgaggacgcccagagcaaggccgccctgaccgactggctgcgggctaaggccagcttcgtgatcgagggcctgaaggaggccgacaaggacgagttctgcagatgcgagctgaagctgcagaagtggtacggggacctgcggggaaagcccttcgccatcgaagccgagaacagcatcctggacatcagcggcttcagcaagcagtacaactgtgccttcatctggcagaaggacggcgtgaagaagctgaacctgtacctgatcatcaactacttcaagggcggcaagctgcggttcaagaagatcaaacctgaagccttcgaagccaacagattctacaccgtgatcaacaaaaagagcggcgagatcgtgcccatggaggtgaacttcaacttcgacgaccccaacctgatcatcctgcctctggcctttggcaagagacagggcagagaattcatctggaacgacctgctgtccctggaaaccggcagcctgaagctggccaacggaagagtgatcgagaagacactgtacaacagaagaacccggcaggatgagcctgccctgttcgtggccctgaccttcgagcggcgggaggtcctggactcctccaatatcaaaccaatgaacctgatcggcgtggcaagaggcgaaaacatccccgccgtgatcgccctgaccgaccccgagggctgcccactgagccggtttaaggatagcctgggaaacccaacccacatcctgagaatcggcgagagctataaggagaagcagcggaccatccaggccaagaaggaggtggagcagcggagagccggcggctacagccggaagtacgccagcaaagccaagaatctggcagacgatatggtgagaaacaccgctagagatctgctgtactacgccgtgacccaggatgccatgctgatcttcgccaacctgagccggggcttcggccggcagggcaagcggaccttcatggccgagagacagtacacacggatggaggactggctgaccgccaagctggcctacgagggcctgagcaagacctacctgtccaagacactggcccagtacacctccaagacatgcagcaactgtgggtttaccatcaccagcgccgactacgacagggtgctggagaagctgaagaagacagcaacaggctggatgaccacaattaacggcaaggagctgaaggtggagggccagattacctactacaacagatacaagagacagaacgtagtcaaggacctgtccgtcgagctggatagactgagcgaagaatctgtgaacaacgacatctcctcctggacaaagggcagaagcggagaagctctgagcctcctgaagaaaagattctcccatagacccgtgcaggagaagttcgtgtgcctgaactgcggcttcgagacacacgcagccgagcaagccgccctgaacatcgccagatcctggctgttcctgcggagccaggagtacaagaaataccagacaaacaagacaaccggcaacaccgataagagagccttcgtcgagacctggcagtccttttaccggaagaagcttaaggaggtgtggaaacctgccgtgcggtctggcggatctggcggaggctccaccagccccaagaaaaagagaaaagtctaagctgccttctgcggggcttgccttctggccatgcccttcttctctcccttgcacctgtacctcttggtctttgaataaagcctgagtaggaaggctagcaaaaaaaaaaaaaaaaaaaaaaaaaaaaaaaaaaaaaaaaaaaaaaaaaaaaaaaaaaaaaaaaaaaaaaaaaaaaaaaa

SEQ ID NO: 12296 - RNA, 5785 nt, synthetic construct
  source 1..5785: mol_type = other RNA
aggaaataagagagaaaagaagagtaagaagaaatataagagccaccatggcccctaagaagaagcgtaaagtgagccggatggaacgcctcgtctacgaggtgcggcagaagtgcagaaacatcgaggacatctgcatctcctgcggatctctgaacgtgaccctggagcacccactgttcatcggcggcatgtgccagaactgtaaaaactgttttctggagtgtgcctatcaatacgacgatgacggctaccagagctactgcaccatctgttgcggcggaagagaggtgctgatgtgtggaaataacaactgctgccggtgcttctgcgtggaatgcgtggacctgctggtgggccccggcgccgcccaggccgctattaaggaagatccttggaactgctacatgtgcggccacaagggcacatacggcctgctgagacggagagaggactggcctagcagactgcagatgttcttcgccaataaccacgaccaggagttcgacccccctaaggtgtaccctcccgtccccgccgagaagagaaagcccatccgggtcctgagcctgttcgatggcatcgccaccggtctgctggtgctgaaggacctgggcatccaggtggataggtacattgcctccgaggtgtgcgaggactccatcaccgtgggaatggtgcgtcatcagggcaagatcatgtacgtgggcgacgtgcggagcgtgacacagaagcatatccaggagtggggccctttcgacctggtgatcggcggcagcccttgcaatgacctgagcatcgtgaacccagcccggaagggcctgtacgagggaaccggcagactgttcttcgagttttacagactgctgcacgacgcccggcctaaggaaggcgacgaccggcccttcttttggctgttcgagaatgtggtggccatgggagtcagcgacaagcgggatattagccggttcctggagagcaaccccgtgatgatcgatgccaaggaagtgagcgccgcccaccgggccagatacttctggggcaatctgcctggcatgaacagacccctggccagcaccgtgaacgacaagctggagctgcaggagtgcctggagcacggccggatcgccaagttcagcaaggtgagaaccatcaccacccgaagcaacagcatcaaacaaggcaaggaccagcactttcctgtgttcatgaacgagaaggaggacatcctgtggtgtaccgagatggagagagtgttcgggttcccagtccactacacagatgtcagcaacatgtctagactggccagacagagactgctgggaagaagctggtccgtccctgtgatcagacacctgttcgcccctctgaaggagtacttcgcctgcgtgagcagcggcaacagcaacgccaacagccggggccccagcttctctagcggcctggtgccactgtccctgagagggagccacatgggccccatggagatctacaaaaccgtgagcgcctggaagcggcagcctgtgcgcgtgctgagcctgtttcggaatatcgataaagtcctgaaaagcctgggattcctggagagcggctctggctccggcggtggcaccctgaagtacgtggaggatgtgacaaacgtggtcagacgggatgtggagaagtggggccccttcgatctggtgtacggcagcacccaacccctgggcagctcttgtgaccggtgccctggctggtacatgtttcagttccaccggatcctgcagtacgccctgccgagacaggagtcccagcggccattcttttggattttcatggacaacttgctgctgaccgaggatgaccaggaaactaccactcggttcctgcagaccgaagccgtgaccctgcaggacgtgagaggccgggactaccagaacgccatgcgggtgtggtccaacatccctggactgaaaagcaagcacgcacctctgacccctaaagaagaggagtacctgcaggcccaggtgcggagcagaagcaagctggacgcccctaaggtggatctgctggtgaagaattgcctcctgcccctgagagagtacttcaagtatttcagccagaatagtctgcccctgggaggcagcggcggcggcccccaggagcccgtgaccttcgaggacgtggccgtgtacttcacccagaaccagtgggccagcctggaccccacccagagggccctgtacagggaggtgatgctggagaactacgccagcgtggccagcctggtggtgttccccttccccaagcccgacctggtgagccagctggagagggaggaggccccctggggccccgacccctgggaggccgaggtgctgaggggcatctgccccggcggcggcccaagcagcggcgcccctcctcccagcggcggcagcccagccggctccccaacctctaccgaggagggcacctctgagtccgccacccccgagagcggccctggcacctccaccgagcccagcgagggcagcgcacccggcagccctgccggcagccccacctccacagaggagggaaccagcaccgagcccagcgaaggcagcgccccaggcaccagcaccgagcctagtgagcaggagattaaacggatcaacaagatcagaagaagacttgtgaaagacagcaacaccaagaaggccggcaagacaggccccatgaaaaccctgctggttagagtgatgacacccgatctgagagagcggctggaaaacctgagaaagaagcctgaaaatatcccccagcccatcagcaatacatctagagccaacctgaataagctgctgaccgattacaccgaaatgaagaaggcgatcctgcatgtgtactgggaagagttccagaaggaccctgtgggcctgatgagccgggtggcccagcctgccagcaagaagatcgatcagaacaagctgaaacctgagatggacgagaagggcaacctgaccaccgccggctttgcctgctctcagtgtggccagcccctgttcgtgtacaagctggagcaggtgtctgagaagggcaaggcttacaccaactacttcggacggtgcaatgtggccgagcacgaaaagctgatcctgctggcccagctgaagcccgagaaggatagcgacgaagccgtgacatatagcctgggaaagtttgggcagagggccctggatttctacagcattcatgtgaccaaggagtccacccaccccgtgaagcccctggcccagatcgccggaaacagatacgcctccggacctgtgggaaaggccctgagcgacgcatgtatgggcacaatcgcctccttcctgtctaagtaccaggacatcatcatcgaacaccagaaggtggtgaagggcaaccagaagagactggagagcctgcgggagctggccggcaaggaaaacctggaataccctagcgtgaccctgccacctcagcctcacaccaaggagggcgttgatgcctacaacgaagtgatcgcccgggtgcgaatgtgggtgaacctgaacctgtggcagaagctgaagctaagcagagatgatgccaagcctctgctgagactgaagggattcccttcctttcctctggtcgagagacaggccaacgaagtggactggtgggacatggtgtgtaacgtgaagaagctgatcaacgagaaaaaggaggatggcaaggtgttttggcagaatctggctggctacaagagacaggaagccctgagaccatacctgagcagcgaggaagatcggaagaagggaaagaaattcgctcggtaccagctgggcgacctgctgctgcacctggaaaagaagcacggcgaggactggggaaaggtgtacgacgaggcctgggagcggattgacaagaaagtggaaggcctgagcaagcacatcaagctggaagaggaacggagaagcgaggacgcccagagcaaggccgccctgaccgactggctgcgggctaaggccagcttcgtgatcgagggcctgaaggaggccgacaaggacgagttctgcagatgcgagctgaagctgcagaagtggtacggggacctgcggggaaagcccttcgccatcgaagccgagaacagcatcctggacatcagcggcttcagcaagcagtacaactgtgccttcatctggcagaaggacggcgtgaagaagctgaacctgtacctgatcatcaactacttcaagggcggcaagctgcggttcaagaagatcaaacctgaagccttcgaagccaacagattctacaccgtgatcaacaaaaagagcggcgagatcgtgcccatggaggtgaacttcaacttcgacgaccccaacctgatcatcctgcctctggcctttggcaagagacagggcagagaattcatctggaacgacctgctgtccctggaaaccggcagcctgaagctggccaacggaagagtgatcgagaagacactgtacaacagaagaacccggcaggatgagcctgccctgttcgtggccctgaccttcgagcggcgggaggtcctggactcctccaatatcaaaccaatgaacctgatcggcgtggcaagaggcgaaaacatccccgccgtgatcgccctgaccgaccccgagggctgcccactgagccggtttaaggatagcctgggaaacccaacccacatcctgagaatcggcgagagctataaggagaagcagcggaccatccaggccaagaaggaggtggagcagcggagagccggcggctacagccggaagtacgccagcaaagccaagaatctggcagacgatatggtgagaaacaccgctagagatctgctgtactacgccgtgacccaggatgccatgctgatcttcgccaacctgagccggggcttcggccggcagggcaagcggaccttcatggccgagagacagtacacacggatggaggactggctgaccgccaagctggcctacgagggcctgagcaagacctacctgtccaagacactggcccagtacacctccaagacatgcagcaactgtgggtttaccatcaccagcgccgactacgacagggtgctggagaagctgaagaagacagcaacaggctggatgaccacaattaacggcaaggagctgaaggtggagggccagattacctactacaacagatacaagagacagaacgtagtcaaggacctgtccgtcgagctggatagactgagcgaagaatctgtgaacaacgacatctcctcctggacaaagggcagaagcggagaagctctgagcctcctgaagaaaagattctcccatagacccgtgcaggagaagttcgtgtgcctgaactgcggcttcgagacacacgcagccgagcaagccgccctgaacatcgccagatcctggctgttcctgcggagccaggagtacaagaaataccagacaaacaagacaaccggcaacaccgataagagagccttcgtcgagacctggcagtccttttaccggaagaagcttaaggaggtgtggaaacctgccgtgcggtctggcggatctggcggaggctccaccagccccaagaaaaagagaaaagtctaagctgccttctgcggggcttgccttctggccatgcccttcttctctcccttgcacctgtacctcttggtctttgaataaagcctgagtaggaaggctagcaaaaaaaaaaaaaaaaaaaaaaaaaaaaaaaaaaaaaaaaaaaaaaaaaaaaaaaaaaaaaaaaaaaaaaaaaaaaaaaa

SEQ ID NO: 12297 - RNA, 5785 nt, synthetic construct
  source 1..5785: mol_type = other RNA
aggaaataagagagaaaagaagagtaagaagaaatataagagccaccatggcccctaagaagaagcgtaaagtgagccggatggaacgcctcgtctacgaggtgcggcagaagtgcagaaacatcgaggacatctgcatctcctgcggatctctgaacgtgaccctggagcacccactgttcatcggcggcatgtgccagaactgtaaaaactgttttctggagtgtgcctatcaatacgacgatgacggctaccagagctactgcaccatctgttgcggcggaagagaggtgctgatgtgtggaaataacaactgctgccggtgcttctgcgtggaatgcgtggacctgctggtgggccccggcgccgcccaggccgctattaaggaagatccttggaactgctacatgtgcggccacaagggcacatacggcctgctgagacggagagaggactggcctagcagactgcagatgttcttcgccaataaccacgaccaggagttcgacccccctaaggtgtaccctcccgtccccgccgagaagagaaagcccatccgggtcctgagcctgttcgatggcatcgccaccggtctgctggtgctgaaggacctgggcatccaggtggataggtacattgcctccgaggtgtgcgaggactccatcaccgtgggaatggtgcgtcatcagggcaagatcatgtacgtgggcgacgtgcggagcgtgacacagaagcatatccaggagtggggccctttcgacctggtgatcggcggcagcccttgcaatgacctgagcatcgtgaacccagcccggaagggcctgtacgagggaaccggcagactgttcttcgagttttacagactgctgcacgacgcccggcctaaggaaggcgacgaccggcccttcttttggctgttcgagaatgtggtggccatgggagtcagcgacaagcgggatattagccggttcctggagagcaaccccgtgatgatcgatgccaaggaagtgagcgccgcccaccgggccagatacttctggggcaatctgcctggcatgaacagacccctggccagcaccgtgaacgacaagctggagctgcaggagtgcctggagcacggccggatcgccaagttcagcaaggtgagaaccatcaccacccgaagcaacagcatcaaacaaggcaaggaccagcactttcctgtgttcatgaacgagaaggaggacatcctgtggtgtaccgagatggagagagtgttcgggttcccagtccactacacagatgtcagcaacatgtctagactggccagacagagactgctgggaagaagctggtccgtccctgtgatcagacacctgttcgcccctctgaaggagtacttcgcctgcgtgagcagcggcaacagcaacgccaacagccggggccccagcttctctagcggcctggtgccactgtccctgagagggagccacatgggccccatggagatctacaaaaccgtgagcgcctggaagcggcagcctgtgcgcgtgctgagcctgtttcggaatatcgataaagtcctgaaaagcctgggattcctggagagcggctctggctccggcggtggcaccctgaagtacgtggaggatgtgacaaacgtggtcagacgggatgtggagaagtggggccccttcgatctggtgtacggcagcacccaacccctgggcagctcttgtgaccggtgccctggctggtacatgtttcagttccaccggatcctgcagtacgccctgccgagacaggagtcccagcggccattcttttggattttcatggacaacttgctgctgaccgaggatgaccaggaaactaccactcggttcctgcagaccgaagccgtgaccctgcaggacgtgagaggccgggactaccagaacgccatgcgggtgtggtccaacatccctggactgaaaagcaagcacgcacctctgacccctaaagaagaggagtacctgcaggcccaggtgcggagcagaagcaagctggacgcccctaaggtggatctgctggtgaagaattgcctcctgcccctgagagagtacttcaagtatttcagccagaatagtctgcccctgggaggcagcggcggcggcttccagcacctggtgatgttcagggacgtggccgtggacttcagccaggaggagtgggagtgcctgaacagctaccagaggaacctgtacagggacgtgatcctggagaactacagcaacctggtgagcgtggccggctgcagcatcagcaagcccgacgtgatcaccctgctggagcagggcaaggagccctggatggtggtgagggacgagaggaggaggagcctggacctggagagcaggggcggcccaagcagcggcgcccctcctcccagcggcggcagcccagccggctccccaacctctaccgaggagggcacctctgagtccgccacccccgagagcggccctggcacctccaccgagcccagcgagggcagcgcacccggcagccctgccggcagccccacctccacagaggagggaaccagcaccgagcccagcgaaggcagcgccccaggcaccagcaccgagcctagtgagcaggagattaaacggatcaacaagatcagaagaagacttgtgaaagacagcaacaccaagaaggccggcaagacaggccccatgaaaaccctgctggttagagtgatgacacccgatctgagagagcggctggaaaacctgagaaagaagcctgaaaatatcccccagcccatcagcaatacatctagagccaacctgaataagctgctgaccgattacaccgaaatgaagaaggcgatcctgcatgtgtactgggaagagttccagaaggaccctgtgggcctgatgagccgggtggcccagcctgccagcaagaagatcgatcagaacaagctgaaacctgagatggacgagaagggcaacctgaccaccgccggctttgcctgctctcagtgtggccagcccctgttcgtgtacaagctggagcaggtgtctgagaagggcaaggcttacaccaactacttcggacggtgcaatgtggccgagcacgaaaagctgatcctgctggcccagctgaagcccgagaaggatagcgacgaagccgtgacatatagcctgggaaagtttgggcagagggccctggatttctacagcattcatgtgaccaaggagtccacccaccccgtgaagcccctggcccagatcgccggaaacagatacgcctccggacctgtgggaaaggccctgagcgacgcatgtatgggcacaatcgcctccttcctgtctaagtaccaggacatcatcatcgaacaccagaaggtggtgaagggcaaccagaagagactggagagcctgcgggagctggccggcaaggaaaacctggaataccctagcgtgaccctgccacctcagcctcacaccaaggagggcgttgatgcctacaacgaagtgatcgcccgggtgcgaatgtgggtgaacctgaacctgtggcagaagctgaagctaagcagagatgatgccaagcctctgctgagactgaagggattcccttcctttcctctggtcgagagacaggccaacgaagtggactggtgggacatggtgtgtaacgtgaagaagctgatcaacgagaaaaaggaggatggcaaggtgttttggcagaatctggctggctacaagagacaggaagccctgagaccatacctgagcagcgaggaagatcggaagaagggaaagaaattcgctcggtaccagctgggcgacctgctgctgcacctggaaaagaagcacggcgaggactggggaaaggtgtacgacgaggcctgggagcggattgacaagaaagtggaaggcctgagcaagcacatcaagctggaagaggaacggagaagcgaggacgcccagagcaaggccgccctgaccgactggctgcgggctaaggccagcttcgtgatcgagggcctgaaggaggccgacaaggacgagttctgcagatgcgagctgaagctgcagaagtggtacggggacctgcggggaaagcccttcgccatcgaagccgagaacagcatcctggacatcagcggcttcagcaagcagtacaactgtgccttcatctggcagaaggacggcgtgaagaagctgaacctgtacctgatcatcaactacttcaagggcggcaagctgcggttcaagaagatcaaacctgaagccttcgaagccaacagattctacaccgtgatcaacaaaaagagcggcgagatcgtgcccatggaggtgaacttcaacttcgacgaccccaacctgatcatcctgcctctggcctttggcaagagacagggcagagaattcatctggaacgacctgctgtccctggaaaccggcagcctgaagctggccaacggaagagtgatcgagaagacactgtacaacagaagaacccggcaggatgagcctgccctgttcgtggccctgaccttcgagcggcgggaggtcctggactcctccaatatcaaaccaatgaacctgatcggcgtggcaagaggcgaaaacatccccgccgtgatcgccctgaccgaccccgagggctgcccactgagccggtttaaggatagcctgggaaacccaacccacatcctgagaatcggcgagagctataaggagaagcagcggaccatccaggccaagaaggaggtggagcagcggagagccggcggctacagccggaagtacgccagcaaagccaagaatctggcagacgatatggtgagaaacaccgctagagatctgctgtactacgccgtgacccaggatgccatgctgatcttcgccaacctgagccggggcttcggccggcagggcaagcggaccttcatggccgagagacagtacacacggatggaggactggctgaccgccaagctggcctacgagggcctgagcaagacctacctgtccaagacactggcccagtacacctccaagacatgcagcaactgtgggtttaccatcaccagcgccgactacgacagggtgctggagaagctgaagaagacagcaacaggctggatgaccacaattaacggcaaggagctgaaggtggagggccagattacctactacaacagatacaagagacagaacgtagtcaaggacctgtccgtcgagctggatagactgagcgaagaatctgtgaacaacgacatctcctcctggacaaagggcagaagcggagaagctctgagcctcctgaagaaaagattctcccatagacccgtgcaggagaagttcgtgtgcctgaactgcggcttcgagacacacgcagccgagcaagccgccctgaacatcgccagatcctggctgttcctgcggagccaggagtacaagaaataccagacaaacaagacaaccggcaacaccgataagagagccttcgtcgagacctggcagtccttttaccggaagaagcttaaggaggtgtggaaacctgccgtgcggtctggcggatctggcggaggctccaccagccccaagaaaaagagaaaagtctaagctgccttctgcggggcttgccttctggccatgcccttcttctctcccttgcacctgtacctcttggtctttgaataaagcctgagtaggaaggctagcaaaaaaaaaaaaaaaaaaaaaaaaaaaaaaaaaaaaaaaaaaaaaaaaaaaaaaaaaaaaaaaaaaaaaaaaaaaaaaaa

SEQ ID NO: 12298 - RNA, 5785 nt, synthetic construct
  source 1..5785: mol_type = other RNA
aggaaataagagagaaaagaagagtaagaagaaatataagagccaccatggcccctaagaagaagcgtaaagtgagccggatggaacgcctcgtctacgaggtgcggcagaagtgcagaaacatcgaggacatctgcatctcctgcggatctctgaacgtgaccctggagcacccactgttcatcggcggcatgtgccagaactgtaaaaactgttttctggagtgtgcctatcaatacgacgatgacggctaccagagctactgcaccatctgttgcggcggaagagaggtgctgatgtgtggaaataacaactgctgccggtgcttctgcgtggaatgcgtggacctgctggtgggccccggcgccgcccaggccgctattaaggaagatccttggaactgctacatgtgcggccacaagggcacatacggcctgctgagacggagagaggactggcctagcagactgcagatgttcttcgccaataaccacgaccaggagttcgacccccctaaggtgtaccctcccgtccccgccgagaagagaaagcccatccgggtcctgagcctgttcgatggcatcgccaccggtctgctggtgctgaaggacctgggcatccaggtggataggtacattgcctccgaggtgtgcgaggactccatcaccgtgggaatggtgcgtcatcagggcaagatcatgtacgtgggcgacgtgcggagcgtgacacagaagcatatccaggagtggggccctttcgacctggtgatcggcggcagcccttgcaatgacctgagcatcgtgaacccagcccggaagggcctgtacgagggaaccggcagactgttcttcgagttttacagactgctgcacgacgcccggcctaaggaaggcgacgaccggcccttcttttggctgttcgagaatgtggtggccatgggagtcagcgacaagcgggatattagccggttcctggagagcaaccccgtgatgatcgatgccaaggaagtgagcgccgcccaccgggccagatacttctggggcaatctgcctggcatgaacagacccctggccagcaccgtgaacgacaagctggagctgcaggagtgcctggagcacggccggatcgccaagttcagcaaggtgagaaccatcaccacccgaagcaacagcatcaaacaaggcaaggaccagcactttcctgtgttcatgaacgagaaggaggacatcctgtggtgtaccgagatggagagagtgttcgggttcccagtccactacacagatgtcagcaacatgtctagactggccagacagagactgctgggaagaagctggtccgtccctgtgatcagacacctgttcgcccctctgaaggagtacttcgcctgcgtgagcagcggcaacagcaacgccaacagccggggccccagcttctctagcggcctggtgccactgtccctgagagggagccacatgggccccatggagatctacaaaaccgtgagcgcctggaagcggcagcctgtgcgcgtgctgagcctgtttcggaatatcgataaagtcctgaaaagcctgggattcctggagagcggctctggctccggcggtggcaccctgaagtacgtggaggatgtgacaaacgtggtcagacgggatgtggagaagtggggccccttcgatctggtgtacggcagcacccaacccctgggcagctcttgtgaccggtgccctggctggtacatgtttcagttccaccggatcctgcagtacgccctgccgagacaggagtcccagcggccattcttttggattttcatggacaacttgctgctgaccgaggatgaccaggaaactaccactcggttcctgcagaccgaagccgtgaccctgcaggacgtgagaggccgggactaccagaacgccatgcgggtgtggtccaacatccctggactgaaaagcaagcacgcacctctgacccctaaagaagaggagtacctgcaggcccaggtgcggagcagaagcaagctggacgcccctaaggtggatctgctggtgaagaattgcctcctgcccctgagagagtacttcaagtatttcagccagaatagtctgcccctgggaggcagcggcggcggcccccaggagcccgtgaccttcaaggacgtggccgtggacttcagccaggaggagtggggcctgctgggccccgcccagaggcacctgtacagggacgtgatgctggagaactacaggaacctggtgagcctgggcctgatcctggccaagcccgaggtggtgtgccacctggagcagggcggcgagctgtggaagcccgagcacggcgtgctgtgcagcggcgacggcgagctgtgggtgaggggcggcccaagcagcggcgcccctcctcccagcggcggcagcccagccggctccccaacctctaccgaggagggcacctctgagtccgccacccccgagagcggccctggcacctccaccgagcccagcgagggcagcgcacccggcagccctgccggcagccccacctccacagaggagggaaccagcaccgagcccagcgaaggcagcgccccaggcaccagcaccgagcctagtgagcaggagattaaacggatcaacaagatcagaagaagacttgtgaaagacagcaacaccaagaaggccggcaagacaggccccatgaaaaccctgctggttagagtgatgacacccgatctgagagagcggctggaaaacctgagaaagaagcctgaaaatatcccccagcccatcagcaatacatctagagccaacctgaataagctgctgaccgattacaccgaaatgaagaaggcgatcctgcatgtgtactgggaagagttccagaaggaccctgtgggcctgatgagccgggtggcccagcctgccagcaagaagatcgatcagaacaagctgaaacctgagatggacgagaagggcaacctgaccaccgccggctttgcctgctctcagtgtggccagcccctgttcgtgtacaagctggagcaggtgtctgagaagggcaaggcttacaccaactacttcggacggtgcaatgtggccgagcacgaaaagctgatcctgctggcccagctgaagcccgagaaggatagcgacgaagccgtgacatatagcctgggaaagtttgggcagagggccctggatttctacagcattcatgtgaccaaggagtccacccaccccgtgaagcccctggcccagatcgccggaaacagatacgcctccggacctgtgggaaaggccctgagcgacgcatgtatgggcacaatcgcctccttcctgtctaagtaccaggacatcatcatcgaacaccagaaggtggtgaagggcaaccagaagagactggagagcctgcgggagctggccggcaaggaaaacctggaataccctagcgtgaccctgccacctcagcctcacaccaaggagggcgttgatgcctacaacgaagtgatcgcccgggtgcgaatgtgggtgaacctgaacctgtggcagaagctgaagctaagcagagatgatgccaagcctctgctgagactgaagggattcccttcctttcctctggtcgagagacaggccaacgaagtggactggtgggacatggtgtgtaacgtgaagaagctgatcaacgagaaaaaggaggatggcaaggtgttttggcagaatctggctggctacaagagacaggaagccctgagaccatacctgagcagcgaggaagatcggaagaagggaaagaaattcgctcggtaccagctgggcgacctgctgctgcacctggaaaagaagcacggcgaggactggggaaaggtgtacgacgaggcctgggagcggattgacaagaaagtggaaggcctgagcaagcacatcaagctggaagaggaacggagaagcgaggacgcccagagcaaggccgccctgaccgactggctgcgggctaaggccagcttcgtgatcgagggcctgaaggaggccgacaaggacgagttctgcagatgcgagctgaagctgcagaagtggtacggggacctgcggggaaagcccttcgccatcgaagccgagaacagcatcctggacatcagcggcttcagcaagcagtacaactgtgccttcatctggcagaaggacggcgtgaagaagctgaacctgtacctgatcatcaactacttcaagggcggcaagctgcggttcaagaagatcaaacctgaagccttcgaagccaacagattctacaccgtgatcaacaaaaagagcggcgagatcgtgcccatggaggtgaacttcaacttcgacgaccccaacctgatcatcctgcctctggcctttggcaagagacagggcagagaattcatctggaacgacctgctgtccctggaaaccggcagcctgaagctggccaacggaagagtgatcgagaagacactgtacaacagaagaacccggcaggatgagcctgccctgttcgtggccctgaccttcgagcggcgggaggtcctggactcctccaatatcaaaccaatgaacctgatcggcgtggcaagaggcgaaaacatccccgccgtgatcgccctgaccgaccccgagggctgcccactgagccggtttaaggatagcctgggaaacccaacccacatcctgagaatcggcgagagctataaggagaagcagcggaccatccaggccaagaaggaggtggagcagcggagagccggcggctacagccggaagtacgccagcaaagccaagaatctggcagacgatatggtgagaaacaccgctagagatctgctgtactacgccgtgacccaggatgccatgctgatcttcgccaacctgagccggggcttcggccggcagggcaagcggaccttcatggccgagagacagtacacacggatggaggactggctgaccgccaagctggcctacgagggcctgagcaagacctacctgtccaagacactggcccagtacacctccaagacatgcagcaactgtgggtttaccatcaccagcgccgactacgacagggtgctggagaagctgaagaagacagcaacaggctggatgaccacaattaacggcaaggagctgaaggtggagggccagattacctactacaacagatacaagagacagaacgtagtcaaggacctgtccgtcgagctggatagactgagcgaagaatctgtgaacaacgacatctcctcctggacaaagggcagaagcggagaagctctgagcctcctgaagaaaagattctcccatagacccgtgcaggagaagttcgtgtgcctgaactgcggcttcgagacacacgcagccgagcaagccgccctgaacatcgccagatcctggctgttcctgcggagccaggagtacaagaaataccagacaaacaagacaaccggcaacaccgataagagagccttcgtcgagacctggcagtccttttaccggaagaagcttaaggaggtgtggaaacctgccgtgcggtctggcggatctggcggaggctccaccagccccaagaaaaagagaaaagtctaagctgccttctgcggggcttgccttctggccatgcccttcttctctcccttgcacctgtacctcttggtctttgaataaagcctgagtaggaaggctagcaaaaaaaaaaaaaaaaaaaaaaaaaaaaaaaaaaaaaaaaaaaaaaaaaaaaaaaaaaaaaaaaaaaaaaaaaaaaaaaa

SEQ ID NO: 12299 - RNA, 5785 nt, synthetic construct
  source 1..5785: mol_type = other RNA
aggaaataagagagaaaagaagagtaagaagaaatataagagccaccatggcccctaagaagaagcgtaaagtgagccggatggaacgcctcgtctacgaggtgcggcagaagtgcagaaacatcgaggacatctgcatctcctgcggatctctgaacgtgaccctggagcacccactgttcatcggcggcatgtgccagaactgtaaaaactgttttctggagtgtgcctatcaatacgacgatgacggctaccagagctactgcaccatctgttgcggcggaagagaggtgctgatgtgtggaaataacaactgctgccggtgcttctgcgtggaatgcgtggacctgctggtgggccccggcgccgcccaggccgctattaaggaagatccttggaactgctacatgtgcggccacaagggcacatacggcctgctgagacggagagaggactggcctagcagactgcagatgttcttcgccaataaccacgaccaggagttcgacccccctaaggtgtaccctcccgtccccgccgagaagagaaagcccatccgggtcctgagcctgttcgatggcatcgccaccggtctgctggtgctgaaggacctgggcatccaggtggataggtacattgcctccgaggtgtgcgaggactccatcaccgtgggaatggtgcgtcatcagggcaagatcatgtacgtgggcgacgtgcggagcgtgacacagaagcatatccaggagtggggccctttcgacctggtgatcggcggcagcccttgcaatgacctgagcatcgtgaacccagcccggaagggcctgtacgagggaaccggcagactgttcttcgagttttacagactgctgcacgacgcccggcctaaggaaggcgacgaccggcccttcttttggctgttcgagaatgtggtggccatgggagtcagcgacaagcgggatattagccggttcctggagagcaaccccgtgatgatcgatgccaaggaagtgagcgccgcccaccgggccagatacttctggggcaatctgcctggcatgaacagacccctggccagcaccgtgaacgacaagctggagctgcaggagtgcctggagcacggccggatcgccaagttcagcaaggtgagaaccatcaccacccgaagcaacagcatcaaacaaggcaaggaccagcactttcctgtgttcatgaacgagaaggaggacatcctgtggtgtaccgagatggagagagtgttcgggttcccagtccactacacagatgtcagcaacatgtctagactggccagacagagactgctgggaagaagctggtccgtccctgtgatcagacacctgttcgcccctctgaaggagtacttcgcctgcgtgagcagcggcaacagcaacgccaacagccggggccccagcttctctagcggcctggtgccactgtccctgagagggagccacatgggccccatggagatctacaaaaccgtgagcgcctggaagcggcagcctgtgcgcgtgctgagcctgtttcggaatatcgataaagtcctgaaaagcctgggattcctggagagcggctctggctccggcggtggcaccctgaagtacgtggaggatgtgacaaacgtggtcagacgggatgtggagaagtggggccccttcgatctggtgtacggcagcacccaacccctgggcagctcttgtgaccggtgccctggctggtacatgtttcagttccaccggatcctgcagtacgccctgccgagacaggagtcccagcggccattcttttggattttcatggacaacttgctgctgaccgaggatgaccaggaaactaccactcggttcctgcagaccgaagccgtgaccctgcaggacgtgagaggccgggactaccagaacgccatgcgggtgtggtccaacatccctggactgaaaagcaagcacgcacctctgacccctaaagaagaggagtacctgcaggcccaggtgcggagcagaagcaagctggacgcccctaaggtggatctgctggtgaagaattgcctcctgcccctgagagagtacttcaagtatttcagccagaatagtctgcccctgggaggcagcggcggcggcaagcccaggaccgtgagcttcgccgacgtggccgtgtacttcagcagggaggagtggggctgcctgaggcccgcccagagggccctgtacagggacgtgatgagggagacctacggccacctgggcgccctgggcttccccggccccaagcccgccctgatcagctggatggagcaggagaccgaggcctggagccccgccgcccaggaccccgagaagggcgagaggctgggcggcgccaggggcggcccaagcagcggcgcccctcctcccagcggcggcagcccagccggctccccaacctctaccgaggagggcacctctgagtccgccacccccgagagcggccctggcacctccaccgagcccagcgagggcagcgcacccggcagccctgccggcagccccacctccacagaggagggaaccagcaccgagcccagcgaaggcagcgccccaggcaccagcaccgagcctagtgagcaggagattaaacggatcaacaagatcagaagaagacttgtgaaagacagcaacaccaagaaggccggcaagacaggccccatgaaaaccctgctggttagagtgatgacacccgatctgagagagcggctggaaaacctgagaaagaagcctgaaaatatcccccagcccatcagcaatacatctagagccaacctgaataagctgctgaccgattacaccgaaatgaagaaggcgatcctgcatgtgtactgggaagagttccagaaggaccctgtgggcctgatgagccgggtggcccagcctgccagcaagaagatcgatcagaacaagctgaaacctgagatggacgagaagggcaacctgaccaccgccggctttgcctgctctcagtgtggccagcccctgttcgtgtacaagctggagcaggtgtctgagaagggcaaggcttacaccaactacttcggacggtgcaatgtggccgagcacgaaaagctgatcctgctggcccagctgaagcccgagaaggatagcgacgaagccgtgacatatagcctgggaaagtttgggcagagggccctggatttctacagcattcatgtgaccaaggagtccacccaccccgtgaagcccctggcccagatcgccggaaacagatacgcctccggacctgtgggaaaggccctgagcgacgcatgtatgggcacaatcgcctccttcctgtctaagtaccaggacatcatcatcgaacaccagaaggtggtgaagggcaaccagaagagactggagagcctgcgggagctggccggcaaggaaaacctggaataccctagcgtgaccctgccacctcagcctcacaccaaggagggcgttgatgcctacaacgaagtgatcgcccgggtgcgaatgtgggtgaacctgaacctgtggcagaagctgaagctaagcagagatgatgccaagcctctgctgagactgaagggattcccttcctttcctctggtcgagagacaggccaacgaagtggactggtgggacatggtgtgtaacgtgaagaagctgatcaacgagaaaaaggaggatggcaaggtgttttggcagaatctggctggctacaagagacaggaagccctgagaccatacctgagcagcgaggaagatcggaagaagggaaagaaattcgctcggtaccagctgggcgacctgctgctgcacctggaaaagaagcacggcgaggactggggaaaggtgtacgacgaggcctgggagcggattgacaagaaagtggaaggcctgagcaagcacatcaagctggaagaggaacggagaagcgaggacgcccagagcaaggccgccctgaccgactggctgcgggctaaggccagcttcgtgatcgagggcctgaaggaggccgacaaggacgagttctgcagatgcgagctgaagctgcagaagtggtacggggacctgcggggaaagcccttcgccatcgaagccgagaacagcatcctggacatcagcggcttcagcaagcagtacaactgtgccttcatctggcagaaggacggcgtgaagaagctgaacctgtacctgatcatcaactacttcaagggcggcaagctgcggttcaagaagatcaaacctgaagccttcgaagccaacagattctacaccgtgatcaacaaaaagagcggcgagatcgtgcccatggaggtgaacttcaacttcgacgaccccaacctgatcatcctgcctctggcctttggcaagagacagggcagagaattcatctggaacgacctgctgtccctggaaaccggcagcctgaagctggccaacggaagagtgatcgagaagacactgtacaacagaagaacccggcaggatgagcctgccctgttcgtggccctgaccttcgagcggcgggaggtcctggactcctccaatatcaaaccaatgaacctgatcggcgtggcaagaggcgaaaacatccccgccgtgatcgccctgaccgaccccgagggctgcccactgagccggtttaaggatagcctgggaaacccaacccacatcctgagaatcggcgagagctataaggagaagcagcggaccatccaggccaagaaggaggtggagcagcggagagccggcggctacagccggaagtacgccagcaaagccaagaatctggcagacgatatggtgagaaacaccgctagagatctgctgtactacgccgtgacccaggatgccatgctgatcttcgccaacctgagccggggcttcggccggcagggcaagcggaccttcatggccgagagacagtacacacggatggaggactggctgaccgccaagctggcctacgagggcctgagcaagacctacctgtccaagacactggcccagtacacctccaagacatgcagcaactgtgggtttaccatcaccagcgccgactacgacagggtgctggagaagctgaagaagacagcaacaggctggatgaccacaattaacggcaaggagctgaaggtggagggccagattacctactacaacagatacaagagacagaacgtagtcaaggacctgtccgtcgagctggatagactgagcgaagaatctgtgaacaacgacatctcctcctggacaaagggcagaagcggagaagctctgagcctcctgaagaaaagattctcccatagacccgtgcaggagaagttcgtgtgcctgaactgcggcttcgagacacacgcagccgagcaagccgccctgaacatcgccagatcctggctgttcctgcggagccaggagtacaagaaataccagacaaacaagacaaccggcaacaccgataagagagccttcgtcgagacctggcagtccttttaccggaagaagcttaaggaggtgtggaaacctgccgtgcggtctggcggatctggcggaggctccaccagccccaagaaaaagagaaaagtctaagctgccttctgcggggcttgccttctggccatgcccttcttctctcccttgcacctgtacctcttggtctttgaataaagcctgagtaggaaggctagcaaaaaaaaaaaaaaaaaaaaaaaaaaaaaaaaaaaaaaaaaaaaaaaaaaaaaaaaaaaaaaaaaaaaaaaaaaaaaaaa

SEQ ID NO: 12300 - RNA, 5785 nt, synthetic construct
  source 1..5785: mol_type = other RNA
aggaaataagagagaaaagaagagtaagaagaaatataagagccaccatggcccctaagaagaagcgtaaagtgagccggatggaacgcctcgtctacgaggtgcggcagaagtgcagaaacatcgaggacatctgcatctcctgcggatctctgaacgtgaccctggagcacccactgttcatcggcggcatgtgccagaactgtaaaaactgttttctggagtgtgcctatcaatacgacgatgacggctaccagagctactgcaccatctgttgcggcggaagagaggtgctgatgtgtggaaataacaactgctgccggtgcttctgcgtggaatgcgtggacctgctggtgggccccggcgccgcccaggccgctattaaggaagatccttggaactgctacatgtgcggccacaagggcacatacggcctgctgagacggagagaggactggcctagcagactgcagatgttcttcgccaataaccacgaccaggagttcgacccccctaaggtgtaccctcccgtccccgccgagaagagaaagcccatccgggtcctgagcctgttcgatggcatcgccaccggtctgctggtgctgaaggacctgggcatccaggtggataggtacattgcctccgaggtgtgcgaggactccatcaccgtgggaatggtgcgtcatcagggcaagatcatgtacgtgggcgacgtgcggagcgtgacacagaagcatatccaggagtggggccctttcgacctggtgatcggcggcagcccttgcaatgacctgagcatcgtgaacccagcccggaagggcctgtacgagggaaccggcagactgttcttcgagttttacagactgctgcacgacgcccggcctaaggaaggcgacgaccggcccttcttttggctgttcgagaatgtggtggccatgggagtcagcgacaagcgggatattagccggttcctggagagcaaccccgtgatgatcgatgccaaggaagtgagcgccgcccaccgggccagatacttctggggcaatctgcctggcatgaacagacccctggccagcaccgtgaacgacaagctggagctgcaggagtgcctggagcacggccggatcgccaagttcagcaaggtgagaaccatcaccacccgaagcaacagcatcaaacaaggcaaggaccagcactttcctgtgttcatgaacgagaaggaggacatcctgtggtgtaccgagatggagagagtgttcgggttcccagtccactacacagatgtcagcaacatgtctagactggccagacagagactgctgggaagaagctggtccgtccctgtgatcagacacctgttcgcccctctgaaggagtacttcgcctgcgtgagcagcggcaacagcaacgccaacagccggggccccagcttctctagcggcctggtgccactgtccctgagagggagccacatgggccccatggagatctacaaaaccgtgagcgcctggaagcggcagcctgtgcgcgtgctgagcctgtttcggaatatcgataaagtcctgaaaagcctgggattcctggagagcggctctggctccggcggtggcaccctgaagtacgtggaggatgtgacaaacgtggtcagacgggatgtggagaagtggggccccttcgatctggtgtacggcagcacccaacccctgggcagctcttgtgaccggtgccctggctggtacatgtttcagttccaccggatcctgcagtacgccctgccgagacaggagtcccagcggccattcttttggattttcatggacaacttgctgctgaccgaggatgaccaggaaactaccactcggttcctgcagaccgaagccgtgaccctgcaggacgtgagaggccgggactaccagaacgccatgcgggtgtggtccaacatccctggactgaaaagcaagcacgcacctctgacccctaaagaagaggagtacctgcaggcccaggtgcggagcagaagcaagctggacgcccctaaggtggatctgctggtgaagaattgcctcctgcccctgagagagtacttcaagtatttcagccagaatagtctgcccctgggaggcagcggcggcggctgccaggccctggtgaccttcgaggacgtggccgtgaccttcaccgacgacgagtggaagaggctggtgcccgtgcagagggccctgtacaaggccgtgatgctggagaactacgagagcatcatcagcctgggcctgcccgtgcccaggcccgacctgatcctgcagttcaagaggaggggcgagccctggatgaggggcttccacggcagcgaggagaaggcctggcccgagagcgtgagcggcggcccaagcagcggcgcccctcctcccagcggcggcagcccagccggctccccaacctctaccgaggagggcacctctgagtccgccacccccgagagcggccctggcacctccaccgagcccagcgagggcagcgcacccggcagccctgccggcagccccacctccacagaggagggaaccagcaccgagcccagcgaaggcagcgccccaggcaccagcaccgagcctagtgagcaggagattaaacggatcaacaagatcagaagaagacttgtgaaagacagcaacaccaagaaggccggcaagacaggccccatgaaaaccctgctggttagagtgatgacacccgatctgagagagcggctggaaaacctgagaaagaagcctgaaaatatcccccagcccatcagcaatacatctagagccaacctgaataagctgctgaccgattacaccgaaatgaagaaggcgatcctgcatgtgtactgggaagagttccagaaggaccctgtgggcctgatgagccgggtggcccagcctgccagcaagaagatcgatcagaacaagctgaaacctgagatggacgagaagggcaacctgaccaccgccggctttgcctgctctcagtgtggccagcccctgttcgtgtacaagctggagcaggtgtctgagaagggcaaggcttacaccaactacttcggacggtgcaatgtggccgagcacgaaaagctgatcctgctggcccagctgaagcccgagaaggatagcgacgaagccgtgacatatagcctgggaaagtttgggcagagggccctggatttctacagcattcatgtgaccaaggagtccacccaccccgtgaagcccctggcccagatcgccggaaacagatacgcctccggacctgtgggaaaggccctgagcgacgcatgtatgggcacaatcgcctccttcctgtctaagtaccaggacatcatcatcgaacaccagaaggtggtgaagggcaaccagaagagactggagagcctgcgggagctggccggcaaggaaaacctggaataccctagcgtgaccctgccacctcagcctcacaccaaggagggcgttgatgcctacaacgaagtgatcgcccgggtgcgaatgtgggtgaacctgaacctgtggcagaagctgaagctaagcagagatgatgccaagcctctgctgagactgaagggattcccttcctttcctctggtcgagagacaggccaacgaagtggactggtgggacatggtgtgtaacgtgaagaagctgatcaacgagaaaaaggaggatggcaaggtgttttggcagaatctggctggctacaagagacaggaagccctgagaccatacctgagcagcgaggaagatcggaagaagggaaagaaattcgctcggtaccagctgggcgacctgctgctgcacctggaaaagaagcacggcgaggactggggaaaggtgtacgacgaggcctgggagcggattgacaagaaagtggaaggcctgagcaagcacatcaagctggaagaggaacggagaagcgaggacgcccagagcaaggccgccctgaccgactggctgcgggctaaggccagcttcgtgatcgagggcctgaaggaggccgacaaggacgagttctgcagatgcgagctgaagctgcagaagtggtacggggacctgcggggaaagcccttcgccatcgaagccgagaacagcatcctggacatcagcggcttcagcaagcagtacaactgtgccttcatctggcagaaggacggcgtgaagaagctgaacctgtacctgatcatcaactacttcaagggcggcaagctgcggttcaagaagatcaaacctgaagccttcgaagccaacagattctacaccgtgatcaacaaaaagagcggcgagatcgtgcccatggaggtgaacttcaacttcgacgaccccaacctgatcatcctgcctctggcctttggcaagagacagggcagagaattcatctggaacgacctgctgtccctggaaaccggcagcctgaagctggccaacggaagagtgatcgagaagacactgtacaacagaagaacccggcaggatgagcctgccctgttcgtggccctgaccttcgagcggcgggaggtcctggactcctccaatatcaaaccaatgaacctgatcggcgtggcaagaggcgaaaacatccccgccgtgatcgccctgaccgaccccgagggctgcccactgagccggtttaaggatagcctgggaaacccaacccacatcctgagaatcggcgagagctataaggagaagcagcggaccatccaggccaagaaggaggtggagcagcggagagccggcggctacagccggaagtacgccagcaaagccaagaatctggcagacgatatggtgagaaacaccgctagagatctgctgtactacgccgtgacccaggatgccatgctgatcttcgccaacctgagccggggcttcggccggcagggcaagcggaccttcatggccgagagacagtacacacggatggaggactggctgaccgccaagctggcctacgagggcctgagcaagacctacctgtccaagacactggcccagtacacctccaagacatgcagcaactgtgggtttaccatcaccagcgccgactacgacagggtgctggagaagctgaagaagacagcaacaggctggatgaccacaattaacggcaaggagctgaaggtggagggccagattacctactacaacagatacaagagacagaacgtagtcaaggacctgtccgtcgagctggatagactgagcgaagaatctgtgaacaacgacatctcctcctggacaaagggcagaagcggagaagctctgagcctcctgaagaaaagattctcccatagacccgtgcaggagaagttcgtgtgcctgaactgcggcttcgagacacacgcagccgagcaagccgccctgaacatcgccagatcctggctgttcctgcggagccaggagtacaagaaataccagacaaacaagacaaccggcaacaccgataagagagccttcgtcgagacctggcagtccttttaccggaagaagcttaaggaggtgtggaaacctgccgtgcggtctggcggatctggcggaggctccaccagccccaagaaaaagagaaaagtctaagctgccttctgcggggcttgccttctggccatgcccttcttctctcccttgcacctgtacctcttggtctttgaataaagcctgagtaggaaggctagcaaaaaaaaaaaaaaaaaaaaaaaaaaaaaaaaaaaaaaaaaaaaaaaaaaaaaaaaaaaaaaaaaaaaaaaaaaaaaaaa

SEQ ID NO: 12301 - RNA, 5785 nt, synthetic construct
  source 1..5785: mol_type = other RNA
aggaaataagagagaaaagaagagtaagaagaaatataagagccaccatggcccctaagaagaagcgtaaagtgagccggatggaacgcctcgtctacgaggtgcggcagaagtgcagaaacatcgaggacatctgcatctcctgcggatctctgaacgtgaccctggagcacccactgttcatcggcggcatgtgccagaactgtaaaaactgttttctggagtgtgcctatcaatacgacgatgacggctaccagagctactgcaccatctgttgcggcggaagagaggtgctgatgtgtggaaataacaactgctgccggtgcttctgcgtggaatgcgtggacctgctggtgggccccggcgccgcccaggccgctattaaggaagatccttggaactgctacatgtgcggccacaagggcacatacggcctgctgagacggagagaggactggcctagcagactgcagatgttcttcgccaataaccacgaccaggagttcgacccccctaaggtgtaccctcccgtccccgccgagaagagaaagcccatccgggtcctgagcctgttcgatggcatcgccaccggtctgctggtgctgaaggacctgggcatccaggtggataggtacattgcctccgaggtgtgcgaggactccatcaccgtgggaatggtgcgtcatcagggcaagatcatgtacgtgggcgacgtgcggagcgtgacacagaagcatatccaggagtggggccctttcgacctggtgatcggcggcagcccttgcaatgacctgagcatcgtgaacccagcccggaagggcctgtacgagggaaccggcagactgttcttcgagttttacagactgctgcacgacgcccggcctaaggaaggcgacgaccggcccttcttttggctgttcgagaatgtggtggccatgggagtcagcgacaagcgggatattagccggttcctggagagcaaccccgtgatgatcgatgccaaggaagtgagcgccgcccaccgggccagatacttctggggcaatctgcctggcatgaacagacccctggccagcaccgtgaacgacaagctggagctgcaggagtgcctggagcacggccggatcgccaagttcagcaaggtgagaaccatcaccacccgaagcaacagcatcaaacaaggcaaggaccagcactttcctgtgttcatgaacgagaaggaggacatcctgtggtgtaccgagatggagagagtgttcgggttcccagtccactacacagatgtcagcaacatgtctagactggccagacagagactgctgggaagaagctggtccgtccctgtgatcagacacctgttcgcccctctgaaggagtacttcgcctgcgtgagcagcggcaacagcaacgccaacagccggggccccagcttctctagcggcctggtgccactgtccctgagagggagccacatgggccccatggagatctacaaaaccgtgagcgcctggaagcggcagcctgtgcgcgtgctgagcctgtttcggaatatcgataaagtcctgaaaagcctgggattcctggagagcggctctggctccggcggtggcaccctgaagtacgtggaggatgtgacaaacgtggtcagacgggatgtggagaagtggggccccttcgatctggtgtacggcagcacccaacccctgggcagctcttgtgaccggtgccctggctggtacatgtttcagttccaccggatcctgcagtacgccctgccgagacaggagtcccagcggccattcttttggattttcatggacaacttgctgctgaccgaggatgaccaggaaactaccactcggttcctgcagaccgaagccgtgaccctgcaggacgtgagaggccgggactaccagaacgccatgcgggtgtggtccaacatccctggactgaaaagcaagcacgcacctctgacccctaaagaagaggagtacctgcaggcccaggtgcggagcagaagcaagctggacgcccctaaggtggatctgctggtgaagaattgcctcctgcccctgagagagtacttcaagtatttcagccagaatagtctgcccctgggaggcagcggcggcggccaggccgaggtgaccttcgaggacgtggccgtgctgttcagcagggaggagtggggcaggctgggccccgcccagaggggcctgtacagggacgtgatgctggagacctacaggaacctggtgagcctgggcgccggccccgccggccccaagcccggcgtgatcacccagctggagaggggcgacgagccctgggtgctggacacccagggcgccaagggcaaggagaggctgagggtgagcggcggcccaagcagcggcgcccctcctcccagcggcggcagcccagccggctccccaacctctaccgaggagggcacctctgagtccgccacccccgagagcggccctggcacctccaccgagcccagcgagggcagcgcacccggcagccctgccggcagccccacctccacagaggagggaaccagcaccgagcccagcgaaggcagcgccccaggcaccagcaccgagcctagtgagcaggagattaaacggatcaacaagatcagaagaagacttgtgaaagacagcaacaccaagaaggccggcaagacaggccccatgaaaaccctgctggttagagtgatgacacccgatctgagagagcggctggaaaacctgagaaagaagcctgaaaatatcccccagcccatcagcaatacatctagagccaacctgaataagctgctgaccgattacaccgaaatgaagaaggcgatcctgcatgtgtactgggaagagttccagaaggaccctgtgggcctgatgagccgggtggcccagcctgccagcaagaagatcgatcagaacaagctgaaacctgagatggacgagaagggcaacctgaccaccgccggctttgcctgctctcagtgtggccagcccctgttcgtgtacaagctggagcaggtgtctgagaagggcaaggcttacaccaactacttcggacggtgcaatgtggccgagcacgaaaagctgatcctgctggcccagctgaagcccgagaaggatagcgacgaagccgtgacatatagcctgggaaagtttgggcagagggccctggatttctacagcattcatgtgaccaaggagtccacccaccccgtgaagcccctggcccagatcgccggaaacagatacgcctccggacctgtgggaaaggccctgagcgacgcatgtatgggcacaatcgcctccttcctgtctaagtaccaggacatcatcatcgaacaccagaaggtggtgaagggcaaccagaagagactggagagcctgcgggagctggccggcaaggaaaacctggaataccctagcgtgaccctgccacctcagcctcacaccaaggagggcgttgatgcctacaacgaagtgatcgcccgggtgcgaatgtgggtgaacctgaacctgtggcagaagctgaagctaagcagagatgatgccaagcctctgctgagactgaagggattcccttcctttcctctggtcgagagacaggccaacgaagtggactggtgggacatggtgtgtaacgtgaagaagctgatcaacgagaaaaaggaggatggcaaggtgttttggcagaatctggctggctacaagagacaggaagccctgagaccatacctgagcagcgaggaagatcggaagaagggaaagaaattcgctcggtaccagctgggcgacctgctgctgcacctggaaaagaagcacggcgaggactggggaaaggtgtacgacgaggcctgggagcggattgacaagaaagtggaaggcctgagcaagcacatcaagctggaagaggaacggagaagcgaggacgcccagagcaaggccgccctgaccgactggctgcgggctaaggccagcttcgtgatcgagggcctgaaggaggccgacaaggacgagttctgcagatgcgagctgaagctgcagaagtggtacggggacctgcggggaaagcccttcgccatcgaagccgagaacagcatcctggacatcagcggcttcagcaagcagtacaactgtgccttcatctggcagaaggacggcgtgaagaagctgaacctgtacctgatcatcaactacttcaagggcggcaagctgcggttcaagaagatcaaacctgaagccttcgaagccaacagattctacaccgtgatcaacaaaaagagcggcgagatcgtgcccatggaggtgaacttcaacttcgacgaccccaacctgatcatcctgcctctggcctttggcaagagacagggcagagaattcatctggaacgacctgctgtccctggaaaccggcagcctgaagctggccaacggaagagtgatcgagaagacactgtacaacagaagaacccggcaggatgagcctgccctgttcgtggccctgaccttcgagcggcgggaggtcctggactcctccaatatcaaaccaatgaacctgatcggcgtggcaagaggcgaaaacatccccgccgtgatcgccctgaccgaccccgagggctgcccactgagccggtttaaggatagcctgggaaacccaacccacatcctgagaatcggcgagagctataaggagaagcagcggaccatccaggccaagaaggaggtggagcagcggagagccggcggctacagccggaagtacgccagcaaagccaagaatctggcagacgatatggtgagaaacaccgctagagatctgctgtactacgccgtgacccaggatgccatgctgatcttcgccaacctgagccggggcttcggccggcagggcaagcggaccttcatggccgagagacagtacacacggatggaggactggctgaccgccaagctggcctacgagggcctgagcaagacctacctgtccaagacactggcccagtacacctccaagacatgcagcaactgtgggtttaccatcaccagcgccgactacgacagggtgctggagaagctgaagaagacagcaacaggctggatgaccacaattaacggcaaggagctgaaggtggagggccagattacctactacaacagatacaagagacagaacgtagtcaaggacctgtccgtcgagctggatagactgagcgaagaatctgtgaacaacgacatctcctcctggacaaagggcagaagcggagaagctctgagcctcctgaagaaaagattctcccatagacccgtgcaggagaagttcgtgtgcctgaactgcggcttcgagacacacgcagccgagcaagccgccctgaacatcgccagatcctggctgttcctgcggagccaggagtacaagaaataccagacaaacaagacaaccggcaacaccgataagagagccttcgtcgagacctggcagtccttttaccggaagaagcttaaggaggtgtggaaacctgccgtgcggtctggcggatctggcggaggctccaccagccccaagaaaaagagaaaagtctaagctgccttctgcggggcttgccttctggccatgcccttcttctctcccttgcacctgtacctcttggtctttgaataaagcctgagtaggaaggctagcaaaaaaaaaaaaaaaaaaaaaaaaaaaaaaaaaaaaaaaaaaaaaaaaaaaaaaaaaaaaaaaaaaaaaaaaaaaaaaaa

SEQ ID NO: 12302 - RNA, 5785 nt, synthetic construct
  source 1..5785: mol_type = other RNA
aggaaataagagagaaaagaagagtaagaagaaatataagagccaccatggcccctaagaagaagcgtaaagtgagccggatggaacgcctcgtctacgaggtgcggcagaagtgcagaaacatcgaggacatctgcatctcctgcggatctctgaacgtgaccctggagcacccactgttcatcggcggcatgtgccagaactgtaaaaactgttttctggagtgtgcctatcaatacgacgatgacggctaccagagctactgcaccatctgttgcggcggaagagaggtgctgatgtgtggaaataacaactgctgccggtgcttctgcgtggaatgcgtggacctgctggtgggccccggcgccgcccaggccgctattaaggaagatccttggaactgctacatgtgcggccacaagggcacatacggcctgctgagacggagagaggactggcctagcagactgcagatgttcttcgccaataaccacgaccaggagttcgacccccctaaggtgtaccctcccgtccccgccgagaagagaaagcccatccgggtcctgagcctgttcgatggcatcgccaccggtctgctggtgctgaaggacctgggcatccaggtggataggtacattgcctccgaggtgtgcgaggactccatcaccgtgggaatggtgcgtcatcagggcaagatcatgtacgtgggcgacgtgcggagcgtgacacagaagcatatccaggagtggggccctttcgacctggtgatcggcggcagcccttgcaatgacctgagcatcgtgaacccagcccggaagggcctgtacgagggaaccggcagactgttcttcgagttttacagactgctgcacgacgcccggcctaaggaaggcgacgaccggcccttcttttggctgttcgagaatgtggtggccatgggagtcagcgacaagcgggatattagccggttcctggagagcaaccccgtgatgatcgatgccaaggaagtgagcgccgcccaccgggccagatacttctggggcaatctgcctggcatgaacagacccctggccagcaccgtgaacgacaagctggagctgcaggagtgcctggagcacggccggatcgccaagttcagcaaggtgagaaccatcaccacccgaagcaacagcatcaaacaaggcaaggaccagcactttcctgtgttcatgaacgagaaggaggacatcctgtggtgtaccgagatggagagagtgttcgggttcccagtccactacacagatgtcagcaacatgtctagactggccagacagagactgctgggaagaagctggtccgtccctgtgatcagacacctgttcgcccctctgaaggagtacttcgcctgcgtgagcagcggcaacagcaacgccaacagccggggccccagcttctctagcggcctggtgccactgtccctgagagggagccacatgggccccatggagatctacaaaaccgtgagcgcctggaagcggcagcctgtgcgcgtgctgagcctgtttcggaatatcgataaagtcctgaaaagcctgggattcctggagagcggctctggctccggcggtggcaccctgaagtacgtggaggatgtgacaaacgtggtcagacgggatgtggagaagtggggccccttcgatctggtgtacggcagcacccaacccctgggcagctcttgtgaccggtgccctggctggtacatgtttcagttccaccggatcctgcagtacgccctgccgagacaggagtcccagcggccattcttttggattttcatggacaacttgctgctgaccgaggatgaccaggaaactaccactcggttcctgcagaccgaagccgtgaccctgcaggacgtgagaggccgggactaccagaacgccatgcgggtgtggtccaacatccctggactgaaaagcaagcacgcacctctgacccctaaagaagaggagtacctgcaggcccaggtgcggagcagaagcaagctggacgcccctaaggtggatctgctggtgaagaattgcctcctgcccctgagagagtacttcaagtatttcagccagaatagtctgcccctgggaggcagcggcggcggcaagcccggcgccctgagcttcgccgacgtggccgtgtacttcagcagcgaggagtggggctgcctgaggcccgcccagagggccctgtacagggacgtgatgagggagacctacggccacctgggcgccctgggcttcgccggccccaagcccgccctgatcagctggatggagaggaagaaggaggcctggagccccgaggccgaggaccccgaggacagggccagcaggatcagggccaagggcggcccaagcagcggcgcccctcctcccagcggcggcagcccagccggctccccaacctctaccgaggagggcacctctgagtccgccacccccgagagcggccctggcacctccaccgagcccagcgagggcagcgcacccggcagccctgccggcagccccacctccacagaggagggaaccagcaccgagcccagcgaaggcagcgccccaggcaccagcaccgagcctagtgagcaggagattaaacggatcaacaagatcagaagaagacttgtgaaagacagcaacaccaagaaggccggcaagacaggccccatgaaaaccctgctggttagagtgatgacacccgatctgagagagcggctggaaaacctgagaaagaagcctgaaaatatcccccagcccatcagcaatacatctagagccaacctgaataagctgctgaccgattacaccgaaatgaagaaggcgatcctgcatgtgtactgggaagagttccagaaggaccctgtgggcctgatgagccgggtggcccagcctgccagcaagaagatcgatcagaacaagctgaaacctgagatggacgagaagggcaacctgaccaccgccggctttgcctgctctcagtgtggccagcccctgttcgtgtacaagctggagcaggtgtctgagaagggcaaggcttacaccaactacttcggacggtgcaatgtggccgagcacgaaaagctgatcctgctggcccagctgaagcccgagaaggatagcgacgaagccgtgacatatagcctgggaaagtttgggcagagggccctggatttctacagcattcatgtgaccaaggagtccacccaccccgtgaagcccctggcccagatcgccggaaacagatacgcctccggacctgtgggaaaggccctgagcgacgcatgtatgggcacaatcgcctccttcctgtctaagtaccaggacatcatcatcgaacaccagaaggtggtgaagggcaaccagaagagactggagagcctgcgggagctggccggcaaggaaaacctggaataccctagcgtgaccctgccacctcagcctcacaccaaggagggcgttgatgcctacaacgaagtgatcgcccgggtgcgaatgtgggtgaacctgaacctgtggcagaagctgaagctaagcagagatgatgccaagcctctgctgagactgaagggattcccttcctttcctctggtcgagagacaggccaacgaagtggactggtgggacatggtgtgtaacgtgaagaagctgatcaacgagaaaaaggaggatggcaaggtgttttggcagaatctggctggctacaagagacaggaagccctgagaccatacctgagcagcgaggaagatcggaagaagggaaagaaattcgctcggtaccagctgggcgacctgctgctgcacctggaaaagaagcacggcgaggactggggaaaggtgtacgacgaggcctgggagcggattgacaagaaagtggaaggcctgagcaagcacatcaagctggaagaggaacggagaagcgaggacgcccagagcaaggccgccctgaccgactggctgcgggctaaggccagcttcgtgatcgagggcctgaaggaggccgacaaggacgagttctgcagatgcgagctgaagctgcagaagtggtacggggacctgcggggaaagcccttcgccatcgaagccgagaacagcatcctggacatcagcggcttcagcaagcagtacaactgtgccttcatctggcagaaggacggcgtgaagaagctgaacctgtacctgatcatcaactacttcaagggcggcaagctgcggttcaagaagatcaaacctgaagccttcgaagccaacagattctacaccgtgatcaacaaaaagagcggcgagatcgtgcccatggaggtgaacttcaacttcgacgaccccaacctgatcatcctgcctctggcctttggcaagagacagggcagagaattcatctggaacgacctgctgtccctggaaaccggcagcctgaagctggccaacggaagagtgatcgagaagacactgtacaacagaagaacccggcaggatgagcctgccctgttcgtggccctgaccttcgagcggcgggaggtcctggactcctccaatatcaaaccaatgaacctgatcggcgtggcaagaggcgaaaacatccccgccgtgatcgccctgaccgaccccgagggctgcccactgagccggtttaaggatagcctgggaaacccaacccacatcctgagaatcggcgagagctataaggagaagcagcggaccatccaggccaagaaggaggtggagcagcggagagccggcggctacagccggaagtacgccagcaaagccaagaatctggcagacgatatggtgagaaacaccgctagagatctgctgtactacgccgtgacccaggatgccatgctgatcttcgccaacctgagccggggcttcggccggcagggcaagcggaccttcatggccgagagacagtacacacggatggaggactggctgaccgccaagctggcctacgagggcctgagcaagacctacctgtccaagacactggcccagtacacctccaagacatgcagcaactgtgggtttaccatcaccagcgccgactacgacagggtgctggagaagctgaagaagacagcaacaggctggatgaccacaattaacggcaaggagctgaaggtggagggccagattacctactacaacagatacaagagacagaacgtagtcaaggacctgtccgtcgagctggatagactgagcgaagaatctgtgaacaacgacatctcctcctggacaaagggcagaagcggagaagctctgagcctcctgaagaaaagattctcccatagacccgtgcaggagaagttcgtgtgcctgaactgcggcttcgagacacacgcagccgagcaagccgccctgaacatcgccagatcctggctgttcctgcggagccaggagtacaagaaataccagacaaacaagacaaccggcaacaccgataagagagccttcgtcgagacctggcagtccttttaccggaagaagcttaaggaggtgtggaaacctgccgtgcggtctggcggatctggcggaggctccaccagccccaagaaaaagagaaaagtctaagctgccttctgcggggcttgccttctggccatgcccttcttctctcccttgcacctgtacctcttggtctttgaataaagcctgagtaggaaggctagcaaaaaaaaaaaaaaaaaaaaaaaaaaaaaaaaaaaaaaaaaaaaaaaaaaaaaaaaaaaaaaaaaaaaaaaaaaaaaaaa

SEQ ID NO: 12303 - RNA, 5785 nt, synthetic construct
  source 1..5785: mol_type = other RNA
aggaaataagagagaaaagaagagtaagaagaaatataagagccaccatggcccctaagaagaagcgtaaagtgagccggatggaacgcctcgtctacgaggtgcggcagaagtgcagaaacatcgaggacatctgcatctcctgcggatctctgaacgtgaccctggagcacccactgttcatcggcggcatgtgccagaactgtaaaaactgttttctggagtgtgcctatcaatacgacgatgacggctaccagagctactgcaccatctgttgcggcggaagagaggtgctgatgtgtggaaataacaactgctgccggtgcttctgcgtggaatgcgtggacctgctggtgggccccggcgccgcccaggccgctattaaggaagatccttggaactgctacatgtgcggccacaagggcacatacggcctgctgagacggagagaggactggcctagcagactgcagatgttcttcgccaataaccacgaccaggagttcgacccccctaaggtgtaccctcccgtccccgccgagaagagaaagcccatccgggtcctgagcctgttcgatggcatcgccaccggtctgctggtgctgaaggacctgggcatccaggtggataggtacattgcctccgaggtgtgcgaggactccatcaccgtgggaatggtgcgtcatcagggcaagatcatgtacgtgggcgacgtgcggagcgtgacacagaagcatatccaggagtggggccctttcgacctggtgatcggcggcagcccttgcaatgacctgagcatcgtgaacccagcccggaagggcctgtacgagggaaccggcagactgttcttcgagttttacagactgctgcacgacgcccggcctaaggaaggcgacgaccggcccttcttttggctgttcgagaatgtggtggccatgggagtcagcgacaagcgggatattagccggttcctggagagcaaccccgtgatgatcgatgccaaggaagtgagcgccgcccaccgggccagatacttctggggcaatctgcctggcatgaacagacccctggccagcaccgtgaacgacaagctggagctgcaggagtgcctggagcacggccggatcgccaagttcagcaaggtgagaaccatcaccacccgaagcaacagcatcaaacaaggcaaggaccagcactttcctgtgttcatgaacgagaaggaggacatcctgtggtgtaccgagatggagagagtgttcgggttcccagtccactacacagatgtcagcaacatgtctagactggccagacagagactgctgggaagaagctggtccgtccctgtgatcagacacctgttcgcccctctgaaggagtacttcgcctgcgtgagcagcggcaacagcaacgccaacagccggggccccagcttctctagcggcctggtgccactgtccctgagagggagccacatgggccccatggagatctacaaaaccgtgagcgcctggaagcggcagcctgtgcgcgtgctgagcctgtttcggaatatcgataaagtcctgaaaagcctgggattcctggagagcggctctggctccggcggtggcaccctgaagtacgtggaggatgtgacaaacgtggtcagacgggatgtggagaagtggggccccttcgatctggtgtacggcagcacccaacccctgggcagctcttgtgaccggtgccctggctggtacatgtttcagttccaccggatcctgcagtacgccctgccgagacaggagtcccagcggccattcttttggattttcatggacaacttgctgctgaccgaggatgaccaggaaactaccactcggttcctgcagaccgaagccgtgaccctgcaggacgtgagaggccgggactaccagaacgccatgcgggtgtggtccaacatccctggactgaaaagcaagcacgcacctctgacccctaaagaagaggagtacctgcaggcccaggtgcggagcagaagcaagctggacgcccctaaggtggatctgctggtgaagaattgcctcctgcccctgagagagtacttcaagtatttcagccagaatagtctgcccctgggaggcagcggcggcggcttccaggagagcgtgaccttcgaggacgtggccgtgtacttcacccagagccagtgggccagcctgggccccctgcagagggccctgtacagggaggtgatgctggagaactacgccaacgtggccagcctggccttccccttccccaagcccgtgctgatcagccagctggagagggaggaggcccccctgggccccgacccctgggagaccgaggtgctgagggacatctgccccggcggcggcggcccaagcagcggcgcccctcctcccagcggcggcagcccagccggctccccaacctctaccgaggagggcacctctgagtccgccacccccgagagcggccctggcacctccaccgagcccagcgagggcagcgcacccggcagccctgccggcagccccacctccacagaggagggaaccagcaccgagcccagcgaaggcagcgccccaggcaccagcaccgagcctagtgagcaggagattaaacggatcaacaagatcagaagaagacttgtgaaagacagcaacaccaagaaggccggcaagacaggccccatgaaaaccctgctggttagagtgatgacacccgatctgagagagcggctggaaaacctgagaaagaagcctgaaaatatcccccagcccatcagcaatacatctagagccaacctgaataagctgctgaccgattacaccgaaatgaagaaggcgatcctgcatgtgtactgggaagagttccagaaggaccctgtgggcctgatgagccgggtggcccagcctgccagcaagaagatcgatcagaacaagctgaaacctgagatggacgagaagggcaacctgaccaccgccggctttgcctgctctcagtgtggccagcccctgttcgtgtacaagctggagcaggtgtctgagaagggcaaggcttacaccaactacttcggacggtgcaatgtggccgagcacgaaaagctgatcctgctggcccagctgaagcccgagaaggatagcgacgaagccgtgacatatagcctgggaaagtttgggcagagggccctggatttctacagcattcatgtgaccaaggagtccacccaccccgtgaagcccctggcccagatcgccggaaacagatacgcctccggacctgtgggaaaggccctgagcgacgcatgtatgggcacaatcgcctccttcctgtctaagtaccaggacatcatcatcgaacaccagaaggtggtgaagggcaaccagaagagactggagagcctgcgggagctggccggcaaggaaaacctggaataccctagcgtgaccctgccacctcagcctcacaccaaggagggcgttgatgcctacaacgaagtgatcgcccgggtgcgaatgtgggtgaacctgaacctgtggcagaagctgaagctaagcagagatgatgccaagcctctgctgagactgaagggattcccttcctttcctctggtcgagagacaggccaacgaagtggactggtgggacatggtgtgtaacgtgaagaagctgatcaacgagaaaaaggaggatggcaaggtgttttggcagaatctggctggctacaagagacaggaagccctgagaccatacctgagcagcgaggaagatcggaagaagggaaagaaattcgctcggtaccagctgggcgacctgctgctgcacctggaaaagaagcacggcgaggactggggaaaggtgtacgacgaggcctgggagcggattgacaagaaagtggaaggcctgagcaagcacatcaagctggaagaggaacggagaagcgaggacgcccagagcaaggccgccctgaccgactggctgcgggctaaggccagcttcgtgatcgagggcctgaaggaggccgacaaggacgagttctgcagatgcgagctgaagctgcagaagtggtacggggacctgcggggaaagcccttcgccatcgaagccgagaacagcatcctggacatcagcggcttcagcaagcagtacaactgtgccttcatctggcagaaggacggcgtgaagaagctgaacctgtacctgatcatcaactacttcaagggcggcaagctgcggttcaagaagatcaaacctgaagccttcgaagccaacagattctacaccgtgatcaacaaaaagagcggcgagatcgtgcccatggaggtgaacttcaacttcgacgaccccaacctgatcatcctgcctctggcctttggcaagagacagggcagagaattcatctggaacgacctgctgtccctggaaaccggcagcctgaagctggccaacggaagagtgatcgagaagacactgtacaacagaagaacccggcaggatgagcctgccctgttcgtggccctgaccttcgagcggcgggaggtcctggactcctccaatatcaaaccaatgaacctgatcggcgtggcaagaggcgaaaacatccccgccgtgatcgccctgaccgaccccgagggctgcccactgagccggtttaaggatagcctgggaaacccaacccacatcctgagaatcggcgagagctataaggagaagcagcggaccatccaggccaagaaggaggtggagcagcggagagccggcggctacagccggaagtacgccagcaaagccaagaatctggcagacgatatggtgagaaacaccgctagagatctgctgtactacgccgtgacccaggatgccatgctgatcttcgccaacctgagccggggcttcggccggcagggcaagcggaccttcatggccgagagacagtacacacggatggaggactggctgaccgccaagctggcctacgagggcctgagcaagacctacctgtccaagacactggcccagtacacctccaagacatgcagcaactgtgggtttaccatcaccagcgccgactacgacagggtgctggagaagctgaagaagacagcaacaggctggatgaccacaattaacggcaaggagctgaaggtggagggccagattacctactacaacagatacaagagacagaacgtagtcaaggacctgtccgtcgagctggatagactgagcgaagaatctgtgaacaacgacatctcctcctggacaaagggcagaagcggagaagctctgagcctcctgaagaaaagattctcccatagacccgtgcaggagaagttcgtgtgcctgaactgcggcttcgagacacacgcagccgagcaagccgccctgaacatcgccagatcctggctgttcctgcggagccaggagtacaagaaataccagacaaacaagacaaccggcaacaccgataagagagccttcgtcgagacctggcagtccttttaccggaagaagcttaaggaggtgtggaaacctgccgtgcggtctggcggatctggcggaggctccaccagccccaagaaaaagagaaaagtctaagctgccttctgcggggcttgccttctggccatgcccttcttctctcccttgcacctgtacctcttggtctttgaataaagcctgagtaggaaggctagcaaaaaaaaaaaaaaaaaaaaaaaaaaaaaaaaaaaaaaaaaaaaaaaaaaaaaaaaaaaaaaaaaaaaaaaaaaaaaaaa

SEQ ID NO: 12304 - RNA, 5785 nt, synthetic construct
  source 1..5785: mol_type = other RNA
aggaaataagagagaaaagaagagtaagaagaaatataagagccaccatggcccctaagaagaagcgtaaagtgagccggatggaacgcctcgtctacgaggtgcggcagaagtgcagaaacatcgaggacatctgcatctcctgcggatctctgaacgtgaccctggagcacccactgttcatcggcggcatgtgccagaactgtaaaaactgttttctggagtgtgcctatcaatacgacgatgacggctaccagagctactgcaccatctgttgcggcggaagagaggtgctgatgtgtggaaataacaactgctgccggtgcttctgcgtggaatgcgtggacctgctggtgggccccggcgccgcccaggccgctattaaggaagatccttggaactgctacatgtgcggccacaagggcacatacggcctgctgagacggagagaggactggcctagcagactgcagatgttcttcgccaataaccacgaccaggagttcgacccccctaaggtgtaccctcccgtccccgccgagaagagaaagcccatccgggtcctgagcctgttcgatggcatcgccaccggtctgctggtgctgaaggacctgggcatccaggtggataggtacattgcctccgaggtgtgcgaggactccatcaccgtgggaatggtgcgtcatcagggcaagatcatgtacgtgggcgacgtgcggagcgtgacacagaagcatatccaggagtggggccctttcgacctggtgatcggcggcagcccttgcaatgacctgagcatcgtgaacccagcccggaagggcctgtacgagggaaccggcagactgttcttcgagttttacagactgctgcacgacgcccggcctaaggaaggcgacgaccggcccttcttttggctgttcgagaatgtggtggccatgggagtcagcgacaagcgggatattagccggttcctggagagcaaccccgtgatgatcgatgccaaggaagtgagcgccgcccaccgggccagatacttctggggcaatctgcctggcatgaacagacccctggccagcaccgtgaacgacaagctggagctgcaggagtgcctggagcacggccggatcgccaagttcagcaaggtgagaaccatcaccacccgaagcaacagcatcaaacaaggcaaggaccagcactttcctgtgttcatgaacgagaaggaggacatcctgtggtgtaccgagatggagagagtgttcgggttcccagtccactacacagatgtcagcaacatgtctagactggccagacagagactgctgggaagaagctggtccgtccctgtgatcagacacctgttcgcccctctgaaggagtacttcgcctgcgtgagcagcggcaacagcaacgccaacagccggggccccagcttctctagcggcctggtgccactgtccctgagagggagccacatgggccccatggagatctacaaaaccgtgagcgcctggaagcggcagcctgtgcgcgtgctgagcctgtttcggaatatcgataaagtcctgaaaagcctgggattcctggagagcggctctggctccggcggtggcaccctgaagtacgtggaggatgtgacaaacgtggtcagacgggatgtggagaagtggggccccttcgatctggtgtacggcagcacccaacccctgggcagctcttgtgaccggtgccctggctggtacatgtttcagttccaccggatcctgcagtacgccctgccgagacaggagtcccagcggccattcttttggattttcatggacaacttgctgctgaccgaggatgaccaggaaactaccactcggttcctgcagaccgaagccgtgaccctgcaggacgtgagaggccgggactaccagaacgccatgcgggtgtggtccaacatccctggactgaaaagcaagcacgcacctctgacccctaaagaagaggagtacctgcaggcccaggtgcggagcagaagcaagctggacgcccctaaggtggatctgctggtgaagaattgcctcctgcccctgagagagtacttcaagtatttcagccagaatagtctgcccctgggaggcagcggcggcggcctgaacagcgccgtgacctacgacgacgtgaacgtgaacttcaccagggaggagtgggccctgctggacagcagccagaagagcctgtacaaggacgtgatgctggagacctacaggaacctgaccgccatcggctacaactgggagggccacaacatcgaggagcactgccagagcagcaggaggcacgccaggacccacaagaggacccacaccggcgagaagagctacgagtgcgaccagggcggcccaagcagcggcgcccctcctcccagcggcggcagcccagccggctccccaacctctaccgaggagggcacctctgagtccgccacccccgagagcggccctggcacctccaccgagcccagcgagggcagcgcacccggcagccctgccggcagccccacctccacagaggagggaaccagcaccgagcccagcgaaggcagcgccccaggcaccagcaccgagcctagtgagcaggagattaaacggatcaacaagatcagaagaagacttgtgaaagacagcaacaccaagaaggccggcaagacaggccccatgaaaaccctgctggttagagtgatgacacccgatctgagagagcggctggaaaacctgagaaagaagcctgaaaatatcccccagcccatcagcaatacatctagagccaacctgaataagctgctgaccgattacaccgaaatgaagaaggcgatcctgcatgtgtactgggaagagttccagaaggaccctgtgggcctgatgagccgggtggcccagcctgccagcaagaagatcgatcagaacaagctgaaacctgagatggacgagaagggcaacctgaccaccgccggctttgcctgctctcagtgtggccagcccctgttcgtgtacaagctggagcaggtgtctgagaagggcaaggcttacaccaactacttcggacggtgcaatgtggccgagcacgaaaagctgatcctgctggcccagctgaagcccgagaaggatagcgacgaagccgtgacatatagcctgggaaagtttgggcagagggccctggatttctacagcattcatgtgaccaaggagtccacccaccccgtgaagcccctggcccagatcgccggaaacagatacgcctccggacctgtgggaaaggccctgagcgacgcatgtatgggcacaatcgcctccttcctgtctaagtaccaggacatcatcatcgaacaccagaaggtggtgaagggcaaccagaagagactggagagcctgcgggagctggccggcaaggaaaacctggaataccctagcgtgaccctgccacctcagcctcacaccaaggagggcgttgatgcctacaacgaagtgatcgcccgggtgcgaatgtgggtgaacctgaacctgtggcagaagctgaagctaagcagagatgatgccaagcctctgctgagactgaagggattcccttcctttcctctggtcgagagacaggccaacgaagtggactggtgggacatggtgtgtaacgtgaagaagctgatcaacgagaaaaaggaggatggcaaggtgttttggcagaatctggctggctacaagagacaggaagccctgagaccatacctgagcagcgaggaagatcggaagaagggaaagaaattcgctcggtaccagctgggcgacctgctgctgcacctggaaaagaagcacggcgaggactggggaaaggtgtacgacgaggcctgggagcggattgacaagaaagtggaaggcctgagcaagcacatcaagctggaagaggaacggagaagcgaggacgcccagagcaaggccgccctgaccgactggctgcgggctaaggccagcttcgtgatcgagggcctgaaggaggccgacaaggacgagttctgcagatgcgagctgaagctgcagaagtggtacggggacctgcggggaaagcccttcgccatcgaagccgagaacagcatcctggacatcagcggcttcagcaagcagtacaactgtgccttcatctggcagaaggacggcgtgaagaagctgaacctgtacctgatcatcaactacttcaagggcggcaagctgcggttcaagaagatcaaacctgaagccttcgaagccaacagattctacaccgtgatcaacaaaaagagcggcgagatcgtgcccatggaggtgaacttcaacttcgacgaccccaacctgatcatcctgcctctggcctttggcaagagacagggcagagaattcatctggaacgacctgctgtccctggaaaccggcagcctgaagctggccaacggaagagtgatcgagaagacactgtacaacagaagaacccggcaggatgagcctgccctgttcgtggccctgaccttcgagcggcgggaggtcctggactcctccaatatcaaaccaatgaacctgatcggcgtggcaagaggcgaaaacatccccgccgtgatcgccctgaccgaccccgagggctgcccactgagccggtttaaggatagcctgggaaacccaacccacatcctgagaatcggcgagagctataaggagaagcagcggaccatccaggccaagaaggaggtggagcagcggagagccggcggctacagccggaagtacgccagcaaagccaagaatctggcagacgatatggtgagaaacaccgctagagatctgctgtactacgccgtgacccaggatgccatgctgatcttcgccaacctgagccggggcttcggccggcagggcaagcggaccttcatggccgagagacagtacacacggatggaggactggctgaccgccaagctggcctacgagggcctgagcaagacctacctgtccaagacactggcccagtacacctccaagacatgcagcaactgtgggtttaccatcaccagcgccgactacgacagggtgctggagaagctgaagaagacagcaacaggctggatgaccacaattaacggcaaggagctgaaggtggagggccagattacctactacaacagatacaagagacagaacgtagtcaaggacctgtccgtcgagctggatagactgagcgaagaatctgtgaacaacgacatctcctcctggacaaagggcagaagcggagaagctctgagcctcctgaagaaaagattctcccatagacccgtgcaggagaagttcgtgtgcctgaactgcggcttcgagacacacgcagccgagcaagccgccctgaacatcgccagatcctggctgttcctgcggagccaggagtacaagaaataccagacaaacaagacaaccggcaacaccgataagagagccttcgtcgagacctggcagtccttttaccggaagaagcttaaggaggtgtggaaacctgccgtgcggtctggcggatctggcggaggctccaccagccccaagaaaaagagaaaagtctaagctgccttctgcggggcttgccttctggccatgcccttcttctctcccttgcacctgtacctcttggtctttgaataaagcctgagtaggaaggctagcaaaaaaaaaaaaaaaaaaaaaaaaaaaaaaaaaaaaaaaaaaaaaaaaaaaaaaaaaaaaaaaaaaaaaaaaaaaaaaaa

SEQ ID NO: 12305 - RNA, 5782 nt, synthetic construct
  source 1..5782: mol_type = other RNA
aggaaataagagagaaaagaagagtaagaagaaatataagagccaccatggcccctaagaagaagcgtaaagtgagccggatggaacgcctcgtctacgaggtgcggcagaagtgcagaaacatcgaggacatctgcatctcctgcggatctctgaacgtgaccctggagcacccactgttcatcggcggcatgtgccagaactgtaaaaactgttttctggagtgtgcctatcaatacgacgatgacggctaccagagctactgcaccatctgttgcggcggaagagaggtgctgatgtgtggaaataacaactgctgccggtgcttctgcgtggaatgcgtggacctgctggtgggccccggcgccgcccaggccgctattaaggaagatccttggaactgctacatgtgcggccacaagggcacatacggcctgctgagacggagagaggactggcctagcagactgcagatgttcttcgccaataaccacgaccaggagttcgacccccctaaggtgtaccctcccgtccccgccgagaagagaaagcccatccgggtcctgagcctgttcgatggcatcgccaccggtctgctggtgctgaaggacctgggcatccaggtggataggtacattgcctccgaggtgtgcgaggactccatcaccgtgggaatggtgcgtcatcagggcaagatcatgtacgtgggcgacgtgcggagcgtgacacagaagcatatccaggagtggggccctttcgacctggtgatcggcggcagcccttgcaatgacctgagcatcgtgaacccagcccggaagggcctgtacgagggaaccggcagactgttcttcgagttttacagactgctgcacgacgcccggcctaaggaaggcgacgaccggcccttcttttggctgttcgagaatgtggtggccatgggagtcagcgacaagcgggatattagccggttcctggagagcaaccccgtgatgatcgatgccaaggaagtgagcgccgcccaccgggccagatacttctggggcaatctgcctggcatgaacagacccctggccagcaccgtgaacgacaagctggagctgcaggagtgcctggagcacggccggatcgccaagttcagcaaggtgagaaccatcaccacccgaagcaacagcatcaaacaaggcaaggaccagcactttcctgtgttcatgaacgagaaggaggacatcctgtggtgtaccgagatggagagagtgttcgggttcccagtccactacacagatgtcagcaacatgtctagactggccagacagagactgctgggaagaagctggtccgtccctgtgatcagacacctgttcgcccctctgaaggagtacttcgcctgcgtgagcagcggcaacagcaacgccaacagccggggccccagcttctctagcggcctggtgccactgtccctgagagggagccacatgggccccatggagatctacaaaaccgtgagcgcctggaagcggcagcctgtgcgcgtgctgagcctgtttcggaatatcgataaagtcctgaaaagcctgggattcctggagagcggctctggctccggcggtggcaccctgaagtacgtggaggatgtgacaaacgtggtcagacgggatgtggagaagtggggccccttcgatctggtgtacggcagcacccaacccctgggcagctcttgtgaccggtgccctggctggtacatgtttcagttccaccggatcctgcagtacgccctgccgagacaggagtcccagcggccattcttttggattttcatggacaacttgctgctgaccgaggatgaccaggaaactaccactcggttcctgcagaccgaagccgtgaccctgcaggacgtgagaggccgggactaccagaacgccatgcgggtgtggtccaacatccctggactgaaaagcaagcacgcacctctgacccctaaagaagaggagtacctgcaggcccaggtgcggagcagaagcaagctggacgcccctaaggtggatctgctggtgaagaattgcctcctgcccctgagagagtacttcaagtatttcagccagaatagtctgcccctgggaggcagcggcggcggcgccttcgaggacgtggccgtgtacttcagccaggaggagtggggcctgctggacaccgcccagagagccctgtacagaagagtgatgctggacaacttcgccctggtggccagcctgggcctgagcaccagcagacccagagtggtgatccagctggagagaggcgaggagccctgggtgcccagcggcaccgacaccaccctgagcagaaccacctacagaagaagaaaccccggcagcggcggcccaagcagcggcgcccctcctcccagcggcggcagcccagccggctccccaacctctaccgaggagggcacctctgagtccgccacccccgagagcggccctggcacctccaccgagcccagcgagggcagcgcacccggcagccctgccggcagccccacctccacagaggagggaaccagcaccgagcccagcgaaggcagcgccccaggcaccagcaccgagcctagtgagcaggagattaaacggatcaacaagatcagaagaagacttgtgaaagacagcaacaccaagaaggccggcaagacaggccccatgaaaaccctgctggttagagtgatgacacccgatctgagagagcggctggaaaacctgagaaagaagcctgaaaatatcccccagcccatcagcaatacatctagagccaacctgaataagctgctgaccgattacaccgaaatgaagaaggcgatcctgcatgtgtactgggaagagttccagaaggaccctgtgggcctgatgagccgggtggcccagcctgccagcaagaagatcgatcagaacaagctgaaacctgagatggacgagaagggcaacctgaccaccgccggctttgcctgctctcagtgtggccagcccctgttcgtgtacaagctggagcaggtgtctgagaagggcaaggcttacaccaactacttcggacggtgcaatgtggccgagcacgaaaagctgatcctgctggcccagctgaagcccgagaaggatagcgacgaagccgtgacatatagcctgggaaagtttgggcagagggccctggatttctacagcattcatgtgaccaaggagtccacccaccccgtgaagcccctggcccagatcgccggaaacagatacgcctccggacctgtgggaaaggccctgagcgacgcatgtatgggcacaatcgcctccttcctgtctaagtaccaggacatcatcatcgaacaccagaaggtggtgaagggcaaccagaagagactggagagcctgcgggagctggccggcaaggaaaacctggaataccctagcgtgaccctgccacctcagcctcacaccaaggagggcgttgatgcctacaacgaagtgatcgcccgggtgcgaatgtgggtgaacctgaacctgtggcagaagctgaagctaagcagagatgatgccaagcctctgctgagactgaagggattcccttcctttcctctggtcgagagacaggccaacgaagtggactggtgggacatggtgtgtaacgtgaagaagctgatcaacgagaaaaaggaggatggcaaggtgttttggcagaatctggctggctacaagagacaggaagccctgagaccatacctgagcagcgaggaagatcggaagaagggaaagaaattcgctcggtaccagctgggcgacctgctgctgcacctggaaaagaagcacggcgaggactggggaaaggtgtacgacgaggcctgggagcggattgacaagaaagtggaaggcctgagcaagcacatcaagctggaagaggaacggagaagcgaggacgcccagagcaaggccgccctgaccgactggctgcgggctaaggccagcttcgtgatcgagggcctgaaggaggccgacaaggacgagttctgcagatgcgagctgaagctgcagaagtggtacggggacctgcggggaaagcccttcgccatcgaagccgagaacagcatcctggacatcagcggcttcagcaagcagtacaactgtgccttcatctggcagaaggacggcgtgaagaagctgaacctgtacctgatcatcaactacttcaagggcggcaagctgcggttcaagaagatcaaacctgaagccttcgaagccaacagattctacaccgtgatcaacaaaaagagcggcgagatcgtgcccatggaggtgaacttcaacttcgacgaccccaacctgatcatcctgcctctggcctttggcaagagacagggcagagaattcatctggaacgacctgctgtccctggaaaccggcagcctgaagctggccaacggaagagtgatcgagaagacactgtacaacagaagaacccggcaggatgagcctgccctgttcgtggccctgaccttcgagcggcgggaggtcctggactcctccaatatcaaaccaatgaacctgatcggcgtggcaagaggcgaaaacatccccgccgtgatcgccctgaccgaccccgagggctgcccactgagccggtttaaggatagcctgggaaacccaacccacatcctgagaatcggcgagagctataaggagaagcagcggaccatccaggccaagaaggaggtggagcagcggagagccggcggctacagccggaagtacgccagcaaagccaagaatctggcagacgatatggtgagaaacaccgctagagatctgctgtactacgccgtgacccaggatgccatgctgatcttcgccaacctgagccggggcttcggccggcagggcaagcggaccttcatggccgagagacagtacacacggatggaggactggctgaccgccaagctggcctacgagggcctgagcaagacctacctgtccaagacactggcccagtacacctccaagacatgcagcaactgtgggtttaccatcaccagcgccgactacgacagggtgctggagaagctgaagaagacagcaacaggctggatgaccacaattaacggcaaggagctgaaggtggagggccagattacctactacaacagatacaagagacagaacgtagtcaaggacctgtccgtcgagctggatagactgagcgaagaatctgtgaacaacgacatctcctcctggacaaagggcagaagcggagaagctctgagcctcctgaagaaaagattctcccatagacccgtgcaggagaagttcgtgtgcctgaactgcggcttcgagacacacgcagccgagcaagccgccctgaacatcgccagatcctggctgttcctgcggagccaggagtacaagaaataccagacaaacaagacaaccggcaacaccgataagagagccttcgtcgagacctggcagtccttttaccggaagaagcttaaggaggtgtggaaacctgccgtgcggtctggcggatctggcggaggctccaccagccccaagaaaaagagaaaagtctaagctgccttctgcggggcttgccttctggccatgcccttcttctctcccttgcacctgtacctcttggtctttgaataaagcctgagtaggaaggctagcaaaaaaaaaaaaaaaaaaaaaaaaaaaaaaaaaaaaaaaaaaaaaaaaaaaaaaaaaaaaaaaaaaaaaaaaaaaaaaaa

SEQ ID NO: 12306 - RNA, 5785 nt, synthetic construct
  source 1..5785: mol_type = other RNA
aggaaataagagagaaaagaagagtaagaagaaatataagagccaccatggcccctaagaagaagcgtaaagtgagccggatggaacgcctcgtctacgaggtgcggcagaagtgcagaaacatcgaggacatctgcatctcctgcggatctctgaacgtgaccctggagcacccactgttcatcggcggcatgtgccagaactgtaaaaactgttttctggagtgtgcctatcaatacgacgatgacggctaccagagctactgcaccatctgttgcggcggaagagaggtgctgatgtgtggaaataacaactgctgccggtgcttctgcgtggaatgcgtggacctgctggtgggccccggcgccgcccaggccgctattaaggaagatccttggaactgctacatgtgcggccacaagggcacatacggcctgctgagacggagagaggactggcctagcagactgcagatgttcttcgccaataaccacgaccaggagttcgacccccctaaggtgtaccctcccgtccccgccgagaagagaaagcccatccgggtcctgagcctgttcgatggcatcgccaccggtctgctggtgctgaaggacctgggcatccaggtggataggtacattgcctccgaggtgtgcgaggactccatcaccgtgggaatggtgcgtcatcagggcaagatcatgtacgtgggcgacgtgcggagcgtgacacagaagcatatccaggagtggggccctttcgacctggtgatcggcggcagcccttgcaatgacctgagcatcgtgaacccagcccggaagggcctgtacgagggaaccggcagactgttcttcgagttttacagactgctgcacgacgcccggcctaaggaaggcgacgaccggcccttcttttggctgttcgagaatgtggtggccatgggagtcagcgacaagcgggatattagccggttcctggagagcaaccccgtgatgatcgatgccaaggaagtgagcgccgcccaccgggccagatacttctggggcaatctgcctggcatgaacagacccctggccagcaccgtgaacgacaagctggagctgcaggagtgcctggagcacggccggatcgccaagttcagcaaggtgagaaccatcaccacccgaagcaacagcatcaaacaaggcaaggaccagcactttcctgtgttcatgaacgagaaggaggacatcctgtggtgtaccgagatggagagagtgttcgggttcccagtccactacacagatgtcagcaacatgtctagactggccagacagagactgctgggaagaagctggtccgtccctgtgatcagacacctgttcgcccctctgaaggagtacttcgcctgcgtgagcagcggcaacagcaacgccaacagccggggccccagcttctctagcggcctggtgccactgtccctgagagggagccacatgggccccatggagatctacaaaaccgtgagcgcctggaagcggcagcctgtgcgcgtgctgagcctgtttcggaatatcgataaagtcctgaaaagcctgggattcctggagagcggctctggctccggcggtggcaccctgaagtacgtggaggatgtgacaaacgtggtcagacgggatgtggagaagtggggccccttcgatctggtgtacggcagcacccaacccctgggcagctcttgtgaccggtgccctggctggtacatgtttcagttccaccggatcctgcagtacgccctgccgagacaggagtcccagcggccattcttttggattttcatggacaacttgctgctgaccgaggatgaccaggaaactaccactcggttcctgcagaccgaagccgtgaccctgcaggacgtgagaggccgggactaccagaacgccatgcgggtgtggtccaacatccctggactgaaaagcaagcacgcacctctgacccctaaagaagaggagtacctgcaggcccaggtgcggagcagaagcaagctggacgcccctaaggtggatctgctggtgaagaattgcctcctgcccctgagagagtacttcaagtatttcagccagaatagtctgcccctgggaggcagcggcggcggcttccaggagagcgtgaccttcagggacgtggccatcgccttcagccagcaggagtggcagagcctggacagcagccagagggacctgtacagggacgtgatgctggagaactacaggaacctggtgagcctgggccacagcctgagcaagccccacgtgatcaccctgctggagcagtggaaggacccctgggagaccggcaggaaggacaagaggaggaggtgcgccgacctgcagctggagggcggcccaagcagcggcgcccctcctcccagcggcggcagcccagccggctccccaacctctaccgaggagggcacctctgagtccgccacccccgagagcggccctggcacctccaccgagcccagcgagggcagcgcacccggcagccctgccggcagccccacctccacagaggagggaaccagcaccgagcccagcgaaggcagcgccccaggcaccagcaccgagcctagtgagcaggagattaaacggatcaacaagatcagaagaagacttgtgaaagacagcaacaccaagaaggccggcaagacaggccccatgaaaaccctgctggttagagtgatgacacccgatctgagagagcggctggaaaacctgagaaagaagcctgaaaatatcccccagcccatcagcaatacatctagagccaacctgaataagctgctgaccgattacaccgaaatgaagaaggcgatcctgcatgtgtactgggaagagttccagaaggaccctgtgggcctgatgagccgggtggcccagcctgccagcaagaagatcgatcagaacaagctgaaacctgagatggacgagaagggcaacctgaccaccgccggctttgcctgctctcagtgtggccagcccctgttcgtgtacaagctggagcaggtgtctgagaagggcaaggcttacaccaactacttcggacggtgcaatgtggccgagcacgaaaagctgatcctgctggcccagctgaagcccgagaaggatagcgacgaagccgtgacatatagcctgggaaagtttgggcagagggccctggatttctacagcattcatgtgaccaaggagtccacccaccccgtgaagcccctggcccagatcgccggaaacagatacgcctccggacctgtgggaaaggccctgagcgacgcatgtatgggcacaatcgcctccttcctgtctaagtaccaggacatcatcatcgaacaccagaaggtggtgaagggcaaccagaagagactggagagcctgcgggagctggccggcaaggaaaacctggaataccctagcgtgaccctgccacctcagcctcacaccaaggagggcgttgatgcctacaacgaagtgatcgcccgggtgcgaatgtgggtgaacctgaacctgtggcagaagctgaagctaagcagagatgatgccaagcctctgctgagactgaagggattcccttcctttcctctggtcgagagacaggccaacgaagtggactggtgggacatggtgtgtaacgtgaagaagctgatcaacgagaaaaaggaggatggcaaggtgttttggcagaatctggctggctacaagagacaggaagccctgagaccatacctgagcagcgaggaagatcggaagaagggaaagaaattcgctcggtaccagctgggcgacctgctgctgcacctggaaaagaagcacggcgaggactggggaaaggtgtacgacgaggcctgggagcggattgacaagaaagtggaaggcctgagcaagcacatcaagctggaagaggaacggagaagcgaggacgcccagagcaaggccgccctgaccgactggctgcgggctaaggccagcttcgtgatcgagggcctgaaggaggccgacaaggacgagttctgcagatgcgagctgaagctgcagaagtggtacggggacctgcggggaaagcccttcgccatcgaagccgagaacagcatcctggacatcagcggcttcagcaagcagtacaactgtgccttcatctggcagaaggacggcgtgaagaagctgaacctgtacctgatcatcaactacttcaagggcggcaagctgcggttcaagaagatcaaacctgaagccttcgaagccaacagattctacaccgtgatcaacaaaaagagcggcgagatcgtgcccatggaggtgaacttcaacttcgacgaccccaacctgatcatcctgcctctggcctttggcaagagacagggcagagaattcatctggaacgacctgctgtccctggaaaccggcagcctgaagctggccaacggaagagtgatcgagaagacactgtacaacagaagaacccggcaggatgagcctgccctgttcgtggccctgaccttcgagcggcgggaggtcctggactcctccaatatcaaaccaatgaacctgatcggcgtggcaagaggcgaaaacatccccgccgtgatcgccctgaccgaccccgagggctgcccactgagccggtttaaggatagcctgggaaacccaacccacatcctgagaatcggcgagagctataaggagaagcagcggaccatccaggccaagaaggaggtggagcagcggagagccggcggctacagccggaagtacgccagcaaagccaagaatctggcagacgatatggtgagaaacaccgctagagatctgctgtactacgccgtgacccaggatgccatgctgatcttcgccaacctgagccggggcttcggccggcagggcaagcggaccttcatggccgagagacagtacacacggatggaggactggctgaccgccaagctggcctacgagggcctgagcaagacctacctgtccaagacactggcccagtacacctccaagacatgcagcaactgtgggtttaccatcaccagcgccgactacgacagggtgctggagaagctgaagaagacagcaacaggctggatgaccacaattaacggcaaggagctgaaggtggagggccagattacctactacaacagatacaagagacagaacgtagtcaaggacctgtccgtcgagctggatagactgagcgaagaatctgtgaacaacgacatctcctcctggacaaagggcagaagcggagaagctctgagcctcctgaagaaaagattctcccatagacccgtgcaggagaagttcgtgtgcctgaactgcggcttcgagacacacgcagccgagcaagccgccctgaacatcgccagatcctggctgttcctgcggagccaggagtacaagaaataccagacaaacaagacaaccggcaacaccgataagagagccttcgtcgagacctggcagtccttttaccggaagaagcttaaggaggtgtggaaacctgccgtgcggtctggcggatctggcggaggctccaccagccccaagaaaaagagaaaagtctaagctgccttctgcggggcttgccttctggccatgcccttcttctctcccttgcacctgtacctcttggtctttgaataaagcctgagtaggaaggctagcaaaaaaaaaaaaaaaaaaaaaaaaaaaaaaaaaaaaaaaaaaaaaaaaaaaaaaaaaaaaaaaaaaaaaaaaaaaaaaaa

SEQ ID NO: 12307 - RNA, 5785 nt, synthetic construct
  source 1..5785: mol_type = other RNA
aggaaataagagagaaaagaagagtaagaagaaatataagagccaccatggcccctaagaagaagcgtaaagtgagccggatggaacgcctcgtctacgaggtgcggcagaagtgcagaaacatcgaggacatctgcatctcctgcggatctctgaacgtgaccctggagcacccactgttcatcggcggcatgtgccagaactgtaaaaactgttttctggagtgtgcctatcaatacgacgatgacggctaccagagctactgcaccatctgttgcggcggaagagaggtgctgatgtgtggaaataacaactgctgccggtgcttctgcgtggaatgcgtggacctgctggtgggccccggcgccgcccaggccgctattaaggaagatccttggaactgctacatgtgcggccacaagggcacatacggcctgctgagacggagagaggactggcctagcagactgcagatgttcttcgccaataaccacgaccaggagttcgacccccctaaggtgtaccctcccgtccccgccgagaagagaaagcccatccgggtcctgagcctgttcgatggcatcgccaccggtctgctggtgctgaaggacctgggcatccaggtggataggtacattgcctccgaggtgtgcgaggactccatcaccgtgggaatggtgcgtcatcagggcaagatcatgtacgtgggcgacgtgcggagcgtgacacagaagcatatccaggagtggggccctttcgacctggtgatcggcggcagcccttgcaatgacctgagcatcgtgaacccagcccggaagggcctgtacgagggaaccggcagactgttcttcgagttttacagactgctgcacgacgcccggcctaaggaaggcgacgaccggcccttcttttggctgttcgagaatgtggtggccatgggagtcagcgacaagcgggatattagccggttcctggagagcaaccccgtgatgatcgatgccaaggaagtgagcgccgcccaccgggccagatacttctggggcaatctgcctggcatgaacagacccctggccagcaccgtgaacgacaagctggagctgcaggagtgcctggagcacggccggatcgccaagttcagcaaggtgagaaccatcaccacccgaagcaacagcatcaaacaaggcaaggaccagcactttcctgtgttcatgaacgagaaggaggacatcctgtggtgtaccgagatggagagagtgttcgggttcccagtccactacacagatgtcagcaacatgtctagactggccagacagagactgctgggaagaagctggtccgtccctgtgatcagacacctgttcgcccctctgaaggagtacttcgcctgcgtgagcagcggcaacagcaacgccaacagccggggccccagcttctctagcggcctggtgccactgtccctgagagggagccacatgggccccatggagatctacaaaaccgtgagcgcctggaagcggcagcctgtgcgcgtgctgagcctgtttcggaatatcgataaagtcctgaaaagcctgggattcctggagagcggctctggctccggcggtggcaccctgaagtacgtggaggatgtgacaaacgtggtcagacgggatgtggagaagtggggccccttcgatctggtgtacggcagcacccaacccctgggcagctcttgtgaccggtgccctggctggtacatgtttcagttccaccggatcctgcagtacgccctgccgagacaggagtcccagcggccattcttttggattttcatggacaacttgctgctgaccgaggatgaccaggaaactaccactcggttcctgcagaccgaagccgtgaccctgcaggacgtgagaggccgggactaccagaacgccatgcgggtgtggtccaacatccctggactgaaaagcaagcacgcacctctgacccctaaagaagaggagtacctgcaggcccaggtgcggagcagaagcaagctggacgcccctaaggtggatctgctggtgaagaattgcctcctgcccctgagagagtacttcaagtatttcagccagaatagtctgcccctgggaggcagcggcggcggcttccaggagagcgtgaccttcgaggacgtggccgtgtacttcacccagaaccagtgggccagcctggaccccgtgcagagggccctgtacagggacgtgatgctggagaactacgccaacgtggccgccctggtggccttccccgcccccaagcccgacctgatcagccagctggagaggggcagcgccccctggaggcccgacccctgggaggccgaggtgctgaggggcatctgccccggcggcggcccaagcagcggcgcccctcctcccagcggcggcagcccagccggctccccaacctctaccgaggagggcacctctgagtccgccacccccgagagcggccctggcacctccaccgagcccagcgagggcagcgcacccggcagccctgccggcagccccacctccacagaggagggaaccagcaccgagcccagcgaaggcagcgccccaggcaccagcaccgagcctagtgagcaggagattaaacggatcaacaagatcagaagaagacttgtgaaagacagcaacaccaagaaggccggcaagacaggccccatgaaaaccctgctggttagagtgatgacacccgatctgagagagcggctggaaaacctgagaaagaagcctgaaaatatcccccagcccatcagcaatacatctagagccaacctgaataagctgctgaccgattacaccgaaatgaagaaggcgatcctgcatgtgtactgggaagagttccagaaggaccctgtgggcctgatgagccgggtggcccagcctgccagcaagaagatcgatcagaacaagctgaaacctgagatggacgagaagggcaacctgaccaccgccggctttgcctgctctcagtgtggccagcccctgttcgtgtacaagctggagcaggtgtctgagaagggcaaggcttacaccaactacttcggacggtgcaatgtggccgagcacgaaaagctgatcctgctggcccagctgaagcccgagaaggatagcgacgaagccgtgacatatagcctgggaaagtttgggcagagggccctggatttctacagcattcatgtgaccaaggagtccacccaccccgtgaagcccctggcccagatcgccggaaacagatacgcctccggacctgtgggaaaggccctgagcgacgcatgtatgggcacaatcgcctccttcctgtctaagtaccaggacatcatcatcgaacaccagaaggtggtgaagggcaaccagaagagactggagagcctgcgggagctggccggcaaggaaaacctggaataccctagcgtgaccctgccacctcagcctcacaccaaggagggcgttgatgcctacaacgaagtgatcgcccgggtgcgaatgtgggtgaacctgaacctgtggcagaagctgaagctaagcagagatgatgccaagcctctgctgagactgaagggattcccttcctttcctctggtcgagagacaggccaacgaagtggactggtgggacatggtgtgtaacgtgaagaagctgatcaacgagaaaaaggaggatggcaaggtgttttggcagaatctggctggctacaagagacaggaagccctgagaccatacctgagcagcgaggaagatcggaagaagggaaagaaattcgctcggtaccagctgggcgacctgctgctgcacctggaaaagaagcacggcgaggactggggaaaggtgtacgacgaggcctgggagcggattgacaagaaagtggaaggcctgagcaagcacatcaagctggaagaggaacggagaagcgaggacgcccagagcaaggccgccctgaccgactggctgcgggctaaggccagcttcgtgatcgagggcctgaaggaggccgacaaggacgagttctgcagatgcgagctgaagctgcagaagtggtacggggacctgcggggaaagcccttcgccatcgaagccgagaacagcatcctggacatcagcggcttcagcaagcagtacaactgtgccttcatctggcagaaggacggcgtgaagaagctgaacctgtacctgatcatcaactacttcaagggcggcaagctgcggttcaagaagatcaaacctgaagccttcgaagccaacagattctacaccgtgatcaacaaaaagagcggcgagatcgtgcccatggaggtgaacttcaacttcgacgaccccaacctgatcatcctgcctctggcctttggcaagagacagggcagagaattcatctggaacgacctgctgtccctggaaaccggcagcctgaagctggccaacggaagagtgatcgagaagacactgtacaacagaagaacccggcaggatgagcctgccctgttcgtggccctgaccttcgagcggcgggaggtcctggactcctccaatatcaaaccaatgaacctgatcggcgtggcaagaggcgaaaacatccccgccgtgatcgccctgaccgaccccgagggctgcccactgagccggtttaaggatagcctgggaaacccaacccacatcctgagaatcggcgagagctataaggagaagcagcggaccatccaggccaagaaggaggtggagcagcggagagccggcggctacagccggaagtacgccagcaaagccaagaatctggcagacgatatggtgagaaacaccgctagagatctgctgtactacgccgtgacccaggatgccatgctgatcttcgccaacctgagccggggcttcggccggcagggcaagcggaccttcatggccgagagacagtacacacggatggaggactggctgaccgccaagctggcctacgagggcctgagcaagacctacctgtccaagacactggcccagtacacctccaagacatgcagcaactgtgggtttaccatcaccagcgccgactacgacagggtgctggagaagctgaagaagacagcaacaggctggatgaccacaattaacggcaaggagctgaaggtggagggccagattacctactacaacagatacaagagacagaacgtagtcaaggacctgtccgtcgagctggatagactgagcgaagaatctgtgaacaacgacatctcctcctggacaaagggcagaagcggagaagctctgagcctcctgaagaaaagattctcccatagacccgtgcaggagaagttcgtgtgcctgaactgcggcttcgagacacacgcagccgagcaagccgccctgaacatcgccagatcctggctgttcctgcggagccaggagtacaagaaataccagacaaacaagacaaccggcaacaccgataagagagccttcgtcgagacctggcagtccttttaccggaagaagcttaaggaggtgtggaaacctgccgtgcggtctggcggatctggcggaggctccaccagccccaagaaaaagagaaaagtctaagctgccttctgcggggcttgccttctggccatgcccttcttctctcccttgcacctgtacctcttggtctttgaataaagcctgagtaggaaggctagcaaaaaaaaaaaaaaaaaaaaaaaaaaaaaaaaaaaaaaaaaaaaaaaaaaaaaaaaaaaaaaaaaaaaaaaaaaaaaaaa

SEQ ID NO: 12308 - RNA, 5785 nt, synthetic construct
  source 1..5785: mol_type = other RNA
aggaaataagagagaaaagaagagtaagaagaaatataagagccaccatggcccctaagaagaagcgtaaagtgagccggatggaacgcctcgtctacgaggtgcggcagaagtgcagaaacatcgaggacatctgcatctcctgcggatctctgaacgtgaccctggagcacccactgttcatcggcggcatgtgccagaactgtaaaaactgttttctggagtgtgcctatcaatacgacgatgacggctaccagagctactgcaccatctgttgcggcggaagagaggtgctgatgtgtggaaataacaactgctgccggtgcttctgcgtggaatgcgtggacctgctggtgggccccggcgccgcccaggccgctattaaggaagatccttggaactgctacatgtgcggccacaagggcacatacggcctgctgagacggagagaggactggcctagcagactgcagatgttcttcgccaataaccacgaccaggagttcgacccccctaaggtgtaccctcccgtccccgccgagaagagaaagcccatccgggtcctgagcctgttcgatggcatcgccaccggtctgctggtgctgaaggacctgggcatccaggtggataggtacattgcctccgaggtgtgcgaggactccatcaccgtgggaatggtgcgtcatcagggcaagatcatgtacgtgggcgacgtgcggagcgtgacacagaagcatatccaggagtggggccctttcgacctggtgatcggcggcagcccttgcaatgacctgagcatcgtgaacccagcccggaagggcctgtacgagggaaccggcagactgttcttcgagttttacagactgctgcacgacgcccggcctaaggaaggcgacgaccggcccttcttttggctgttcgagaatgtggtggccatgggagtcagcgacaagcgggatattagccggttcctggagagcaaccccgtgatgatcgatgccaaggaagtgagcgccgcccaccgggccagatacttctggggcaatctgcctggcatgaacagacccctggccagcaccgtgaacgacaagctggagctgcaggagtgcctggagcacggccggatcgccaagttcagcaaggtgagaaccatcaccacccgaagcaacagcatcaaacaaggcaaggaccagcactttcctgtgttcatgaacgagaaggaggacatcctgtggtgtaccgagatggagagagtgttcgggttcccagtccactacacagatgtcagcaacatgtctagactggccagacagagactgctgggaagaagctggtccgtccctgtgatcagacacctgttcgcccctctgaaggagtacttcgcctgcgtgagcagcggcaacagcaacgccaacagccggggccccagcttctctagcggcctggtgccactgtccctgagagggagccacatgggccccatggagatctacaaaaccgtgagcgcctggaagcggcagcctgtgcgcgtgctgagcctgtttcggaatatcgataaagtcctgaaaagcctgggattcctggagagcggctctggctccggcggtggcaccctgaagtacgtggaggatgtgacaaacgtggtcagacgggatgtggagaagtggggccccttcgatctggtgtacggcagcacccaacccctgggcagctcttgtgaccggtgccctggctggtacatgtttcagttccaccggatcctgcagtacgccctgccgagacaggagtcccagcggccattcttttggattttcatggacaacttgctgctgaccgaggatgaccaggaaactaccactcggttcctgcagaccgaagccgtgaccctgcaggacgtgagaggccgggactaccagaacgccatgcgggtgtggtccaacatccctggactgaaaagcaagcacgcacctctgacccctaaagaagaggagtacctgcaggcccaggtgcggagcagaagcaagctggacgcccctaaggtggatctgctggtgaagaattgcctcctgcccctgagagagtacttcaagtatttcagccagaatagtctgcccctgggaggcagcggcggcggcctgctgaccttcgaggacgtggccgtgcacttcagcgaggaggagtggcagctgctggaccccaaccagaagaccctgtacaacgaggtgatgtgggacatctgcgaggccgccagcttcgtgggcctgaagttcaagaacgacaccggcaacgccgagcccagcagcgtgagcgccctggagatccaggccgccgagaggcagggcagcaagaccaggaagaacgtggccaggaagaggaagggcggcccaagcagcggcgcccctcctcccagcggcggcagcccagccggctccccaacctctaccgaggagggcacctctgagtccgccacccccgagagcggccctggcacctccaccgagcccagcgagggcagcgcacccggcagccctgccggcagccccacctccacagaggagggaaccagcaccgagcccagcgaaggcagcgccccaggcaccagcaccgagcctagtgagcaggagattaaacggatcaacaagatcagaagaagacttgtgaaagacagcaacaccaagaaggccggcaagacaggccccatgaaaaccctgctggttagagtgatgacacccgatctgagagagcggctggaaaacctgagaaagaagcctgaaaatatcccccagcccatcagcaatacatctagagccaacctgaataagctgctgaccgattacaccgaaatgaagaaggcgatcctgcatgtgtactgggaagagttccagaaggaccctgtgggcctgatgagccgggtggcccagcctgccagcaagaagatcgatcagaacaagctgaaacctgagatggacgagaagggcaacctgaccaccgccggctttgcctgctctcagtgtggccagcccctgttcgtgtacaagctggagcaggtgtctgagaagggcaaggcttacaccaactacttcggacggtgcaatgtggccgagcacgaaaagctgatcctgctggcccagctgaagcccgagaaggatagcgacgaagccgtgacatatagcctgggaaagtttgggcagagggccctggatttctacagcattcatgtgaccaaggagtccacccaccccgtgaagcccctggcccagatcgccggaaacagatacgcctccggacctgtgggaaaggccctgagcgacgcatgtatgggcacaatcgcctccttcctgtctaagtaccaggacatcatcatcgaacaccagaaggtggtgaagggcaaccagaagagactggagagcctgcgggagctggccggcaaggaaaacctggaataccctagcgtgaccctgccacctcagcctcacaccaaggagggcgttgatgcctacaacgaagtgatcgcccgggtgcgaatgtgggtgaacctgaacctgtggcagaagctgaagctaagcagagatgatgccaagcctctgctgagactgaagggattcccttcctttcctctggtcgagagacaggccaacgaagtggactggtgggacatggtgtgtaacgtgaagaagctgatcaacgagaaaaaggaggatggcaaggtgttttggcagaatctggctggctacaagagacaggaagccctgagaccatacctgagcagcgaggaagatcggaagaagggaaagaaattcgctcggtaccagctgggcgacctgctgctgcacctggaaaagaagcacggcgaggactggggaaaggtgtacgacgaggcctgggagcggattgacaagaaagtggaaggcctgagcaagcacatcaagctggaagaggaacggagaagcgaggacgcccagagcaaggccgccctgaccgactggctgcgggctaaggccagcttcgtgatcgagggcctgaaggaggccgacaaggacgagttctgcagatgcgagctgaagctgcagaagtggtacggggacctgcggggaaagcccttcgccatcgaagccgagaacagcatcctggacatcagcggcttcagcaagcagtacaactgtgccttcatctggcagaaggacggcgtgaagaagctgaacctgtacctgatcatcaactacttcaagggcggcaagctgcggttcaagaagatcaaacctgaagccttcgaagccaacagattctacaccgtgatcaacaaaaagagcggcgagatcgtgcccatggaggtgaacttcaacttcgacgaccccaacctgatcatcctgcctctggcctttggcaagagacagggcagagaattcatctggaacgacctgctgtccctggaaaccggcagcctgaagctggccaacggaagagtgatcgagaagacactgtacaacagaagaacccggcaggatgagcctgccctgttcgtggccctgaccttcgagcggcgggaggtcctggactcctccaatatcaaaccaatgaacctgatcggcgtggcaagaggcgaaaacatccccgccgtgatcgccctgaccgaccccgagggctgcccactgagccggtttaaggatagcctgggaaacccaacccacatcctgagaatcggcgagagctataaggagaagcagcggaccatccaggccaagaaggaggtggagcagcggagagccggcggctacagccggaagtacgccagcaaagccaagaatctggcagacgatatggtgagaaacaccgctagagatctgctgtactacgccgtgacccaggatgccatgctgatcttcgccaacctgagccggggcttcggccggcagggcaagcggaccttcatggccgagagacagtacacacggatggaggactggctgaccgccaagctggcctacgagggcctgagcaagacctacctgtccaagacactggcccagtacacctccaagacatgcagcaactgtgggtttaccatcaccagcgccgactacgacagggtgctggagaagctgaagaagacagcaacaggctggatgaccacaattaacggcaaggagctgaaggtggagggccagattacctactacaacagatacaagagacagaacgtagtcaaggacctgtccgtcgagctggatagactgagcgaagaatctgtgaacaacgacatctcctcctggacaaagggcagaagcggagaagctctgagcctcctgaagaaaagattctcccatagacccgtgcaggagaagttcgtgtgcctgaactgcggcttcgagacacacgcagccgagcaagccgccctgaacatcgccagatcctggctgttcctgcggagccaggagtacaagaaataccagacaaacaagacaaccggcaacaccgataagagagccttcgtcgagacctggcagtccttttaccggaagaagcttaaggaggtgtggaaacctgccgtgcggtctggcggatctggcggaggctccaccagccccaagaaaaagagaaaagtctaagctgccttctgcggggcttgccttctggccatgcccttcttctctcccttgcacctgtacctcttggtctttgaataaagcctgagtaggaaggctagcaaaaaaaaaaaaaaaaaaaaaaaaaaaaaaaaaaaaaaaaaaaaaaaaaaaaaaaaaaaaaaaaaaaaaaaaaaaaaaaa

SEQ ID NO: 12309 - RNA, 5785 nt, synthetic construct
  source 1..5785: mol_type = other RNA
aggaaataagagagaaaagaagagtaagaagaaatataagagccaccatggcccctaagaagaagcgtaaagtgagccggatggaacgcctcgtctacgaggtgcggcagaagtgcagaaacatcgaggacatctgcatctcctgcggatctctgaacgtgaccctggagcacccactgttcatcggcggcatgtgccagaactgtaaaaactgttttctggagtgtgcctatcaatacgacgatgacggctaccagagctactgcaccatctgttgcggcggaagagaggtgctgatgtgtggaaataacaactgctgccggtgcttctgcgtggaatgcgtggacctgctggtgggccccggcgccgcccaggccgctattaaggaagatccttggaactgctacatgtgcggccacaagggcacatacggcctgctgagacggagagaggactggcctagcagactgcagatgttcttcgccaataaccacgaccaggagttcgacccccctaaggtgtaccctcccgtccccgccgagaagagaaagcccatccgggtcctgagcctgttcgatggcatcgccaccggtctgctggtgctgaaggacctgggcatccaggtggataggtacattgcctccgaggtgtgcgaggactccatcaccgtgggaatggtgcgtcatcagggcaagatcatgtacgtgggcgacgtgcggagcgtgacacagaagcatatccaggagtggggccctttcgacctggtgatcggcggcagcccttgcaatgacctgagcatcgtgaacccagcccggaagggcctgtacgagggaaccggcagactgttcttcgagttttacagactgctgcacgacgcccggcctaaggaaggcgacgaccggcccttcttttggctgttcgagaatgtggtggccatgggagtcagcgacaagcgggatattagccggttcctggagagcaaccccgtgatgatcgatgccaaggaagtgagcgccgcccaccgggccagatacttctggggcaatctgcctggcatgaacagacccctggccagcaccgtgaacgacaagctggagctgcaggagtgcctggagcacggccggatcgccaagttcagcaaggtgagaaccatcaccacccgaagcaacagcatcaaacaaggcaaggaccagcactttcctgtgttcatgaacgagaaggaggacatcctgtggtgtaccgagatggagagagtgttcgggttcccagtccactacacagatgtcagcaacatgtctagactggccagacagagactgctgggaagaagctggtccgtccctgtgatcagacacctgttcgcccctctgaaggagtacttcgcctgcgtgagcagcggcaacagcaacgccaacagccggggccccagcttctctagcggcctggtgccactgtccctgagagggagccacatgggccccatggagatctacaaaaccgtgagcgcctggaagcggcagcctgtgcgcgtgctgagcctgtttcggaatatcgataaagtcctgaaaagcctgggattcctggagagcggctctggctccggcggtggcaccctgaagtacgtggaggatgtgacaaacgtggtcagacgggatgtggagaagtggggccccttcgatctggtgtacggcagcacccaacccctgggcagctcttgtgaccggtgccctggctggtacatgtttcagttccaccggatcctgcagtacgccctgccgagacaggagtcccagcggccattcttttggattttcatggacaacttgctgctgaccgaggatgaccaggaaactaccactcggttcctgcagaccgaagccgtgaccctgcaggacgtgagaggccgggactaccagaacgccatgcgggtgtggtccaacatccctggactgaaaagcaagcacgcacctctgacccctaaagaagaggagtacctgcaggcccaggtgcggagcagaagcaagctggacgcccctaaggtggatctgctggtgaagaattgcctcctgcccctgagagagtacttcaagtatttcagccagaatagtctgcccctgggaggcagcggcggcggcatggccttcgaggacgtggccgtgcacttcagccaggaggagtggggcctgctggacaccgcccagaggagcctgtacaggagggtgatgctggagaacttcgccctgctggccagcctgggcctgagcgtgagcaggccccacgtggtgacccagctggagaggggcgaggagccctgggtgctgagcggcgtggacgtgaccctgcccagggacgcccagaggaggccccacaggggcagcggcggcccaagcagcggcgcccctcctcccagcggcggcagcccagccggctccccaacctctaccgaggagggcacctctgagtccgccacccccgagagcggccctggcacctccaccgagcccagcgagggcagcgcacccggcagccctgccggcagccccacctccacagaggagggaaccagcaccgagcccagcgaaggcagcgccccaggcaccagcaccgagcctagtgagcaggagattaaacggatcaacaagatcagaagaagacttgtgaaagacagcaacaccaagaaggccggcaagacaggccccatgaaaaccctgctggttagagtgatgacacccgatctgagagagcggctggaaaacctgagaaagaagcctgaaaatatcccccagcccatcagcaatacatctagagccaacctgaataagctgctgaccgattacaccgaaatgaagaaggcgatcctgcatgtgtactgggaagagttccagaaggaccctgtgggcctgatgagccgggtggcccagcctgccagcaagaagatcgatcagaacaagctgaaacctgagatggacgagaagggcaacctgaccaccgccggctttgcctgctctcagtgtggccagcccctgttcgtgtacaagctggagcaggtgtctgagaagggcaaggcttacaccaactacttcggacggtgcaatgtggccgagcacgaaaagctgatcctgctggcccagctgaagcccgagaaggatagcgacgaagccgtgacatatagcctgggaaagtttgggcagagggccctggatttctacagcattcatgtgaccaaggagtccacccaccccgtgaagcccctggcccagatcgccggaaacagatacgcctccggacctgtgggaaaggccctgagcgacgcatgtatgggcacaatcgcctccttcctgtctaagtaccaggacatcatcatcgaacaccagaaggtggtgaagggcaaccagaagagactggagagcctgcgggagctggccggcaaggaaaacctggaataccctagcgtgaccctgccacctcagcctcacaccaaggagggcgttgatgcctacaacgaagtgatcgcccgggtgcgaatgtgggtgaacctgaacctgtggcagaagctgaagctaagcagagatgatgccaagcctctgctgagactgaagggattcccttcctttcctctggtcgagagacaggccaacgaagtggactggtgggacatggtgtgtaacgtgaagaagctgatcaacgagaaaaaggaggatggcaaggtgttttggcagaatctggctggctacaagagacaggaagccctgagaccatacctgagcagcgaggaagatcggaagaagggaaagaaattcgctcggtaccagctgggcgacctgctgctgcacctggaaaagaagcacggcgaggactggggaaaggtgtacgacgaggcctgggagcggattgacaagaaagtggaaggcctgagcaagcacatcaagctggaagaggaacggagaagcgaggacgcccagagcaaggccgccctgaccgactggctgcgggctaaggccagcttcgtgatcgagggcctgaaggaggccgacaaggacgagttctgcagatgcgagctgaagctgcagaagtggtacggggacctgcggggaaagcccttcgccatcgaagccgagaacagcatcctggacatcagcggcttcagcaagcagtacaactgtgccttcatctggcagaaggacggcgtgaagaagctgaacctgtacctgatcatcaactacttcaagggcggcaagctgcggttcaagaagatcaaacctgaagccttcgaagccaacagattctacaccgtgatcaacaaaaagagcggcgagatcgtgcccatggaggtgaacttcaacttcgacgaccccaacctgatcatcctgcctctggcctttggcaagagacagggcagagaattcatctggaacgacctgctgtccctggaaaccggcagcctgaagctggccaacggaagagtgatcgagaagacactgtacaacagaagaacccggcaggatgagcctgccctgttcgtggccctgaccttcgagcggcgggaggtcctggactcctccaatatcaaaccaatgaacctgatcggcgtggcaagaggcgaaaacatccccgccgtgatcgccctgaccgaccccgagggctgcccactgagccggtttaaggatagcctgggaaacccaacccacatcctgagaatcggcgagagctataaggagaagcagcggaccatccaggccaagaaggaggtggagcagcggagagccggcggctacagccggaagtacgccagcaaagccaagaatctggcagacgatatggtgagaaacaccgctagagatctgctgtactacgccgtgacccaggatgccatgctgatcttcgccaacctgagccggggcttcggccggcagggcaagcggaccttcatggccgagagacagtacacacggatggaggactggctgaccgccaagctggcctacgagggcctgagcaagacctacctgtccaagacactggcccagtacacctccaagacatgcagcaactgtgggtttaccatcaccagcgccgactacgacagggtgctggagaagctgaagaagacagcaacaggctggatgaccacaattaacggcaaggagctgaaggtggagggccagattacctactacaacagatacaagagacagaacgtagtcaaggacctgtccgtcgagctggatagactgagcgaagaatctgtgaacaacgacatctcctcctggacaaagggcagaagcggagaagctctgagcctcctgaagaaaagattctcccatagacccgtgcaggagaagttcgtgtgcctgaactgcggcttcgagacacacgcagccgagcaagccgccctgaacatcgccagatcctggctgttcctgcggagccaggagtacaagaaataccagacaaacaagacaaccggcaacaccgataagagagccttcgtcgagacctggcagtccttttaccggaagaagcttaaggaggtgtggaaacctgccgtgcggtctggcggatctggcggaggctccaccagccccaagaaaaagagaaaagtctaagctgccttctgcggggcttgccttctggccatgcccttcttctctcccttgcacctgtacctcttggtctttgaataaagcctgagtaggaaggctagcaaaaaaaaaaaaaaaaaaaaaaaaaaaaaaaaaaaaaaaaaaaaaaaaaaaaaaaaaaaaaaaaaaaaaaaaaaaaaaaa

SEQ ID NO: 12310 - RNA, 5785 nt, synthetic construct
  source 1..5785: mol_type = other RNA
aggaaataagagagaaaagaagagtaagaagaaatataagagccaccatggcccctaagaagaagcgtaaagtgagccggatggaacgcctcgtctacgaggtgcggcagaagtgcagaaacatcgaggacatctgcatctcctgcggatctctgaacgtgaccctggagcacccactgttcatcggcggcatgtgccagaactgtaaaaactgttttctggagtgtgcctatcaatacgacgatgacggctaccagagctactgcaccatctgttgcggcggaagagaggtgctgatgtgtggaaataacaactgctgccggtgcttctgcgtggaatgcgtggacctgctggtgggccccggcgccgcccaggccgctattaaggaagatccttggaactgctacatgtgcggccacaagggcacatacggcctgctgagacggagagaggactggcctagcagactgcagatgttcttcgccaataaccacgaccaggagttcgacccccctaaggtgtaccctcccgtccccgccgagaagagaaagcccatccgggtcctgagcctgttcgatggcatcgccaccggtctgctggtgctgaaggacctgggcatccaggtggataggtacattgcctccgaggtgtgcgaggactccatcaccgtgggaatggtgcgtcatcagggcaagatcatgtacgtgggcgacgtgcggagcgtgacacagaagcatatccaggagtggggccctttcgacctggtgatcggcggcagcccttgcaatgacctgagcatcgtgaacccagcccggaagggcctgtacgagggaaccggcagactgttcttcgagttttacagactgctgcacgacgcccggcctaaggaaggcgacgaccggcccttcttttggctgttcgagaatgtggtggccatgggagtcagcgacaagcgggatattagccggttcctggagagcaaccccgtgatgatcgatgccaaggaagtgagcgccgcccaccgggccagatacttctggggcaatctgcctggcatgaacagacccctggccagcaccgtgaacgacaagctggagctgcaggagtgcctggagcacggccggatcgccaagttcagcaaggtgagaaccatcaccacccgaagcaacagcatcaaacaaggcaaggaccagcactttcctgtgttcatgaacgagaaggaggacatcctgtggtgtaccgagatggagagagtgttcgggttcccagtccactacacagatgtcagcaacatgtctagactggccagacagagactgctgggaagaagctggtccgtccctgtgatcagacacctgttcgcccctctgaaggagtacttcgcctgcgtgagcagcggcaacagcaacgccaacagccggggccccagcttctctagcggcctggtgccactgtccctgagagggagccacatgggccccatggagatctacaaaaccgtgagcgcctggaagcggcagcctgtgcgcgtgctgagcctgtttcggaatatcgataaagtcctgaaaagcctgggattcctggagagcggctctggctccggcggtggcaccctgaagtacgtggaggatgtgacaaacgtggtcagacgggatgtggagaagtggggccccttcgatctggtgtacggcagcacccaacccctgggcagctcttgtgaccggtgccctggctggtacatgtttcagttccaccggatcctgcagtacgccctgccgagacaggagtcccagcggccattcttttggattttcatggacaacttgctgctgaccgaggatgaccaggaaactaccactcggttcctgcagaccgaagccgtgaccctgcaggacgtgagaggccgggactaccagaacgccatgcgggtgtggtccaacatccctggactgaaaagcaagcacgcacctctgacccctaaagaagaggagtacctgcaggcccaggtgcggagcagaagcaagctggacgcccctaaggtggatctgctggtgaagaattgcctcctgcccctgagagagtacttcaagtatttcagccagaatagtctgcccctgggaggcagcggcggcggcatgatcgagtaccagatccccgtgagcttcaaggacgtggtggtgggcttcacccaggaggagtggcaccagctgagccccgcccagagggccctgtacagggacgtgatgctggagacctacagcaacctggtgagcgtgggctacgagggcaccaagcccgacgtgatcctgaggctggagcaggaggaggccccctggatcggcgaggccgcctgcctgggctgccactgctgggaggacggcggcccaagcagcggcgcccctcctcccagcggcggcagcccagccggctccccaacctctaccgaggagggcacctctgagtccgccacccccgagagcggccctggcacctccaccgagcccagcgagggcagcgcacccggcagccctgccggcagccccacctccacagaggagggaaccagcaccgagcccagcgaaggcagcgccccaggcaccagcaccgagcctagtgagcaggagattaaacggatcaacaagatcagaagaagacttgtgaaagacagcaacaccaagaaggccggcaagacaggccccatgaaaaccctgctggttagagtgatgacacccgatctgagagagcggctggaaaacctgagaaagaagcctgaaaatatcccccagcccatcagcaatacatctagagccaacctgaataagctgctgaccgattacaccgaaatgaagaaggcgatcctgcatgtgtactgggaagagttccagaaggaccctgtgggcctgatgagccgggtggcccagcctgccagcaagaagatcgatcagaacaagctgaaacctgagatggacgagaagggcaacctgaccaccgccggctttgcctgctctcagtgtggccagcccctgttcgtgtacaagctggagcaggtgtctgagaagggcaaggcttacaccaactacttcggacggtgcaatgtggccgagcacgaaaagctgatcctgctggcccagctgaagcccgagaaggatagcgacgaagccgtgacatatagcctgggaaagtttgggcagagggccctggatttctacagcattcatgtgaccaaggagtccacccaccccgtgaagcccctggcccagatcgccggaaacagatacgcctccggacctgtgggaaaggccctgagcgacgcatgtatgggcacaatcgcctccttcctgtctaagtaccaggacatcatcatcgaacaccagaaggtggtgaagggcaaccagaagagactggagagcctgcgggagctggccggcaaggaaaacctggaataccctagcgtgaccctgccacctcagcctcacaccaaggagggcgttgatgcctacaacgaagtgatcgcccgggtgcgaatgtgggtgaacctgaacctgtggcagaagctgaagctaagcagagatgatgccaagcctctgctgagactgaagggattcccttcctttcctctggtcgagagacaggccaacgaagtggactggtgggacatggtgtgtaacgtgaagaagctgatcaacgagaaaaaggaggatggcaaggtgttttggcagaatctggctggctacaagagacaggaagccctgagaccatacctgagcagcgaggaagatcggaagaagggaaagaaattcgctcggtaccagctgggcgacctgctgctgcacctggaaaagaagcacggcgaggactggggaaaggtgtacgacgaggcctgggagcggattgacaagaaagtggaaggcctgagcaagcacatcaagctggaagaggaacggagaagcgaggacgcccagagcaaggccgccctgaccgactggctgcgggctaaggccagcttcgtgatcgagggcctgaaggaggccgacaaggacgagttctgcagatgcgagctgaagctgcagaagtggtacggggacctgcggggaaagcccttcgccatcgaagccgagaacagcatcctggacatcagcggcttcagcaagcagtacaactgtgccttcatctggcagaaggacggcgtgaagaagctgaacctgtacctgatcatcaactacttcaagggcggcaagctgcggttcaagaagatcaaacctgaagccttcgaagccaacagattctacaccgtgatcaacaaaaagagcggcgagatcgtgcccatggaggtgaacttcaacttcgacgaccccaacctgatcatcctgcctctggcctttggcaagagacagggcagagaattcatctggaacgacctgctgtccctggaaaccggcagcctgaagctggccaacggaagagtgatcgagaagacactgtacaacagaagaacccggcaggatgagcctgccctgttcgtggccctgaccttcgagcggcgggaggtcctggactcctccaatatcaaaccaatgaacctgatcggcgtggcaagaggcgaaaacatccccgccgtgatcgccctgaccgaccccgagggctgcccactgagccggtttaaggatagcctgggaaacccaacccacatcctgagaatcggcgagagctataaggagaagcagcggaccatccaggccaagaaggaggtggagcagcggagagccggcggctacagccggaagtacgccagcaaagccaagaatctggcagacgatatggtgagaaacaccgctagagatctgctgtactacgccgtgacccaggatgccatgctgatcttcgccaacctgagccggggcttcggccggcagggcaagcggaccttcatggccgagagacagtacacacggatggaggactggctgaccgccaagctggcctacgagggcctgagcaagacctacctgtccaagacactggcccagtacacctccaagacatgcagcaactgtgggtttaccatcaccagcgccgactacgacagggtgctggagaagctgaagaagacagcaacaggctggatgaccacaattaacggcaaggagctgaaggtggagggccagattacctactacaacagatacaagagacagaacgtagtcaaggacctgtccgtcgagctggatagactgagcgaagaatctgtgaacaacgacatctcctcctggacaaagggcagaagcggagaagctctgagcctcctgaagaaaagattctcccatagacccgtgcaggagaagttcgtgtgcctgaactgcggcttcgagacacacgcagccgagcaagccgccctgaacatcgccagatcctggctgttcctgcggagccaggagtacaagaaataccagacaaacaagacaaccggcaacaccgataagagagccttcgtcgagacctggcagtccttttaccggaagaagcttaaggaggtgtggaaacctgccgtgcggtctggcggatctggcggaggctccaccagccccaagaaaaagagaaaagtctaagctgccttctgcggggcttgccttctggccatgcccttcttctctcccttgcacctgtacctcttggtctttgaataaagcctgagtaggaaggctagcaaaaaaaaaaaaaaaaaaaaaaaaaaaaaaaaaaaaaaaaaaaaaaaaaaaaaaaaaaaaaaaaaaaaaaaaaaaaaaaa

SEQ ID NO: 12311 - RNA, 5785 nt, synthetic construct
  source 1..5785: mol_type = other RNA
aggaaataagagagaaaagaagagtaagaagaaatataagagccaccatggcccctaagaagaagcgtaaagtgagccggatggaacgcctcgtctacgaggtgcggcagaagtgcagaaacatcgaggacatctgcatctcctgcggatctctgaacgtgaccctggagcacccactgttcatcggcggcatgtgccagaactgtaaaaactgttttctggagtgtgcctatcaatacgacgatgacggctaccagagctactgcaccatctgttgcggcggaagagaggtgctgatgtgtggaaataacaactgctgccggtgcttctgcgtggaatgcgtggacctgctggtgggccccggcgccgcccaggccgctattaaggaagatccttggaactgctacatgtgcggccacaagggcacatacggcctgctgagacggagagaggactggcctagcagactgcagatgttcttcgccaataaccacgaccaggagttcgacccccctaaggtgtaccctcccgtccccgccgagaagagaaagcccatccgggtcctgagcctgttcgatggcatcgccaccggtctgctggtgctgaaggacctgggcatccaggtggataggtacattgcctccgaggtgtgcgaggactccatcaccgtgggaatggtgcgtcatcagggcaagatcatgtacgtgggcgacgtgcggagcgtgacacagaagcatatccaggagtggggccctttcgacctggtgatcggcggcagcccttgcaatgacctgagcatcgtgaacccagcccggaagggcctgtacgagggaaccggcagactgttcttcgagttttacagactgctgcacgacgcccggcctaaggaaggcgacgaccggcccttcttttggctgttcgagaatgtggtggccatgggagtcagcgacaagcgggatattagccggttcctggagagcaaccccgtgatgatcgatgccaaggaagtgagcgccgcccaccgggccagatacttctggggcaatctgcctggcatgaacagacccctggccagcaccgtgaacgacaagctggagctgcaggagtgcctggagcacggccggatcgccaagttcagcaaggtgagaaccatcaccacccgaagcaacagcatcaaacaaggcaaggaccagcactttcctgtgttcatgaacgagaaggaggacatcctgtggtgtaccgagatggagagagtgttcgggttcccagtccactacacagatgtcagcaacatgtctagactggccagacagagactgctgggaagaagctggtccgtccctgtgatcagacacctgttcgcccctctgaaggagtacttcgcctgcgtgagcagcggcaacagcaacgccaacagccggggccccagcttctctagcggcctggtgccactgtccctgagagggagccacatgggccccatggagatctacaaaaccgtgagcgcctggaagcggcagcctgtgcgcgtgctgagcctgtttcggaatatcgataaagtcctgaaaagcctgggattcctggagagcggctctggctccggcggtggcaccctgaagtacgtggaggatgtgacaaacgtggtcagacgggatgtggagaagtggggccccttcgatctggtgtacggcagcacccaacccctgggcagctcttgtgaccggtgccctggctggtacatgtttcagttccaccggatcctgcagtacgccctgccgagacaggagtcccagcggccattcttttggattttcatggacaacttgctgctgaccgaggatgaccaggaaactaccactcggttcctgcagaccgaagccgtgaccctgcaggacgtgagaggccgggactaccagaacgccatgcgggtgtggtccaacatccctggactgaaaagcaagcacgcacctctgacccctaaagaagaggagtacctgcaggcccaggtgcggagcagaagcaagctggacgcccctaaggtggatctgctggtgaagaattgcctcctgcccctgagagagtacttcaagtatttcagccagaatagtctgcccctgggaggcagcggcggcggcatggcccaggtgaccttcagcgacgtggccatcgacttcagccacgaggagtgggcctggctggacagcgcccagagggacctgtacaaggacgtgatggtgcagaactacgagaacctggtgagcgtgggcctgagcgtgaccaagccctacgtgatcaccctgctggaggacggcaaggagccctggatggtggagaagaagctgagcaagggcatgatccccgactgggagagcaggtggggcggcccaagcagcggcgcccctcctcccagcggcggcagcccagccggctccccaacctctaccgaggagggcacctctgagtccgccacccccgagagcggccctggcacctccaccgagcccagcgagggcagcgcacccggcagccctgccggcagccccacctccacagaggagggaaccagcaccgagcccagcgaaggcagcgccccaggcaccagcaccgagcctagtgagcaggagattaaacggatcaacaagatcagaagaagacttgtgaaagacagcaacaccaagaaggccggcaagacaggccccatgaaaaccctgctggttagagtgatgacacccgatctgagagagcggctggaaaacctgagaaagaagcctgaaaatatcccccagcccatcagcaatacatctagagccaacctgaataagctgctgaccgattacaccgaaatgaagaaggcgatcctgcatgtgtactgggaagagttccagaaggaccctgtgggcctgatgagccgggtggcccagcctgccagcaagaagatcgatcagaacaagctgaaacctgagatggacgagaagggcaacctgaccaccgccggctttgcctgctctcagtgtggccagcccctgttcgtgtacaagctggagcaggtgtctgagaagggcaaggcttacaccaactacttcggacggtgcaatgtggccgagcacgaaaagctgatcctgctggcccagctgaagcccgagaaggatagcgacgaagccgtgacatatagcctgggaaagtttgggcagagggccctggatttctacagcattcatgtgaccaaggagtccacccaccccgtgaagcccctggcccagatcgccggaaacagatacgcctccggacctgtgggaaaggccctgagcgacgcatgtatgggcacaatcgcctccttcctgtctaagtaccaggacatcatcatcgaacaccagaaggtggtgaagggcaaccagaagagactggagagcctgcgggagctggccggcaaggaaaacctggaataccctagcgtgaccctgccacctcagcctcacaccaaggagggcgttgatgcctacaacgaagtgatcgcccgggtgcgaatgtgggtgaacctgaacctgtggcagaagctgaagctaagcagagatgatgccaagcctctgctgagactgaagggattcccttcctttcctctggtcgagagacaggccaacgaagtggactggtgggacatggtgtgtaacgtgaagaagctgatcaacgagaaaaaggaggatggcaaggtgttttggcagaatctggctggctacaagagacaggaagccctgagaccatacctgagcagcgaggaagatcggaagaagggaaagaaattcgctcggtaccagctgggcgacctgctgctgcacctggaaaagaagcacggcgaggactggggaaaggtgtacgacgaggcctgggagcggattgacaagaaagtggaaggcctgagcaagcacatcaagctggaagaggaacggagaagcgaggacgcccagagcaaggccgccctgaccgactggctgcgggctaaggccagcttcgtgatcgagggcctgaaggaggccgacaaggacgagttctgcagatgcgagctgaagctgcagaagtggtacggggacctgcggggaaagcccttcgccatcgaagccgagaacagcatcctggacatcagcggcttcagcaagcagtacaactgtgccttcatctggcagaaggacggcgtgaagaagctgaacctgtacctgatcatcaactacttcaagggcggcaagctgcggttcaagaagatcaaacctgaagccttcgaagccaacagattctacaccgtgatcaacaaaaagagcggcgagatcgtgcccatggaggtgaacttcaacttcgacgaccccaacctgatcatcctgcctctggcctttggcaagagacagggcagagaattcatctggaacgacctgctgtccctggaaaccggcagcctgaagctggccaacggaagagtgatcgagaagacactgtacaacagaagaacccggcaggatgagcctgccctgttcgtggccctgaccttcgagcggcgggaggtcctggactcctccaatatcaaaccaatgaacctgatcggcgtggcaagaggcgaaaacatccccgccgtgatcgccctgaccgaccccgagggctgcccactgagccggtttaaggatagcctgggaaacccaacccacatcctgagaatcggcgagagctataaggagaagcagcggaccatccaggccaagaaggaggtggagcagcggagagccggcggctacagccggaagtacgccagcaaagccaagaatctggcagacgatatggtgagaaacaccgctagagatctgctgtactacgccgtgacccaggatgccatgctgatcttcgccaacctgagccggggcttcggccggcagggcaagcggaccttcatggccgagagacagtacacacggatggaggactggctgaccgccaagctggcctacgagggcctgagcaagacctacctgtccaagacactggcccagtacacctccaagacatgcagcaactgtgggtttaccatcaccagcgccgactacgacagggtgctggagaagctgaagaagacagcaacaggctggatgaccacaattaacggcaaggagctgaaggtggagggccagattacctactacaacagatacaagagacagaacgtagtcaaggacctgtccgtcgagctggatagactgagcgaagaatctgtgaacaacgacatctcctcctggacaaagggcagaagcggagaagctctgagcctcctgaagaaaagattctcccatagacccgtgcaggagaagttcgtgtgcctgaactgcggcttcgagacacacgcagccgagcaagccgccctgaacatcgccagatcctggctgttcctgcggagccaggagtacaagaaataccagacaaacaagacaaccggcaacaccgataagagagccttcgtcgagacctggcagtccttttaccggaagaagcttaaggaggtgtggaaacctgccgtgcggtctggcggatctggcggaggctccaccagccccaagaaaaagagaaaagtctaagctgccttctgcggggcttgccttctggccatgcccttcttctctcccttgcacctgtacctcttggtctttgaataaagcctgagtaggaaggctagcaaaaaaaaaaaaaaaaaaaaaaaaaaaaaaaaaaaaaaaaaaaaaaaaaaaaaaaaaaaaaaaaaaaaaaaaaaaaaaaa

SEQ ID NO: 12312 - RNA, 5785 nt, synthetic construct
  source 1..5785: mol_type = other RNA
aggaaataagagagaaaagaagagtaagaagaaatataagagccaccatggcccctaagaagaagcgtaaagtgagccggatggaacgcctcgtctacgaggtgcggcagaagtgcagaaacatcgaggacatctgcatctcctgcggatctctgaacgtgaccctggagcacccactgttcatcggcggcatgtgccagaactgtaaaaactgttttctggagtgtgcctatcaatacgacgatgacggctaccagagctactgcaccatctgttgcggcggaagagaggtgctgatgtgtggaaataacaactgctgccggtgcttctgcgtggaatgcgtggacctgctggtgggccccggcgccgcccaggccgctattaaggaagatccttggaactgctacatgtgcggccacaagggcacatacggcctgctgagacggagagaggactggcctagcagactgcagatgttcttcgccaataaccacgaccaggagttcgacccccctaaggtgtaccctcccgtccccgccgagaagagaaagcccatccgggtcctgagcctgttcgatggcatcgccaccggtctgctggtgctgaaggacctgggcatccaggtggataggtacattgcctccgaggtgtgcgaggactccatcaccgtgggaatggtgcgtcatcagggcaagatcatgtacgtgggcgacgtgcggagcgtgacacagaagcatatccaggagtggggccctttcgacctggtgatcggcggcagcccttgcaatgacctgagcatcgtgaacccagcccggaagggcctgtacgagggaaccggcagactgttcttcgagttttacagactgctgcacgacgcccggcctaaggaaggcgacgaccggcccttcttttggctgttcgagaatgtggtggccatgggagtcagcgacaagcgggatattagccggttcctggagagcaaccccgtgatgatcgatgccaaggaagtgagcgccgcccaccgggccagatacttctggggcaatctgcctggcatgaacagacccctggccagcaccgtgaacgacaagctggagctgcaggagtgcctggagcacggccggatcgccaagttcagcaaggtgagaaccatcaccacccgaagcaacagcatcaaacaaggcaaggaccagcactttcctgtgttcatgaacgagaaggaggacatcctgtggtgtaccgagatggagagagtgttcgggttcccagtccactacacagatgtcagcaacatgtctagactggccagacagagactgctgggaagaagctggtccgtccctgtgatcagacacctgttcgcccctctgaaggagtacttcgcctgcgtgagcagcggcaacagcaacgccaacagccggggccccagcttctctagcggcctggtgccactgtccctgagagggagccacatgggccccatggagatctacaaaaccgtgagcgcctggaagcggcagcctgtgcgcgtgctgagcctgtttcggaatatcgataaagtcctgaaaagcctgggattcctggagagcggctctggctccggcggtggcaccctgaagtacgtggaggatgtgacaaacgtggtcagacgggatgtggagaagtggggccccttcgatctggtgtacggcagcacccaacccctgggcagctcttgtgaccggtgccctggctggtacatgtttcagttccaccggatcctgcagtacgccctgccgagacaggagtcccagcggccattcttttggattttcatggacaacttgctgctgaccgaggatgaccaggaaactaccactcggttcctgcagaccgaagccgtgaccctgcaggacgtgagaggccgggactaccagaacgccatgcgggtgtggtccaacatccctggactgaaaagcaagcacgcacctctgacccctaaagaagaggagtacctgcaggcccaggtgcggagcagaagcaagctggacgcccctaaggtggatctgctggtgaagaattgcctcctgcccctgagagagtacttcaagtatttcagccagaatagtctgcccctgggaggcagcggcggcggcaggctggagagcgtgaccttcgaggacgtggccgtgtacttcacccagaaccagtgggccagcctggaccccgcccagagggccctgtacggcgaggtgatgctggagaactacgccaacgtggccagcctggtggccttccccttccccaagcccgccctgatcagccacctggagaggggcgaggccccctggggccccgacccctgggacaccaagatccccaggggcatcagccagggcggcggcccaagcagcggcgcccctcctcccagcggcggcagcccagccggctccccaacctctaccgaggagggcacctctgagtccgccacccccgagagcggccctggcacctccaccgagcccagcgagggcagcgcacccggcagccctgccggcagccccacctccacagaggagggaaccagcaccgagcccagcgaaggcagcgccccaggcaccagcaccgagcctagtgagcaggagattaaacggatcaacaagatcagaagaagacttgtgaaagacagcaacaccaagaaggccggcaagacaggccccatgaaaaccctgctggttagagtgatgacacccgatctgagagagcggctggaaaacctgagaaagaagcctgaaaatatcccccagcccatcagcaatacatctagagccaacctgaataagctgctgaccgattacaccgaaatgaagaaggcgatcctgcatgtgtactgggaagagttccagaaggaccctgtgggcctgatgagccgggtggcccagcctgccagcaagaagatcgatcagaacaagctgaaacctgagatggacgagaagggcaacctgaccaccgccggctttgcctgctctcagtgtggccagcccctgttcgtgtacaagctggagcaggtgtctgagaagggcaaggcttacaccaactacttcggacggtgcaatgtggccgagcacgaaaagctgatcctgctggcccagctgaagcccgagaaggatagcgacgaagccgtgacatatagcctgggaaagtttgggcagagggccctggatttctacagcattcatgtgaccaaggagtccacccaccccgtgaagcccctggcccagatcgccggaaacagatacgcctccggacctgtgggaaaggccctgagcgacgcatgtatgggcacaatcgcctccttcctgtctaagtaccaggacatcatcatcgaacaccagaaggtggtgaagggcaaccagaagagactggagagcctgcgggagctggccggcaaggaaaacctggaataccctagcgtgaccctgccacctcagcctcacaccaaggagggcgttgatgcctacaacgaagtgatcgcccgggtgcgaatgtgggtgaacctgaacctgtggcagaagctgaagctaagcagagatgatgccaagcctctgctgagactgaagggattcccttcctttcctctggtcgagagacaggccaacgaagtggactggtgggacatggtgtgtaacgtgaagaagctgatcaacgagaaaaaggaggatggcaaggtgttttggcagaatctggctggctacaagagacaggaagccctgagaccatacctgagcagcgaggaagatcggaagaagggaaagaaattcgctcggtaccagctgggcgacctgctgctgcacctggaaaagaagcacggcgaggactggggaaaggtgtacgacgaggcctgggagcggattgacaagaaagtggaaggcctgagcaagcacatcaagctggaagaggaacggagaagcgaggacgcccagagcaaggccgccctgaccgactggctgcgggctaaggccagcttcgtgatcgagggcctgaaggaggccgacaaggacgagttctgcagatgcgagctgaagctgcagaagtggtacggggacctgcggggaaagcccttcgccatcgaagccgagaacagcatcctggacatcagcggcttcagcaagcagtacaactgtgccttcatctggcagaaggacggcgtgaagaagctgaacctgtacctgatcatcaactacttcaagggcggcaagctgcggttcaagaagatcaaacctgaagccttcgaagccaacagattctacaccgtgatcaacaaaaagagcggcgagatcgtgcccatggaggtgaacttcaacttcgacgaccccaacctgatcatcctgcctctggcctttggcaagagacagggcagagaattcatctggaacgacctgctgtccctggaaaccggcagcctgaagctggccaacggaagagtgatcgagaagacactgtacaacagaagaacccggcaggatgagcctgccctgttcgtggccctgaccttcgagcggcgggaggtcctggactcctccaatatcaaaccaatgaacctgatcggcgtggcaagaggcgaaaacatccccgccgtgatcgccctgaccgaccccgagggctgcccactgagccggtttaaggatagcctgggaaacccaacccacatcctgagaatcggcgagagctataaggagaagcagcggaccatccaggccaagaaggaggtggagcagcggagagccggcggctacagccggaagtacgccagcaaagccaagaatctggcagacgatatggtgagaaacaccgctagagatctgctgtactacgccgtgacccaggatgccatgctgatcttcgccaacctgagccggggcttcggccggcagggcaagcggaccttcatggccgagagacagtacacacggatggaggactggctgaccgccaagctggcctacgagggcctgagcaagacctacctgtccaagacactggcccagtacacctccaagacatgcagcaactgtgggtttaccatcaccagcgccgactacgacagggtgctggagaagctgaagaagacagcaacaggctggatgaccacaattaacggcaaggagctgaaggtggagggccagattacctactacaacagatacaagagacagaacgtagtcaaggacctgtccgtcgagctggatagactgagcgaagaatctgtgaacaacgacatctcctcctggacaaagggcagaagcggagaagctctgagcctcctgaagaaaagattctcccatagacccgtgcaggagaagttcgtgtgcctgaactgcggcttcgagacacacgcagccgagcaagccgccctgaacatcgccagatcctggctgttcctgcggagccaggagtacaagaaataccagacaaacaagacaaccggcaacaccgataagagagccttcgtcgagacctggcagtccttttaccggaagaagcttaaggaggtgtggaaacctgccgtgcggtctggcggatctggcggaggctccaccagccccaagaaaaagagaaaagtctaagctgccttctgcggggcttgccttctggccatgcccttcttctctcccttgcacctgtacctcttggtctttgaataaagcctgagtaggaaggctagcaaaaaaaaaaaaaaaaaaaaaaaaaaaaaaaaaaaaaaaaaaaaaaaaaaaaaaaaaaaaaaaaaaaaaaaaaaaaaaaa

SEQ ID NO: 12313 - RNA, 5785 nt, synthetic construct
  source 1..5785: mol_type = other RNA
aggaaataagagagaaaagaagagtaagaagaaatataagagccaccatggcccctaagaagaagcgtaaagtgagccggatggaacgcctcgtctacgaggtgcggcagaagtgcagaaacatcgaggacatctgcatctcctgcggatctctgaacgtgaccctggagcacccactgttcatcggcggcatgtgccagaactgtaaaaactgttttctggagtgtgcctatcaatacgacgatgacggctaccagagctactgcaccatctgttgcggcggaagagaggtgctgatgtgtggaaataacaactgctgccggtgcttctgcgtggaatgcgtggacctgctggtgggccccggcgccgcccaggccgctattaaggaagatccttggaactgctacatgtgcggccacaagggcacatacggcctgctgagacggagagaggactggcctagcagactgcagatgttcttcgccaataaccacgaccaggagttcgacccccctaaggtgtaccctcccgtccccgccgagaagagaaagcccatccgggtcctgagcctgttcgatggcatcgccaccggtctgctggtgctgaaggacctgggcatccaggtggataggtacattgcctccgaggtgtgcgaggactccatcaccgtgggaatggtgcgtcatcagggcaagatcatgtacgtgggcgacgtgcggagcgtgacacagaagcatatccaggagtggggccctttcgacctggtgatcggcggcagcccttgcaatgacctgagcatcgtgaacccagcccggaagggcctgtacgagggaaccggcagactgttcttcgagttttacagactgctgcacgacgcccggcctaaggaaggcgacgaccggcccttcttttggctgttcgagaatgtggtggccatgggagtcagcgacaagcgggatattagccggttcctggagagcaaccccgtgatgatcgatgccaaggaagtgagcgccgcccaccgggccagatacttctggggcaatctgcctggcatgaacagacccctggccagcaccgtgaacgacaagctggagctgcaggagtgcctggagcacggccggatcgccaagttcagcaaggtgagaaccatcaccacccgaagcaacagcatcaaacaaggcaaggaccagcactttcctgtgttcatgaacgagaaggaggacatcctgtggtgtaccgagatggagagagtgttcgggttcccagtccactacacagatgtcagcaacatgtctagactggccagacagagactgctgggaagaagctggtccgtccctgtgatcagacacctgttcgcccctctgaaggagtacttcgcctgcgtgagcagcggcaacagcaacgccaacagccggggccccagcttctctagcggcctggtgccactgtccctgagagggagccacatgggccccatggagatctacaaaaccgtgagcgcctggaagcggcagcctgtgcgcgtgctgagcctgtttcggaatatcgataaagtcctgaaaagcctgggattcctggagagcggctctggctccggcggtggcaccctgaagtacgtggaggatgtgacaaacgtggtcagacgggatgtggagaagtggggccccttcgatctggtgtacggcagcacccaacccctgggcagctcttgtgaccggtgccctggctggtacatgtttcagttccaccggatcctgcagtacgccctgccgagacaggagtcccagcggccattcttttggattttcatggacaacttgctgctgaccgaggatgaccaggaaactaccactcggttcctgcagaccgaagccgtgaccctgcaggacgtgagaggccgggactaccagaacgccatgcgggtgtggtccaacatccctggactgaaaagcaagcacgcacctctgacccctaaagaagaggagtacctgcaggcccaggtgcggagcagaagcaagctggacgcccctaaggtggatctgctggtgaagaattgcctcctgcccctgagagagtacttcaagtatttcagccagaatagtctgcccctgggaggcagcggcggcggctgccaggagaccctgaccttcaaggacgtggccgtggacttcaccagggaggagtggggccagctgggccccgcccagagggacctgtacaaggaggtgatgctggacaactacaggaacctgatcagcctgggcctgcagggcagcaagcccgacgtgatcttctggctggagaggggccagagcccctggaccctgaagaggaggaagagcagggactgctgccccgagttccacctgcacggcggcccaagcagcggcgcccctcctcccagcggcggcagcccagccggctccccaacctctaccgaggagggcacctctgagtccgccacccccgagagcggccctggcacctccaccgagcccagcgagggcagcgcacccggcagccctgccggcagccccacctccacagaggagggaaccagcaccgagcccagcgaaggcagcgccccaggcaccagcaccgagcctagtgagcaggagattaaacggatcaacaagatcagaagaagacttgtgaaagacagcaacaccaagaaggccggcaagacaggccccatgaaaaccctgctggttagagtgatgacacccgatctgagagagcggctggaaaacctgagaaagaagcctgaaaatatcccccagcccatcagcaatacatctagagccaacctgaataagctgctgaccgattacaccgaaatgaagaaggcgatcctgcatgtgtactgggaagagttccagaaggaccctgtgggcctgatgagccgggtggcccagcctgccagcaagaagatcgatcagaacaagctgaaacctgagatggacgagaagggcaacctgaccaccgccggctttgcctgctctcagtgtggccagcccctgttcgtgtacaagctggagcaggtgtctgagaagggcaaggcttacaccaactacttcggacggtgcaatgtggccgagcacgaaaagctgatcctgctggcccagctgaagcccgagaaggatagcgacgaagccgtgacatatagcctgggaaagtttgggcagagggccctggatttctacagcattcatgtgaccaaggagtccacccaccccgtgaagcccctggcccagatcgccggaaacagatacgcctccggacctgtgggaaaggccctgagcgacgcatgtatgggcacaatcgcctccttcctgtctaagtaccaggacatcatcatcgaacaccagaaggtggtgaagggcaaccagaagagactggagagcctgcgggagctggccggcaaggaaaacctggaataccctagcgtgaccctgccacctcagcctcacaccaaggagggcgttgatgcctacaacgaagtgatcgcccgggtgcgaatgtgggtgaacctgaacctgtggcagaagctgaagctaagcagagatgatgccaagcctctgctgagactgaagggattcccttcctttcctctggtcgagagacaggccaacgaagtggactggtgggacatggtgtgtaacgtgaagaagctgatcaacgagaaaaaggaggatggcaaggtgttttggcagaatctggctggctacaagagacaggaagccctgagaccatacctgagcagcgaggaagatcggaagaagggaaagaaattcgctcggtaccagctgggcgacctgctgctgcacctggaaaagaagcacggcgaggactggggaaaggtgtacgacgaggcctgggagcggattgacaagaaagtggaaggcctgagcaagcacatcaagctggaagaggaacggagaagcgaggacgcccagagcaaggccgccctgaccgactggctgcgggctaaggccagcttcgtgatcgagggcctgaaggaggccgacaaggacgagttctgcagatgcgagctgaagctgcagaagtggtacggggacctgcggggaaagcccttcgccatcgaagccgagaacagcatcctggacatcagcggcttcagcaagcagtacaactgtgccttcatctggcagaaggacggcgtgaagaagctgaacctgtacctgatcatcaactacttcaagggcggcaagctgcggttcaagaagatcaaacctgaagccttcgaagccaacagattctacaccgtgatcaacaaaaagagcggcgagatcgtgcccatggaggtgaacttcaacttcgacgaccccaacctgatcatcctgcctctggcctttggcaagagacagggcagagaattcatctggaacgacctgctgtccctggaaaccggcagcctgaagctggccaacggaagagtgatcgagaagacactgtacaacagaagaacccggcaggatgagcctgccctgttcgtggccctgaccttcgagcggcgggaggtcctggactcctccaatatcaaaccaatgaacctgatcggcgtggcaagaggcgaaaacatccccgccgtgatcgccctgaccgaccccgagggctgcccactgagccggtttaaggatagcctgggaaacccaacccacatcctgagaatcggcgagagctataaggagaagcagcggaccatccaggccaagaaggaggtggagcagcggagagccggcggctacagccggaagtacgccagcaaagccaagaatctggcagacgatatggtgagaaacaccgctagagatctgctgtactacgccgtgacccaggatgccatgctgatcttcgccaacctgagccggggcttcggccggcagggcaagcggaccttcatggccgagagacagtacacacggatggaggactggctgaccgccaagctggcctacgagggcctgagcaagacctacctgtccaagacactggcccagtacacctccaagacatgcagcaactgtgggtttaccatcaccagcgccgactacgacagggtgctggagaagctgaagaagacagcaacaggctggatgaccacaattaacggcaaggagctgaaggtggagggccagattacctactacaacagatacaagagacagaacgtagtcaaggacctgtccgtcgagctggatagactgagcgaagaatctgtgaacaacgacatctcctcctggacaaagggcagaagcggagaagctctgagcctcctgaagaaaagattctcccatagacccgtgcaggagaagttcgtgtgcctgaactgcggcttcgagacacacgcagccgagcaagccgccctgaacatcgccagatcctggctgttcctgcggagccaggagtacaagaaataccagacaaacaagacaaccggcaacaccgataagagagccttcgtcgagacctggcagtccttttaccggaagaagcttaaggaggtgtggaaacctgccgtgcggtctggcggatctggcggaggctccaccagccccaagaaaaagagaaaagtctaagctgccttctgcggggcttgccttctggccatgcccttcttctctcccttgcacctgtacctcttggtctttgaataaagcctgagtaggaaggctagcaaaaaaaaaaaaaaaaaaaaaaaaaaaaaaaaaaaaaaaaaaaaaaaaaaaaaaaaaaaaaaaaaaaaaaaaaaaaaaaa

SEQ ID NO: 12314 - RNA, 5785 nt, synthetic construct
  source 1..5785: mol_type = other RNA
aggaaataagagagaaaagaagagtaagaagaaatataagagccaccatggcccctaagaagaagcgtaaagtgagccggatggaacgcctcgtctacgaggtgcggcagaagtgcagaaacatcgaggacatctgcatctcctgcggatctctgaacgtgaccctggagcacccactgttcatcggcggcatgtgccagaactgtaaaaactgttttctggagtgtgcctatcaatacgacgatgacggctaccagagctactgcaccatctgttgcggcggaagagaggtgctgatgtgtggaaataacaactgctgccggtgcttctgcgtggaatgcgtggacctgctggtgggccccggcgccgcccaggccgctattaaggaagatccttggaactgctacatgtgcggccacaagggcacatacggcctgctgagacggagagaggactggcctagcagactgcagatgttcttcgccaataaccacgaccaggagttcgacccccctaaggtgtaccctcccgtccccgccgagaagagaaagcccatccgggtcctgagcctgttcgatggcatcgccaccggtctgctggtgctgaaggacctgggcatccaggtggataggtacattgcctccgaggtgtgcgaggactccatcaccgtgggaatggtgcgtcatcagggcaagatcatgtacgtgggcgacgtgcggagcgtgacacagaagcatatccaggagtggggccctttcgacctggtgatcggcggcagcccttgcaatgacctgagcatcgtgaacccagcccggaagggcctgtacgagggaaccggcagactgttcttcgagttttacagactgctgcacgacgcccggcctaaggaaggcgacgaccggcccttcttttggctgttcgagaatgtggtggccatgggagtcagcgacaagcgggatattagccggttcctggagagcaaccccgtgatgatcgatgccaaggaagtgagcgccgcccaccgggccagatacttctggggcaatctgcctggcatgaacagacccctggccagcaccgtgaacgacaagctggagctgcaggagtgcctggagcacggccggatcgccaagttcagcaaggtgagaaccatcaccacccgaagcaacagcatcaaacaaggcaaggaccagcactttcctgtgttcatgaacgagaaggaggacatcctgtggtgtaccgagatggagagagtgttcgggttcccagtccactacacagatgtcagcaacatgtctagactggccagacagagactgctgggaagaagctggtccgtccctgtgatcagacacctgttcgcccctctgaaggagtacttcgcctgcgtgagcagcggcaacagcaacgccaacagccggggccccagcttctctagcggcctggtgccactgtccctgagagggagccacatgggccccatggagatctacaaaaccgtgagcgcctggaagcggcagcctgtgcgcgtgctgagcctgtttcggaatatcgataaagtcctgaaaagcctgggattcctggagagcggctctggctccggcggtggcaccctgaagtacgtggaggatgtgacaaacgtggtcagacgggatgtggagaagtggggccccttcgatctggtgtacggcagcacccaacccctgggcagctcttgtgaccggtgccctggctggtacatgtttcagttccaccggatcctgcagtacgccctgccgagacaggagtcccagcggccattcttttggattttcatggacaacttgctgctgaccgaggatgaccaggaaactaccactcggttcctgcagaccgaagccgtgaccctgcaggacgtgagaggccgggactaccagaacgccatgcgggtgtggtccaacatccctggactgaaaagcaagcacgcacctctgacccctaaagaagaggagtacctgcaggcccaggtgcggagcagaagcaagctggacgcccctaaggtggatctgctggtgaagaattgcctcctgcccctgagagagtacttcaagtatttcagccagaatagtctgcccctgggaggcagcggcggcggcgcccaggagagcgtgatgttcagcgacgtgagcatcgacttcagccaggaggagtgggagtgcctgaacgacgaccagagggacctgtacagggacgtgatgctggagaactacagccacctggtgagcatgggccacagcgtgagcaagcccgacgtgatcagcttcctggagcagggcaaggagccctggctggtggacagggagctgaccagggaccagtggcccgtgctggagagcaggggcggcccaagcagcggcgcccctcctcccagcggcggcagcccagccggctccccaacctctaccgaggagggcacctctgagtccgccacccccgagagcggccctggcacctccaccgagcccagcgagggcagcgcacccggcagccctgccggcagccccacctccacagaggagggaaccagcaccgagcccagcgaaggcagcgccccaggcaccagcaccgagcctagtgagcaggagattaaacggatcaacaagatcagaagaagacttgtgaaagacagcaacaccaagaaggccggcaagacaggccccatgaaaaccctgctggttagagtgatgacacccgatctgagagagcggctggaaaacctgagaaagaagcctgaaaatatcccccagcccatcagcaatacatctagagccaacctgaataagctgctgaccgattacaccgaaatgaagaaggcgatcctgcatgtgtactgggaagagttccagaaggaccctgtgggcctgatgagccgggtggcccagcctgccagcaagaagatcgatcagaacaagctgaaacctgagatggacgagaagggcaacctgaccaccgccggctttgcctgctctcagtgtggccagcccctgttcgtgtacaagctggagcaggtgtctgagaagggcaaggcttacaccaactacttcggacggtgcaatgtggccgagcacgaaaagctgatcctgctggcccagctgaagcccgagaaggatagcgacgaagccgtgacatatagcctgggaaagtttgggcagagggccctggatttctacagcattcatgtgaccaaggagtccacccaccccgtgaagcccctggcccagatcgccggaaacagatacgcctccggacctgtgggaaaggccctgagcgacgcatgtatgggcacaatcgcctccttcctgtctaagtaccaggacatcatcatcgaacaccagaaggtggtgaagggcaaccagaagagactggagagcctgcgggagctggccggcaaggaaaacctggaataccctagcgtgaccctgccacctcagcctcacaccaaggagggcgttgatgcctacaacgaagtgatcgcccgggtgcgaatgtgggtgaacctgaacctgtggcagaagctgaagctaagcagagatgatgccaagcctctgctgagactgaagggattcccttcctttcctctggtcgagagacaggccaacgaagtggactggtgggacatggtgtgtaacgtgaagaagctgatcaacgagaaaaaggaggatggcaaggtgttttggcagaatctggctggctacaagagacaggaagccctgagaccatacctgagcagcgaggaagatcggaagaagggaaagaaattcgctcggtaccagctgggcgacctgctgctgcacctggaaaagaagcacggcgaggactggggaaaggtgtacgacgaggcctgggagcggattgacaagaaagtggaaggcctgagcaagcacatcaagctggaagaggaacggagaagcgaggacgcccagagcaaggccgccctgaccgactggctgcgggctaaggccagcttcgtgatcgagggcctgaaggaggccgacaaggacgagttctgcagatgcgagctgaagctgcagaagtggtacggggacctgcggggaaagcccttcgccatcgaagccgagaacagcatcctggacatcagcggcttcagcaagcagtacaactgtgccttcatctggcagaaggacggcgtgaagaagctgaacctgtacctgatcatcaactacttcaagggcggcaagctgcggttcaagaagatcaaacctgaagccttcgaagccaacagattctacaccgtgatcaacaaaaagagcggcgagatcgtgcccatggaggtgaacttcaacttcgacgaccccaacctgatcatcctgcctctggcctttggcaagagacagggcagagaattcatctggaacgacctgctgtccctggaaaccggcagcctgaagctggccaacggaagagtgatcgagaagacactgtacaacagaagaacccggcaggatgagcctgccctgttcgtggccctgaccttcgagcggcgggaggtcctggactcctccaatatcaaaccaatgaacctgatcggcgtggcaagaggcgaaaacatccccgccgtgatcgccctgaccgaccccgagggctgcccactgagccggtttaaggatagcctgggaaacccaacccacatcctgagaatcggcgagagctataaggagaagcagcggaccatccaggccaagaaggaggtggagcagcggagagccggcggctacagccggaagtacgccagcaaagccaagaatctggcagacgatatggtgagaaacaccgctagagatctgctgtactacgccgtgacccaggatgccatgctgatcttcgccaacctgagccggggcttcggccggcagggcaagcggaccttcatggccgagagacagtacacacggatggaggactggctgaccgccaagctggcctacgagggcctgagcaagacctacctgtccaagacactggcccagtacacctccaagacatgcagcaactgtgggtttaccatcaccagcgccgactacgacagggtgctggagaagctgaagaagacagcaacaggctggatgaccacaattaacggcaaggagctgaaggtggagggccagattacctactacaacagatacaagagacagaacgtagtcaaggacctgtccgtcgagctggatagactgagcgaagaatctgtgaacaacgacatctcctcctggacaaagggcagaagcggagaagctctgagcctcctgaagaaaagattctcccatagacccgtgcaggagaagttcgtgtgcctgaactgcggcttcgagacacacgcagccgagcaagccgccctgaacatcgccagatcctggctgttcctgcggagccaggagtacaagaaataccagacaaacaagacaaccggcaacaccgataagagagccttcgtcgagacctggcagtccttttaccggaagaagcttaaggaggtgtggaaacctgccgtgcggtctggcggatctggcggaggctccaccagccccaagaaaaagagaaaagtctaagctgccttctgcggggcttgccttctggccatgcccttcttctctcccttgcacctgtacctcttggtctttgaataaagcctgagtaggaaggctagcaaaaaaaaaaaaaaaaaaaaaaaaaaaaaaaaaaaaaaaaaaaaaaaaaaaaaaaaaaaaaaaaaaaaaaaaaaaaaaaa

SEQ ID NO: 12315 - RNA, 5785 nt, synthetic construct
  source 1..5785: mol_type = other RNA
aggaaataagagagaaaagaagagtaagaagaaatataagagccaccatggcccctaagaagaagcgtaaagtgagccggatggaacgcctcgtctacgaggtgcggcagaagtgcagaaacatcgaggacatctgcatctcctgcggatctctgaacgtgaccctggagcacccactgttcatcggcggcatgtgccagaactgtaaaaactgttttctggagtgtgcctatcaatacgacgatgacggctaccagagctactgcaccatctgttgcggcggaagagaggtgctgatgtgtggaaataacaactgctgccggtgcttctgcgtggaatgcgtggacctgctggtgggccccggcgccgcccaggccgctattaaggaagatccttggaactgctacatgtgcggccacaagggcacatacggcctgctgagacggagagaggactggcctagcagactgcagatgttcttcgccaataaccacgaccaggagttcgacccccctaaggtgtaccctcccgtccccgccgagaagagaaagcccatccgggtcctgagcctgttcgatggcatcgccaccggtctgctggtgctgaaggacctgggcatccaggtggataggtacattgcctccgaggtgtgcgaggactccatcaccgtgggaatggtgcgtcatcagggcaagatcatgtacgtgggcgacgtgcggagcgtgacacagaagcatatccaggagtggggccctttcgacctggtgatcggcggcagcccttgcaatgacctgagcatcgtgaacccagcccggaagggcctgtacgagggaaccggcagactgttcttcgagttttacagactgctgcacgacgcccggcctaaggaaggcgacgaccggcccttcttttggctgttcgagaatgtggtggccatgggagtcagcgacaagcgggatattagccggttcctggagagcaaccccgtgatgatcgatgccaaggaagtgagcgccgcccaccgggccagatacttctggggcaatctgcctggcatgaacagacccctggccagcaccgtgaacgacaagctggagctgcaggagtgcctggagcacggccggatcgccaagttcagcaaggtgagaaccatcaccacccgaagcaacagcatcaaacaaggcaaggaccagcactttcctgtgttcatgaacgagaaggaggacatcctgtggtgtaccgagatggagagagtgttcgggttcccagtccactacacagatgtcagcaacatgtctagactggccagacagagactgctgggaagaagctggtccgtccctgtgatcagacacctgttcgcccctctgaaggagtacttcgcctgcgtgagcagcggcaacagcaacgccaacagccggggccccagcttctctagcggcctggtgccactgtccctgagagggagccacatgggccccatggagatctacaaaaccgtgagcgcctggaagcggcagcctgtgcgcgtgctgagcctgtttcggaatatcgataaagtcctgaaaagcctgggattcctggagagcggctctggctccggcggtggcaccctgaagtacgtggaggatgtgacaaacgtggtcagacgggatgtggagaagtggggccccttcgatctggtgtacggcagcacccaacccctgggcagctcttgtgaccggtgccctggctggtacatgtttcagttccaccggatcctgcagtacgccctgccgagacaggagtcccagcggccattcttttggattttcatggacaacttgctgctgaccgaggatgaccaggaaactaccactcggttcctgcagaccgaagccgtgaccctgcaggacgtgagaggccgggactaccagaacgccatgcgggtgtggtccaacatccctggactgaaaagcaagcacgcacctctgacccctaaagaagaggagtacctgcaggcccaggtgcggagcagaagcaagctggacgcccctaaggtggatctgctggtgaagaattgcctcctgcccctgagagagtacttcaagtatttcagccagaatagtctgcccctgggaggcagcggcggcggcatgatcgagtaccagatccccgtgagcttcaaggacgtggtggtgggcttcacccaggaggagtggcaccagctgagccccgcccagagggccctgtacagggacgtgatgctggagacctacagcaacctggtgagcgtgggctacgagggcaccaagcccgacgtgatcctgaggctggagcaggaggaggccccctggatcggcgaggccgcctgcctgggctgccactgctggggcatcggcggcccaagcagcggcgcccctcctcccagcggcggcagcccagccggctccccaacctctaccgaggagggcacctctgagtccgccacccccgagagcggccctggcacctccaccgagcccagcgagggcagcgcacccggcagccctgccggcagccccacctccacagaggagggaaccagcaccgagcccagcgaaggcagcgccccaggcaccagcaccgagcctagtgagcaggagattaaacggatcaacaagatcagaagaagacttgtgaaagacagcaacaccaagaaggccggcaagacaggccccatgaaaaccctgctggttagagtgatgacacccgatctgagagagcggctggaaaacctgagaaagaagcctgaaaatatcccccagcccatcagcaatacatctagagccaacctgaataagctgctgaccgattacaccgaaatgaagaaggcgatcctgcatgtgtactgggaagagttccagaaggaccctgtgggcctgatgagccgggtggcccagcctgccagcaagaagatcgatcagaacaagctgaaacctgagatggacgagaagggcaacctgaccaccgccggctttgcctgctctcagtgtggccagcccctgttcgtgtacaagctggagcaggtgtctgagaagggcaaggcttacaccaactacttcggacggtgcaatgtggccgagcacgaaaagctgatcctgctggcccagctgaagcccgagaaggatagcgacgaagccgtgacatatagcctgggaaagtttgggcagagggccctggatttctacagcattcatgtgaccaaggagtccacccaccccgtgaagcccctggcccagatcgccggaaacagatacgcctccggacctgtgggaaaggccctgagcgacgcatgtatgggcacaatcgcctccttcctgtctaagtaccaggacatcatcatcgaacaccagaaggtggtgaagggcaaccagaagagactggagagcctgcgggagctggccggcaaggaaaacctggaataccctagcgtgaccctgccacctcagcctcacaccaaggagggcgttgatgcctacaacgaagtgatcgcccgggtgcgaatgtgggtgaacctgaacctgtggcagaagctgaagctaagcagagatgatgccaagcctctgctgagactgaagggattcccttcctttcctctggtcgagagacaggccaacgaagtggactggtgggacatggtgtgtaacgtgaagaagctgatcaacgagaaaaaggaggatggcaaggtgttttggcagaatctggctggctacaagagacaggaagccctgagaccatacctgagcagcgaggaagatcggaagaagggaaagaaattcgctcggtaccagctgggcgacctgctgctgcacctggaaaagaagcacggcgaggactggggaaaggtgtacgacgaggcctgggagcggattgacaagaaagtggaaggcctgagcaagcacatcaagctggaagaggaacggagaagcgaggacgcccagagcaaggccgccctgaccgactggctgcgggctaaggccagcttcgtgatcgagggcctgaaggaggccgacaaggacgagttctgcagatgcgagctgaagctgcagaagtggtacggggacctgcggggaaagcccttcgccatcgaagccgagaacagcatcctggacatcagcggcttcagcaagcagtacaactgtgccttcatctggcagaaggacggcgtgaagaagctgaacctgtacctgatcatcaactacttcaagggcggcaagctgcggttcaagaagatcaaacctgaagccttcgaagccaacagattctacaccgtgatcaacaaaaagagcggcgagatcgtgcccatggaggtgaacttcaacttcgacgaccccaacctgatcatcctgcctctggcctttggcaagagacagggcagagaattcatctggaacgacctgctgtccctggaaaccggcagcctgaagctggccaacggaagagtgatcgagaagacactgtacaacagaagaacccggcaggatgagcctgccctgttcgtggccctgaccttcgagcggcgggaggtcctggactcctccaatatcaaaccaatgaacctgatcggcgtggcaagaggcgaaaacatccccgccgtgatcgccctgaccgaccccgagggctgcccactgagccggtttaaggatagcctgggaaacccaacccacatcctgagaatcggcgagagctataaggagaagcagcggaccatccaggccaagaaggaggtggagcagcggagagccggcggctacagccggaagtacgccagcaaagccaagaatctggcagacgatatggtgagaaacaccgctagagatctgctgtactacgccgtgacccaggatgccatgctgatcttcgccaacctgagccggggcttcggccggcagggcaagcggaccttcatggccgagagacagtacacacggatggaggactggctgaccgccaagctggcctacgagggcctgagcaagacctacctgtccaagacactggcccagtacacctccaagacatgcagcaactgtgggtttaccatcaccagcgccgactacgacagggtgctggagaagctgaagaagacagcaacaggctggatgaccacaattaacggcaaggagctgaaggtggagggccagattacctactacaacagatacaagagacagaacgtagtcaaggacctgtccgtcgagctggatagactgagcgaagaatctgtgaacaacgacatctcctcctggacaaagggcagaagcggagaagctctgagcctcctgaagaaaagattctcccatagacccgtgcaggagaagttcgtgtgcctgaactgcggcttcgagacacacgcagccgagcaagccgccctgaacatcgccagatcctggctgttcctgcggagccaggagtacaagaaataccagacaaacaagacaaccggcaacaccgataagagagccttcgtcgagacctggcagtccttttaccggaagaagcttaaggaggtgtggaaacctgccgtgcggtctggcggatctggcggaggctccaccagccccaagaaaaagagaaaagtctaagctgccttctgcggggcttgccttctggccatgcccttcttctctcccttgcacctgtacctcttggtctttgaataaagcctgagtaggaaggctagcaaaaaaaaaaaaaaaaaaaaaaaaaaaaaaaaaaaaaaaaaaaaaaaaaaaaaaaaaaaaaaaaaaaaaaaaaaaaaaaa

SEQ ID NO: 12316 - RNA, 5785 nt, synthetic construct
  source 1..5785: mol_type = other RNA
aggaaataagagagaaaagaagagtaagaagaaatataagagccaccatggcccctaagaagaagcgtaaagtgagccggatggaacgcctcgtctacgaggtgcggcagaagtgcagaaacatcgaggacatctgcatctcctgcggatctctgaacgtgaccctggagcacccactgttcatcggcggcatgtgccagaactgtaaaaactgttttctggagtgtgcctatcaatacgacgatgacggctaccagagctactgcaccatctgttgcggcggaagagaggtgctgatgtgtggaaataacaactgctgccggtgcttctgcgtggaatgcgtggacctgctggtgggccccggcgccgcccaggccgctattaaggaagatccttggaactgctacatgtgcggccacaagggcacatacggcctgctgagacggagagaggactggcctagcagactgcagatgttcttcgccaataaccacgaccaggagttcgacccccctaaggtgtaccctcccgtccccgccgagaagagaaagcccatccgggtcctgagcctgttcgatggcatcgccaccggtctgctggtgctgaaggacctgggcatccaggtggataggtacattgcctccgaggtgtgcgaggactccatcaccgtgggaatggtgcgtcatcagggcaagatcatgtacgtgggcgacgtgcggagcgtgacacagaagcatatccaggagtggggccctttcgacctggtgatcggcggcagcccttgcaatgacctgagcatcgtgaacccagcccggaagggcctgtacgagggaaccggcagactgttcttcgagttttacagactgctgcacgacgcccggcctaaggaaggcgacgaccggcccttcttttggctgttcgagaatgtggtggccatgggagtcagcgacaagcgggatattagccggttcctggagagcaaccccgtgatgatcgatgccaaggaagtgagcgccgcccaccgggccagatacttctggggcaatctgcctggcatgaacagacccctggccagcaccgtgaacgacaagctggagctgcaggagtgcctggagcacggccggatcgccaagttcagcaaggtgagaaccatcaccacccgaagcaacagcatcaaacaaggcaaggaccagcactttcctgtgttcatgaacgagaaggaggacatcctgtggtgtaccgagatggagagagtgttcgggttcccagtccactacacagatgtcagcaacatgtctagactggccagacagagactgctgggaagaagctggtccgtccctgtgatcagacacctgttcgcccctctgaaggagtacttcgcctgcgtgagcagcggcaacagcaacgccaacagccggggccccagcttctctagcggcctggtgccactgtccctgagagggagccacatgggccccatggagatctacaaaaccgtgagcgcctggaagcggcagcctgtgcgcgtgctgagcctgtttcggaatatcgataaagtcctgaaaagcctgggattcctggagagcggctctggctccggcggtggcaccctgaagtacgtggaggatgtgacaaacgtggtcagacgggatgtggagaagtggggccccttcgatctggtgtacggcagcacccaacccctgggcagctcttgtgaccggtgccctggctggtacatgtttcagttccaccggatcctgcagtacgccctgccgagacaggagtcccagcggccattcttttggattttcatggacaacttgctgctgaccgaggatgaccaggaaactaccactcggttcctgcagaccgaagccgtgaccctgcaggacgtgagaggccgggactaccagaacgccatgcgggtgtggtccaacatccctggactgaaaagcaagcacgcacctctgacccctaaagaagaggagtacctgcaggcccaggtgcggagcagaagcaagctggacgcccctaaggtggatctgctggtgaagaattgcctcctgcccctgagagagtacttcaagtatttcagccagaatagtctgcccctgggaggcagcggcggcggcgtgcaggagcccgtgaccttcaaggacgtggccgtggacttcacccaggaggagtggggccagctggacctggtgcagaggaccctgtacagggacgtgatgctggagacctacggccacctgctgagcgtgggcaaccagatcgccaagcccgaggtgatcagcctgctggagcagggcgaggagccctggagcgtggagcaggcctgcccccagaggacctgccccgagtgggtgaggaacggcggcccaagcagcggcgcccctcctcccagcggcggcagcccagccggctccccaacctctaccgaggagggcacctctgagtccgccacccccgagagcggccctggcacctccaccgagcccagcgagggcagcgcacccggcagccctgccggcagccccacctccacagaggagggaaccagcaccgagcccagcgaaggcagcgccccaggcaccagcaccgagcctagtgagcaggagattaaacggatcaacaagatcagaagaagacttgtgaaagacagcaacaccaagaaggccggcaagacaggccccatgaaaaccctgctggttagagtgatgacacccgatctgagagagcggctggaaaacctgagaaagaagcctgaaaatatcccccagcccatcagcaatacatctagagccaacctgaataagctgctgaccgattacaccgaaatgaagaaggcgatcctgcatgtgtactgggaagagttccagaaggaccctgtgggcctgatgagccgggtggcccagcctgccagcaagaagatcgatcagaacaagctgaaacctgagatggacgagaagggcaacctgaccaccgccggctttgcctgctctcagtgtggccagcccctgttcgtgtacaagctggagcaggtgtctgagaagggcaaggcttacaccaactacttcggacggtgcaatgtggccgagcacgaaaagctgatcctgctggcccagctgaagcccgagaaggatagcgacgaagccgtgacatatagcctgggaaagtttgggcagagggccctggatttctacagcattcatgtgaccaaggagtccacccaccccgtgaagcccctggcccagatcgccggaaacagatacgcctccggacctgtgggaaaggccctgagcgacgcatgtatgggcacaatcgcctccttcctgtctaagtaccaggacatcatcatcgaacaccagaaggtggtgaagggcaaccagaagagactggagagcctgcgggagctggccggcaaggaaaacctggaataccctagcgtgaccctgccacctcagcctcacaccaaggagggcgttgatgcctacaacgaagtgatcgcccgggtgcgaatgtgggtgaacctgaacctgtggcagaagctgaagctaagcagagatgatgccaagcctctgctgagactgaagggattcccttcctttcctctggtcgagagacaggccaacgaagtggactggtgggacatggtgtgtaacgtgaagaagctgatcaacgagaaaaaggaggatggcaaggtgttttggcagaatctggctggctacaagagacaggaagccctgagaccatacctgagcagcgaggaagatcggaagaagggaaagaaattcgctcggtaccagctgggcgacctgctgctgcacctggaaaagaagcacggcgaggactggggaaaggtgtacgacgaggcctgggagcggattgacaagaaagtggaaggcctgagcaagcacatcaagctggaagaggaacggagaagcgaggacgcccagagcaaggccgccctgaccgactggctgcgggctaaggccagcttcgtgatcgagggcctgaaggaggccgacaaggacgagttctgcagatgcgagctgaagctgcagaagtggtacggggacctgcggggaaagcccttcgccatcgaagccgagaacagcatcctggacatcagcggcttcagcaagcagtacaactgtgccttcatctggcagaaggacggcgtgaagaagctgaacctgtacctgatcatcaactacttcaagggcggcaagctgcggttcaagaagatcaaacctgaagccttcgaagccaacagattctacaccgtgatcaacaaaaagagcggcgagatcgtgcccatggaggtgaacttcaacttcgacgaccccaacctgatcatcctgcctctggcctttggcaagagacagggcagagaattcatctggaacgacctgctgtccctggaaaccggcagcctgaagctggccaacggaagagtgatcgagaagacactgtacaacagaagaacccggcaggatgagcctgccctgttcgtggccctgaccttcgagcggcgggaggtcctggactcctccaatatcaaaccaatgaacctgatcggcgtggcaagaggcgaaaacatccccgccgtgatcgccctgaccgaccccgagggctgcccactgagccggtttaaggatagcctgggaaacccaacccacatcctgagaatcggcgagagctataaggagaagcagcggaccatccaggccaagaaggaggtggagcagcggagagccggcggctacagccggaagtacgccagcaaagccaagaatctggcagacgatatggtgagaaacaccgctagagatctgctgtactacgccgtgacccaggatgccatgctgatcttcgccaacctgagccggggcttcggccggcagggcaagcggaccttcatggccgagagacagtacacacggatggaggactggctgaccgccaagctggcctacgagggcctgagcaagacctacctgtccaagacactggcccagtacacctccaagacatgcagcaactgtgggtttaccatcaccagcgccgactacgacagggtgctggagaagctgaagaagacagcaacaggctggatgaccacaattaacggcaaggagctgaaggtggagggccagattacctactacaacagatacaagagacagaacgtagtcaaggacctgtccgtcgagctggatagactgagcgaagaatctgtgaacaacgacatctcctcctggacaaagggcagaagcggagaagctctgagcctcctgaagaaaagattctcccatagacccgtgcaggagaagttcgtgtgcctgaactgcggcttcgagacacacgcagccgagcaagccgccctgaacatcgccagatcctggctgttcctgcggagccaggagtacaagaaataccagacaaacaagacaaccggcaacaccgataagagagccttcgtcgagacctggcagtccttttaccggaagaagcttaaggaggtgtggaaacctgccgtgcggtctggcggatctggcggaggctccaccagccccaagaaaaagagaaaagtctaagctgccttctgcggggcttgccttctggccatgcccttcttctctcccttgcacctgtacctcttggtctttgaataaagcctgagtaggaaggctagcaaaaaaaaaaaaaaaaaaaaaaaaaaaaaaaaaaaaaaaaaaaaaaaaaaaaaaaaaaaaaaaaaaaaaaaaaaaaaaaa

SEQ ID NO: 12317 - RNA, 5785 nt, synthetic construct
  source 1..5785: mol_type = other RNA
aggaaataagagagaaaagaagagtaagaagaaatataagagccaccatggcccctaagaagaagcgtaaagtgagccggatggaacgcctcgtctacgaggtgcggcagaagtgcagaaacatcgaggacatctgcatctcctgcggatctctgaacgtgaccctggagcacccactgttcatcggcggcatgtgccagaactgtaaaaactgttttctggagtgtgcctatcaatacgacgatgacggctaccagagctactgcaccatctgttgcggcggaagagaggtgctgatgtgtggaaataacaactgctgccggtgcttctgcgtggaatgcgtggacctgctggtgggccccggcgccgcccaggccgctattaaggaagatccttggaactgctacatgtgcggccacaagggcacatacggcctgctgagacggagagaggactggcctagcagactgcagatgttcttcgccaataaccacgaccaggagttcgacccccctaaggtgtaccctcccgtccccgccgagaagagaaagcccatccgggtcctgagcctgttcgatggcatcgccaccggtctgctggtgctgaaggacctgggcatccaggtggataggtacattgcctccgaggtgtgcgaggactccatcaccgtgggaatggtgcgtcatcagggcaagatcatgtacgtgggcgacgtgcggagcgtgacacagaagcatatccaggagtggggccctttcgacctggtgatcggcggcagcccttgcaatgacctgagcatcgtgaacccagcccggaagggcctgtacgagggaaccggcagactgttcttcgagttttacagactgctgcacgacgcccggcctaaggaaggcgacgaccggcccttcttttggctgttcgagaatgtggtggccatgggagtcagcgacaagcgggatattagccggttcctggagagcaaccccgtgatgatcgatgccaaggaagtgagcgccgcccaccgggccagatacttctggggcaatctgcctggcatgaacagacccctggccagcaccgtgaacgacaagctggagctgcaggagtgcctggagcacggccggatcgccaagttcagcaaggtgagaaccatcaccacccgaagcaacagcatcaaacaaggcaaggaccagcactttcctgtgttcatgaacgagaaggaggacatcctgtggtgtaccgagatggagagagtgttcgggttcccagtccactacacagatgtcagcaacatgtctagactggccagacagagactgctgggaagaagctggtccgtccctgtgatcagacacctgttcgcccctctgaaggagtacttcgcctgcgtgagcagcggcaacagcaacgccaacagccggggccccagcttctctagcggcctggtgccactgtccctgagagggagccacatgggccccatggagatctacaaaaccgtgagcgcctggaagcggcagcctgtgcgcgtgctgagcctgtttcggaatatcgataaagtcctgaaaagcctgggattcctggagagcggctctggctccggcggtggcaccctgaagtacgtggaggatgtgacaaacgtggtcagacgggatgtggagaagtggggccccttcgatctggtgtacggcagcacccaacccctgggcagctcttgtgaccggtgccctggctggtacatgtttcagttccaccggatcctgcagtacgccctgccgagacaggagtcccagcggccattcttttggattttcatggacaacttgctgctgaccgaggatgaccaggaaactaccactcggttcctgcagaccgaagccgtgaccctgcaggacgtgagaggccgggactaccagaacgccatgcgggtgtggtccaacatccctggactgaaaagcaagcacgcacctctgacccctaaagaagaggagtacctgcaggcccaggtgcggagcagaagcaagctggacgcccctaaggtggatctgctggtgaagaattgcctcctgcccctgagagagtacttcaagtatttcagccagaatagtctgcccctgggaggcagcggcggcggcatgatcaactaccagacccccgtgagcttcagggacgtggtggtgggcttcacccaggaggagtggcacaggctgaaccccacccagagggccctgtacagggacgtgatgctggagacctacagcaacctggtgagcgtgggctacgagggcaccaagcccgacgtgatcctgaggctggagcaggaggaggccccctggatcggcgaggccgcctgcctgggctgccactgctggggcatcggcggcccaagcagcggcgcccctcctcccagcggcggcagcccagccggctccccaacctctaccgaggagggcacctctgagtccgccacccccgagagcggccctggcacctccaccgagcccagcgagggcagcgcacccggcagccctgccggcagccccacctccacagaggagggaaccagcaccgagcccagcgaaggcagcgccccaggcaccagcaccgagcctagtgagcaggagattaaacggatcaacaagatcagaagaagacttgtgaaagacagcaacaccaagaaggccggcaagacaggccccatgaaaaccctgctggttagagtgatgacacccgatctgagagagcggctggaaaacctgagaaagaagcctgaaaatatcccccagcccatcagcaatacatctagagccaacctgaataagctgctgaccgattacaccgaaatgaagaaggcgatcctgcatgtgtactgggaagagttccagaaggaccctgtgggcctgatgagccgggtggcccagcctgccagcaagaagatcgatcagaacaagctgaaacctgagatggacgagaagggcaacctgaccaccgccggctttgcctgctctcagtgtggccagcccctgttcgtgtacaagctggagcaggtgtctgagaagggcaaggcttacaccaactacttcggacggtgcaatgtggccgagcacgaaaagctgatcctgctggcccagctgaagcccgagaaggatagcgacgaagccgtgacatatagcctgggaaagtttgggcagagggccctggatttctacagcattcatgtgaccaaggagtccacccaccccgtgaagcccctggcccagatcgccggaaacagatacgcctccggacctgtgggaaaggccctgagcgacgcatgtatgggcacaatcgcctccttcctgtctaagtaccaggacatcatcatcgaacaccagaaggtggtgaagggcaaccagaagagactggagagcctgcgggagctggccggcaaggaaaacctggaataccctagcgtgaccctgccacctcagcctcacaccaaggagggcgttgatgcctacaacgaagtgatcgcccgggtgcgaatgtgggtgaacctgaacctgtggcagaagctgaagctaagcagagatgatgccaagcctctgctgagactgaagggattcccttcctttcctctggtcgagagacaggccaacgaagtggactggtgggacatggtgtgtaacgtgaagaagctgatcaacgagaaaaaggaggatggcaaggtgttttggcagaatctggctggctacaagagacaggaagccctgagaccatacctgagcagcgaggaagatcggaagaagggaaagaaattcgctcggtaccagctgggcgacctgctgctgcacctggaaaagaagcacggcgaggactggggaaaggtgtacgacgaggcctgggagcggattgacaagaaagtggaaggcctgagcaagcacatcaagctggaagaggaacggagaagcgaggacgcccagagcaaggccgccctgaccgactggctgcgggctaaggccagcttcgtgatcgagggcctgaaggaggccgacaaggacgagttctgcagatgcgagctgaagctgcagaagtggtacggggacctgcggggaaagcccttcgccatcgaagccgagaacagcatcctggacatcagcggcttcagcaagcagtacaactgtgccttcatctggcagaaggacggcgtgaagaagctgaacctgtacctgatcatcaactacttcaagggcggcaagctgcggttcaagaagatcaaacctgaagccttcgaagccaacagattctacaccgtgatcaacaaaaagagcggcgagatcgtgcccatggaggtgaacttcaacttcgacgaccccaacctgatcatcctgcctctggcctttggcaagagacagggcagagaattcatctggaacgacctgctgtccctggaaaccggcagcctgaagctggccaacggaagagtgatcgagaagacactgtacaacagaagaacccggcaggatgagcctgccctgttcgtggccctgaccttcgagcggcgggaggtcctggactcctccaatatcaaaccaatgaacctgatcggcgtggcaagaggcgaaaacatccccgccgtgatcgccctgaccgaccccgagggctgcccactgagccggtttaaggatagcctgggaaacccaacccacatcctgagaatcggcgagagctataaggagaagcagcggaccatccaggccaagaaggaggtggagcagcggagagccggcggctacagccggaagtacgccagcaaagccaagaatctggcagacgatatggtgagaaacaccgctagagatctgctgtactacgccgtgacccaggatgccatgctgatcttcgccaacctgagccggggcttcggccggcagggcaagcggaccttcatggccgagagacagtacacacggatggaggactggctgaccgccaagctggcctacgagggcctgagcaagacctacctgtccaagacactggcccagtacacctccaagacatgcagcaactgtgggtttaccatcaccagcgccgactacgacagggtgctggagaagctgaagaagacagcaacaggctggatgaccacaattaacggcaaggagctgaaggtggagggccagattacctactacaacagatacaagagacagaacgtagtcaaggacctgtccgtcgagctggatagactgagcgaagaatctgtgaacaacgacatctcctcctggacaaagggcagaagcggagaagctctgagcctcctgaagaaaagattctcccatagacccgtgcaggagaagttcgtgtgcctgaactgcggcttcgagacacacgcagccgagcaagccgccctgaacatcgccagatcctggctgttcctgcggagccaggagtacaagaaataccagacaaacaagacaaccggcaacaccgataagagagccttcgtcgagacctggcagtccttttaccggaagaagcttaaggaggtgtggaaacctgccgtgcggtctggcggatctggcggaggctccaccagccccaagaaaaagagaaaagtctaagctgccttctgcggggcttgccttctggccatgcccttcttctctcccttgcacctgtacctcttggtctttgaataaagcctgagtaggaaggctagcaaaaaaaaaaaaaaaaaaaaaaaaaaaaaaaaaaaaaaaaaaaaaaaaaaaaaaaaaaaaaaaaaaaaaaaaaaaaaaaa

SEQ ID NO: 12318 - RNA, 5785 nt, synthetic construct
  source 1..5785: mol_type = other RNA
aggaaataagagagaaaagaagagtaagaagaaatataagagccaccatggcccctaagaagaagcgtaaagtgagccggatggaacgcctcgtctacgaggtgcggcagaagtgcagaaacatcgaggacatctgcatctcctgcggatctctgaacgtgaccctggagcacccactgttcatcggcggcatgtgccagaactgtaaaaactgttttctggagtgtgcctatcaatacgacgatgacggctaccagagctactgcaccatctgttgcggcggaagagaggtgctgatgtgtggaaataacaactgctgccggtgcttctgcgtggaatgcgtggacctgctggtgggccccggcgccgcccaggccgctattaaggaagatccttggaactgctacatgtgcggccacaagggcacatacggcctgctgagacggagagaggactggcctagcagactgcagatgttcttcgccaataaccacgaccaggagttcgacccccctaaggtgtaccctcccgtccccgccgagaagagaaagcccatccgggtcctgagcctgttcgatggcatcgccaccggtctgctggtgctgaaggacctgggcatccaggtggataggtacattgcctccgaggtgtgcgaggactccatcaccgtgggaatggtgcgtcatcagggcaagatcatgtacgtgggcgacgtgcggagcgtgacacagaagcatatccaggagtggggccctttcgacctggtgatcggcggcagcccttgcaatgacctgagcatcgtgaacccagcccggaagggcctgtacgagggaaccggcagactgttcttcgagttttacagactgctgcacgacgcccggcctaaggaaggcgacgaccggcccttcttttggctgttcgagaatgtggtggccatgggagtcagcgacaagcgggatattagccggttcctggagagcaaccccgtgatgatcgatgccaaggaagtgagcgccgcccaccgggccagatacttctggggcaatctgcctggcatgaacagacccctggccagcaccgtgaacgacaagctggagctgcaggagtgcctggagcacggccggatcgccaagttcagcaaggtgagaaccatcaccacccgaagcaacagcatcaaacaaggcaaggaccagcactttcctgtgttcatgaacgagaaggaggacatcctgtggtgtaccgagatggagagagtgttcgggttcccagtccactacacagatgtcagcaacatgtctagactggccagacagagactgctgggaagaagctggtccgtccctgtgatcagacacctgttcgcccctctgaaggagtacttcgcctgcgtgagcagcggcaacagcaacgccaacagccggggccccagcttctctagcggcctggtgccactgtccctgagagggagccacatgggccccatggagatctacaaaaccgtgagcgcctggaagcggcagcctgtgcgcgtgctgagcctgtttcggaatatcgataaagtcctgaaaagcctgggattcctggagagcggctctggctccggcggtggcaccctgaagtacgtggaggatgtgacaaacgtggtcagacgggatgtggagaagtggggccccttcgatctggtgtacggcagcacccaacccctgggcagctcttgtgaccggtgccctggctggtacatgtttcagttccaccggatcctgcagtacgccctgccgagacaggagtcccagcggccattcttttggattttcatggacaacttgctgctgaccgaggatgaccaggaaactaccactcggttcctgcagaccgaagccgtgaccctgcaggacgtgagaggccgggactaccagaacgccatgcgggtgtggtccaacatccctggactgaaaagcaagcacgcacctctgacccctaaagaagaggagtacctgcaggcccaggtgcggagcagaagcaagctggacgcccctaaggtggatctgctggtgaagaattgcctcctgcccctgagagagtacttcaagtatttcagccagaatagtctgcccctgggaggcagcggcggcggcagccaggagcccgtgaccttcgaggacgtggccgtgtacttcacccagaaccagtgggccagcctggaccccatgcagagggccctgtacctggaggtgatgctggagaactacgccaacatcaccagcctggccgccctgcccttccccaagcccgacctgatcctgcagctggagcagggcgaggccccctggggcctggacccctggacccccctggacggcgaggccctgggcggcgtgggcggcccaagcagcggcgcccctcctcccagcggcggcagcccagccggctccccaacctctaccgaggagggcacctctgagtccgccacccccgagagcggccctggcacctccaccgagcccagcgagggcagcgcacccggcagccctgccggcagccccacctccacagaggagggaaccagcaccgagcccagcgaaggcagcgccccaggcaccagcaccgagcctagtgagcaggagattaaacggatcaacaagatcagaagaagacttgtgaaagacagcaacaccaagaaggccggcaagacaggccccatgaaaaccctgctggttagagtgatgacacccgatctgagagagcggctggaaaacctgagaaagaagcctgaaaatatcccccagcccatcagcaatacatctagagccaacctgaataagctgctgaccgattacaccgaaatgaagaaggcgatcctgcatgtgtactgggaagagttccagaaggaccctgtgggcctgatgagccgggtggcccagcctgccagcaagaagatcgatcagaacaagctgaaacctgagatggacgagaagggcaacctgaccaccgccggctttgcctgctctcagtgtggccagcccctgttcgtgtacaagctggagcaggtgtctgagaagggcaaggcttacaccaactacttcggacggtgcaatgtggccgagcacgaaaagctgatcctgctggcccagctgaagcccgagaaggatagcgacgaagccgtgacatatagcctgggaaagtttgggcagagggccctggatttctacagcattcatgtgaccaaggagtccacccaccccgtgaagcccctggcccagatcgccggaaacagatacgcctccggacctgtgggaaaggccctgagcgacgcatgtatgggcacaatcgcctccttcctgtctaagtaccaggacatcatcatcgaacaccagaaggtggtgaagggcaaccagaagagactggagagcctgcgggagctggccggcaaggaaaacctggaataccctagcgtgaccctgccacctcagcctcacaccaaggagggcgttgatgcctacaacgaagtgatcgcccgggtgcgaatgtgggtgaacctgaacctgtggcagaagctgaagctaagcagagatgatgccaagcctctgctgagactgaagggattcccttcctttcctctggtcgagagacaggccaacgaagtggactggtgggacatggtgtgtaacgtgaagaagctgatcaacgagaaaaaggaggatggcaaggtgttttggcagaatctggctggctacaagagacaggaagccctgagaccatacctgagcagcgaggaagatcggaagaagggaaagaaattcgctcggtaccagctgggcgacctgctgctgcacctggaaaagaagcacggcgaggactggggaaaggtgtacgacgaggcctgggagcggattgacaagaaagtggaaggcctgagcaagcacatcaagctggaagaggaacggagaagcgaggacgcccagagcaaggccgccctgaccgactggctgcgggctaaggccagcttcgtgatcgagggcctgaaggaggccgacaaggacgagttctgcagatgcgagctgaagctgcagaagtggtacggggacctgcggggaaagcccttcgccatcgaagccgagaacagcatcctggacatcagcggcttcagcaagcagtacaactgtgccttcatctggcagaaggacggcgtgaagaagctgaacctgtacctgatcatcaactacttcaagggcggcaagctgcggttcaagaagatcaaacctgaagccttcgaagccaacagattctacaccgtgatcaacaaaaagagcggcgagatcgtgcccatggaggtgaacttcaacttcgacgaccccaacctgatcatcctgcctctggcctttggcaagagacagggcagagaattcatctggaacgacctgctgtccctggaaaccggcagcctgaagctggccaacggaagagtgatcgagaagacactgtacaacagaagaacccggcaggatgagcctgccctgttcgtggccctgaccttcgagcggcgggaggtcctggactcctccaatatcaaaccaatgaacctgatcggcgtggcaagaggcgaaaacatccccgccgtgatcgccctgaccgaccccgagggctgcccactgagccggtttaaggatagcctgggaaacccaacccacatcctgagaatcggcgagagctataaggagaagcagcggaccatccaggccaagaaggaggtggagcagcggagagccggcggctacagccggaagtacgccagcaaagccaagaatctggcagacgatatggtgagaaacaccgctagagatctgctgtactacgccgtgacccaggatgccatgctgatcttcgccaacctgagccggggcttcggccggcagggcaagcggaccttcatggccgagagacagtacacacggatggaggactggctgaccgccaagctggcctacgagggcctgagcaagacctacctgtccaagacactggcccagtacacctccaagacatgcagcaactgtgggtttaccatcaccagcgccgactacgacagggtgctggagaagctgaagaagacagcaacaggctggatgaccacaattaacggcaaggagctgaaggtggagggccagattacctactacaacagatacaagagacagaacgtagtcaaggacctgtccgtcgagctggatagactgagcgaagaatctgtgaacaacgacatctcctcctggacaaagggcagaagcggagaagctctgagcctcctgaagaaaagattctcccatagacccgtgcaggagaagttcgtgtgcctgaactgcggcttcgagacacacgcagccgagcaagccgccctgaacatcgccagatcctggctgttcctgcggagccaggagtacaagaaataccagacaaacaagacaaccggcaacaccgataagagagccttcgtcgagacctggcagtccttttaccggaagaagcttaaggaggtgtggaaacctgccgtgcggtctggcggatctggcggaggctccaccagccccaagaaaaagagaaaagtctaagctgccttctgcggggcttgccttctggccatgcccttcttctctcccttgcacctgtacctcttggtctttgaataaagcctgagtaggaaggctagcaaaaaaaaaaaaaaaaaaaaaaaaaaaaaaaaaaaaaaaaaaaaaaaaaaaaaaaaaaaaaaaaaaaaaaaaaaaaaaaa

SEQ ID NO: 12319 - RNA, 5785 nt, synthetic construct
  source 1..5785: mol_type = other RNA
aggaaataagagagaaaagaagagtaagaagaaatataagagccaccatggcccctaagaagaagcgtaaagtgagccggatggaacgcctcgtctacgaggtgcggcagaagtgcagaaacatcgaggacatctgcatctcctgcggatctctgaacgtgaccctggagcacccactgttcatcggcggcatgtgccagaactgtaaaaactgttttctggagtgtgcctatcaatacgacgatgacggctaccagagctactgcaccatctgttgcggcggaagagaggtgctgatgtgtggaaataacaactgctgccggtgcttctgcgtggaatgcgtggacctgctggtgggccccggcgccgcccaggccgctattaaggaagatccttggaactgctacatgtgcggccacaagggcacatacggcctgctgagacggagagaggactggcctagcagactgcagatgttcttcgccaataaccacgaccaggagttcgacccccctaaggtgtaccctcccgtccccgccgagaagagaaagcccatccgggtcctgagcctgttcgatggcatcgccaccggtctgctggtgctgaaggacctgggcatccaggtggataggtacattgcctccgaggtgtgcgaggactccatcaccgtgggaatggtgcgtcatcagggcaagatcatgtacgtgggcgacgtgcggagcgtgacacagaagcatatccaggagtggggccctttcgacctggtgatcggcggcagcccttgcaatgacctgagcatcgtgaacccagcccggaagggcctgtacgagggaaccggcagactgttcttcgagttttacagactgctgcacgacgcccggcctaaggaaggcgacgaccggcccttcttttggctgttcgagaatgtggtggccatgggagtcagcgacaagcgggatattagccggttcctggagagcaaccccgtgatgatcgatgccaaggaagtgagcgccgcccaccgggccagatacttctggggcaatctgcctggcatgaacagacccctggccagcaccgtgaacgacaagctggagctgcaggagtgcctggagcacggccggatcgccaagttcagcaaggtgagaaccatcaccacccgaagcaacagcatcaaacaaggcaaggaccagcactttcctgtgttcatgaacgagaaggaggacatcctgtggtgtaccgagatggagagagtgttcgggttcccagtccactacacagatgtcagcaacatgtctagactggccagacagagactgctgggaagaagctggtccgtccctgtgatcagacacctgttcgcccctctgaaggagtacttcgcctgcgtgagcagcggcaacagcaacgccaacagccggggccccagcttctctagcggcctggtgccactgtccctgagagggagccacatgggccccatggagatctacaaaaccgtgagcgcctggaagcggcagcctgtgcgcgtgctgagcctgtttcggaatatcgataaagtcctgaaaagcctgggattcctggagagcggctctggctccggcggtggcaccctgaagtacgtggaggatgtgacaaacgtggtcagacgggatgtggagaagtggggccccttcgatctggtgtacggcagcacccaacccctgggcagctcttgtgaccggtgccctggctggtacatgtttcagttccaccggatcctgcagtacgccctgccgagacaggagtcccagcggccattcttttggattttcatggacaacttgctgctgaccgaggatgaccaggaaactaccactcggttcctgcagaccgaagccgtgaccctgcaggacgtgagaggccgggactaccagaacgccatgcgggtgtggtccaacatccctggactgaaaagcaagcacgcacctctgacccctaaagaagaggagtacctgcaggcccaggtgcggagcagaagcaagctggacgcccctaaggtggatctgctggtgaagaattgcctcctgcccctgagagagtacttcaagtatttcagccagaatagtctgcccctgggaggcagcggcggcggcaggcccagggccgtgaagttcgccgacgtggccgtgtacttcagccccgaggagtggggctgcctgaggcccgcccagagggccctgtacagggacgtgatgagggagacctacggccacctgggcgccctgggcttccccggccccaagcccgccctgatcagctggatggagcaggagagcgaggcctggagccccgacgcccaggaccccgaggagggcgagagcctgggcggcgccctgggcggcccaagcagcggcgcccctcctcccagcggcggcagcccagccggctccccaacctctaccgaggagggcacctctgagtccgccacccccgagagcggccctggcacctccaccgagcccagcgagggcagcgcacccggcagccctgccggcagccccacctccacagaggagggaaccagcaccgagcccagcgaaggcagcgccccaggcaccagcaccgagcctagtgagcaggagattaaacggatcaacaagatcagaagaagacttgtgaaagacagcaacaccaagaaggccggcaagacaggccccatgaaaaccctgctggttagagtgatgacacccgatctgagagagcggctggaaaacctgagaaagaagcctgaaaatatcccccagcccatcagcaatacatctagagccaacctgaataagctgctgaccgattacaccgaaatgaagaaggcgatcctgcatgtgtactgggaagagttccagaaggaccctgtgggcctgatgagccgggtggcccagcctgccagcaagaagatcgatcagaacaagctgaaacctgagatggacgagaagggcaacctgaccaccgccggctttgcctgctctcagtgtggccagcccctgttcgtgtacaagctggagcaggtgtctgagaagggcaaggcttacaccaactacttcggacggtgcaatgtggccgagcacgaaaagctgatcctgctggcccagctgaagcccgagaaggatagcgacgaagccgtgacatatagcctgggaaagtttgggcagagggccctggatttctacagcattcatgtgaccaaggagtccacccaccccgtgaagcccctggcccagatcgccggaaacagatacgcctccggacctgtgggaaaggccctgagcgacgcatgtatgggcacaatcgcctccttcctgtctaagtaccaggacatcatcatcgaacaccagaaggtggtgaagggcaaccagaagagactggagagcctgcgggagctggccggcaaggaaaacctggaataccctagcgtgaccctgccacctcagcctcacaccaaggagggcgttgatgcctacaacgaagtgatcgcccgggtgcgaatgtgggtgaacctgaacctgtggcagaagctgaagctaagcagagatgatgccaagcctctgctgagactgaagggattcccttcctttcctctggtcgagagacaggccaacgaagtggactggtgggacatggtgtgtaacgtgaagaagctgatcaacgagaaaaaggaggatggcaaggtgttttggcagaatctggctggctacaagagacaggaagccctgagaccatacctgagcagcgaggaagatcggaagaagggaaagaaattcgctcggtaccagctgggcgacctgctgctgcacctggaaaagaagcacggcgaggactggggaaaggtgtacgacgaggcctgggagcggattgacaagaaagtggaaggcctgagcaagcacatcaagctggaagaggaacggagaagcgaggacgcccagagcaaggccgccctgaccgactggctgcgggctaaggccagcttcgtgatcgagggcctgaaggaggccgacaaggacgagttctgcagatgcgagctgaagctgcagaagtggtacggggacctgcggggaaagcccttcgccatcgaagccgagaacagcatcctggacatcagcggcttcagcaagcagtacaactgtgccttcatctggcagaaggacggcgtgaagaagctgaacctgtacctgatcatcaactacttcaagggcggcaagctgcggttcaagaagatcaaacctgaagccttcgaagccaacagattctacaccgtgatcaacaaaaagagcggcgagatcgtgcccatggaggtgaacttcaacttcgacgaccccaacctgatcatcctgcctctggcctttggcaagagacagggcagagaattcatctggaacgacctgctgtccctggaaaccggcagcctgaagctggccaacggaagagtgatcgagaagacactgtacaacagaagaacccggcaggatgagcctgccctgttcgtggccctgaccttcgagcggcgggaggtcctggactcctccaatatcaaaccaatgaacctgatcggcgtggcaagaggcgaaaacatccccgccgtgatcgccctgaccgaccccgagggctgcccactgagccggtttaaggatagcctgggaaacccaacccacatcctgagaatcggcgagagctataaggagaagcagcggaccatccaggccaagaaggaggtggagcagcggagagccggcggctacagccggaagtacgccagcaaagccaagaatctggcagacgatatggtgagaaacaccgctagagatctgctgtactacgccgtgacccaggatgccatgctgatcttcgccaacctgagccggggcttcggccggcagggcaagcggaccttcatggccgagagacagtacacacggatggaggactggctgaccgccaagctggcctacgagggcctgagcaagacctacctgtccaagacactggcccagtacacctccaagacatgcagcaactgtgggtttaccatcaccagcgccgactacgacagggtgctggagaagctgaagaagacagcaacaggctggatgaccacaattaacggcaaggagctgaaggtggagggccagattacctactacaacagatacaagagacagaacgtagtcaaggacctgtccgtcgagctggatagactgagcgaagaatctgtgaacaacgacatctcctcctggacaaagggcagaagcggagaagctctgagcctcctgaagaaaagattctcccatagacccgtgcaggagaagttcgtgtgcctgaactgcggcttcgagacacacgcagccgagcaagccgccctgaacatcgccagatcctggctgttcctgcggagccaggagtacaagaaataccagacaaacaagacaaccggcaacaccgataagagagccttcgtcgagacctggcagtccttttaccggaagaagcttaaggaggtgtggaaacctgccgtgcggtctggcggatctggcggaggctccaccagccccaagaaaaagagaaaagtctaagctgccttctgcggggcttgccttctggccatgcccttcttctctcccttgcacctgtacctcttggtctttgaataaagcctgagtaggaaggctagcaaaaaaaaaaaaaaaaaaaaaaaaaaaaaaaaaaaaaaaaaaaaaaaaaaaaaaaaaaaaaaaaaaaaaaaaaaaaaaaa

SEQ ID NO: 12320 - RNA, 5785 nt, synthetic construct
  source 1..5785: mol_type = other RNA
aggaaataagagagaaaagaagagtaagaagaaatataagagccaccatggcccctaagaagaagcgtaaagtgagccggatggaacgcctcgtctacgaggtgcggcagaagtgcagaaacatcgaggacatctgcatctcctgcggatctctgaacgtgaccctggagcacccactgttcatcggcggcatgtgccagaactgtaaaaactgttttctggagtgtgcctatcaatacgacgatgacggctaccagagctactgcaccatctgttgcggcggaagagaggtgctgatgtgtggaaataacaactgctgccggtgcttctgcgtggaatgcgtggacctgctggtgggccccggcgccgcccaggccgctattaaggaagatccttggaactgctacatgtgcggccacaagggcacatacggcctgctgagacggagagaggactggcctagcagactgcagatgttcttcgccaataaccacgaccaggagttcgacccccctaaggtgtaccctcccgtccccgccgagaagagaaagcccatccgggtcctgagcctgttcgatggcatcgccaccggtctgctggtgctgaaggacctgggcatccaggtggataggtacattgcctccgaggtgtgcgaggactccatcaccgtgggaatggtgcgtcatcagggcaagatcatgtacgtgggcgacgtgcggagcgtgacacagaagcatatccaggagtggggccctttcgacctggtgatcggcggcagcccttgcaatgacctgagcatcgtgaacccagcccggaagggcctgtacgagggaaccggcagactgttcttcgagttttacagactgctgcacgacgcccggcctaaggaaggcgacgaccggcccttcttttggctgttcgagaatgtggtggccatgggagtcagcgacaagcgggatattagccggttcctggagagcaaccccgtgatgatcgatgccaaggaagtgagcgccgcccaccgggccagatacttctggggcaatctgcctggcatgaacagacccctggccagcaccgtgaacgacaagctggagctgcaggagtgcctggagcacggccggatcgccaagttcagcaaggtgagaaccatcaccacccgaagcaacagcatcaaacaaggcaaggaccagcactttcctgtgttcatgaacgagaaggaggacatcctgtggtgtaccgagatggagagagtgttcgggttcccagtccactacacagatgtcagcaacatgtctagactggccagacagagactgctgggaagaagctggtccgtccctgtgatcagacacctgttcgcccctctgaaggagtacttcgcctgcgtgagcagcggcaacagcaacgccaacagccggggccccagcttctctagcggcctggtgccactgtccctgagagggagccacatgggccccatggagatctacaaaaccgtgagcgcctggaagcggcagcctgtgcgcgtgctgagcctgtttcggaatatcgataaagtcctgaaaagcctgggattcctggagagcggctctggctccggcggtggcaccctgaagtacgtggaggatgtgacaaacgtggtcagacgggatgtggagaagtggggccccttcgatctggtgtacggcagcacccaacccctgggcagctcttgtgaccggtgccctggctggtacatgtttcagttccaccggatcctgcagtacgccctgccgagacaggagtcccagcggccattcttttggattttcatggacaacttgctgctgaccgaggatgaccaggaaactaccactcggttcctgcagaccgaagccgtgaccctgcaggacgtgagaggccgggactaccagaacgccatgcgggtgtggtccaacatccctggactgaaaagcaagcacgcacctctgacccctaaagaagaggagtacctgcaggcccaggtgcggagcagaagcaagctggacgcccctaaggtggatctgctggtgaagaattgcctcctgcccctgagagagtacttcaagtatttcagccagaatagtctgcccctgggaggcagcggcggcggccagcccgacctggtgaccttcggcgacgtggccgtggacttcagccaggaggagtgggagtggctgaaccccgcccagaggagcctgtacaggaccgtgatgctggacaactacaggagcctggtgagcctgggcgtgagcgccagcaagcccgacgtgatcagcctgctggagcagggcaaggagccctggctggtgaaggaggagggccccaggggcgccaggcccgacagcagccccaccggcggcccaagcagcggcgcccctcctcccagcggcggcagcccagccggctccccaacctctaccgaggagggcacctctgagtccgccacccccgagagcggccctggcacctccaccgagcccagcgagggcagcgcacccggcagccctgccggcagccccacctccacagaggagggaaccagcaccgagcccagcgaaggcagcgccccaggcaccagcaccgagcctagtgagcaggagattaaacggatcaacaagatcagaagaagacttgtgaaagacagcaacaccaagaaggccggcaagacaggccccatgaaaaccctgctggttagagtgatgacacccgatctgagagagcggctggaaaacctgagaaagaagcctgaaaatatcccccagcccatcagcaatacatctagagccaacctgaataagctgctgaccgattacaccgaaatgaagaaggcgatcctgcatgtgtactgggaagagttccagaaggaccctgtgggcctgatgagccgggtggcccagcctgccagcaagaagatcgatcagaacaagctgaaacctgagatggacgagaagggcaacctgaccaccgccggctttgcctgctctcagtgtggccagcccctgttcgtgtacaagctggagcaggtgtctgagaagggcaaggcttacaccaactacttcggacggtgcaatgtggccgagcacgaaaagctgatcctgctggcccagctgaagcccgagaaggatagcgacgaagccgtgacatatagcctgggaaagtttgggcagagggccctggatttctacagcattcatgtgaccaaggagtccacccaccccgtgaagcccctggcccagatcgccggaaacagatacgcctccggacctgtgggaaaggccctgagcgacgcatgtatgggcacaatcgcctccttcctgtctaagtaccaggacatcatcatcgaacaccagaaggtggtgaagggcaaccagaagagactggagagcctgcgggagctggccggcaaggaaaacctggaataccctagcgtgaccctgccacctcagcctcacaccaaggagggcgttgatgcctacaacgaagtgatcgcccgggtgcgaatgtgggtgaacctgaacctgtggcagaagctgaagctaagcagagatgatgccaagcctctgctgagactgaagggattcccttcctttcctctggtcgagagacaggccaacgaagtggactggtgggacatggtgtgtaacgtgaagaagctgatcaacgagaaaaaggaggatggcaaggtgttttggcagaatctggctggctacaagagacaggaagccctgagaccatacctgagcagcgaggaagatcggaagaagggaaagaaattcgctcggtaccagctgggcgacctgctgctgcacctggaaaagaagcacggcgaggactggggaaaggtgtacgacgaggcctgggagcggattgacaagaaagtggaaggcctgagcaagcacatcaagctggaagaggaacggagaagcgaggacgcccagagcaaggccgccctgaccgactggctgcgggctaaggccagcttcgtgatcgagggcctgaaggaggccgacaaggacgagttctgcagatgcgagctgaagctgcagaagtggtacggggacctgcggggaaagcccttcgccatcgaagccgagaacagcatcctggacatcagcggcttcagcaagcagtacaactgtgccttcatctggcagaaggacggcgtgaagaagctgaacctgtacctgatcatcaactacttcaagggcggcaagctgcggttcaagaagatcaaacctgaagccttcgaagccaacagattctacaccgtgatcaacaaaaagagcggcgagatcgtgcccatggaggtgaacttcaacttcgacgaccccaacctgatcatcctgcctctggcctttggcaagagacagggcagagaattcatctggaacgacctgctgtccctggaaaccggcagcctgaagctggccaacggaagagtgatcgagaagacactgtacaacagaagaacccggcaggatgagcctgccctgttcgtggccctgaccttcgagcggcgggaggtcctggactcctccaatatcaaaccaatgaacctgatcggcgtggcaagaggcgaaaacatccccgccgtgatcgccctgaccgaccccgagggctgcccactgagccggtttaaggatagcctgggaaacccaacccacatcctgagaatcggcgagagctataaggagaagcagcggaccatccaggccaagaaggaggtggagcagcggagagccggcggctacagccggaagtacgccagcaaagccaagaatctggcagacgatatggtgagaaacaccgctagagatctgctgtactacgccgtgacccaggatgccatgctgatcttcgccaacctgagccggggcttcggccggcagggcaagcggaccttcatggccgagagacagtacacacggatggaggactggctgaccgccaagctggcctacgagggcctgagcaagacctacctgtccaagacactggcccagtacacctccaagacatgcagcaactgtgggtttaccatcaccagcgccgactacgacagggtgctggagaagctgaagaagacagcaacaggctggatgaccacaattaacggcaaggagctgaaggtggagggccagattacctactacaacagatacaagagacagaacgtagtcaaggacctgtccgtcgagctggatagactgagcgaagaatctgtgaacaacgacatctcctcctggacaaagggcagaagcggagaagctctgagcctcctgaagaaaagattctcccatagacccgtgcaggagaagttcgtgtgcctgaactgcggcttcgagacacacgcagccgagcaagccgccctgaacatcgccagatcctggctgttcctgcggagccaggagtacaagaaataccagacaaacaagacaaccggcaacaccgataagagagccttcgtcgagacctggcagtccttttaccggaagaagcttaaggaggtgtggaaacctgccgtgcggtctggcggatctggcggaggctccaccagccccaagaaaaagagaaaagtctaagctgccttctgcggggcttgccttctggccatgcccttcttctctcccttgcacctgtacctcttggtctttgaataaagcctgagtaggaaggctagcaaaaaaaaaaaaaaaaaaaaaaaaaaaaaaaaaaaaaaaaaaaaaaaaaaaaaaaaaaaaaaaaaaaaaaaaaaaaaaaa

SEQ ID NO: 12321 - RNA, 5785 nt, synthetic construct
  source 1..5785: mol_type = other RNA
aggaaataagagagaaaagaagagtaagaagaaatataagagccaccatggcccctaagaagaagcgtaaagtgagccggatggaacgcctcgtctacgaggtgcggcagaagtgcagaaacatcgaggacatctgcatctcctgcggatctctgaacgtgaccctggagcacccactgttcatcggcggcatgtgccagaactgtaaaaactgttttctggagtgtgcctatcaatacgacgatgacggctaccagagctactgcaccatctgttgcggcggaagagaggtgctgatgtgtggaaataacaactgctgccggtgcttctgcgtggaatgcgtggacctgctggtgggccccggcgccgcccaggccgctattaaggaagatccttggaactgctacatgtgcggccacaagggcacatacggcctgctgagacggagagaggactggcctagcagactgcagatgttcttcgccaataaccacgaccaggagttcgacccccctaaggtgtaccctcccgtccccgccgagaagagaaagcccatccgggtcctgagcctgttcgatggcatcgccaccggtctgctggtgctgaaggacctgggcatccaggtggataggtacattgcctccgaggtgtgcgaggactccatcaccgtgggaatggtgcgtcatcagggcaagatcatgtacgtgggcgacgtgcggagcgtgacacagaagcatatccaggagtggggccctttcgacctggtgatcggcggcagcccttgcaatgacctgagcatcgtgaacccagcccggaagggcctgtacgagggaaccggcagactgttcttcgagttttacagactgctgcacgacgcccggcctaaggaaggcgacgaccggcccttcttttggctgttcgagaatgtggtggccatgggagtcagcgacaagcgggatattagccggttcctggagagcaaccccgtgatgatcgatgccaaggaagtgagcgccgcccaccgggccagatacttctggggcaatctgcctggcatgaacagacccctggccagcaccgtgaacgacaagctggagctgcaggagtgcctggagcacggccggatcgccaagttcagcaaggtgagaaccatcaccacccgaagcaacagcatcaaacaaggcaaggaccagcactttcctgtgttcatgaacgagaaggaggacatcctgtggtgtaccgagatggagagagtgttcgggttcccagtccactacacagatgtcagcaacatgtctagactggccagacagagactgctgggaagaagctggtccgtccctgtgatcagacacctgttcgcccctctgaaggagtacttcgcctgcgtgagcagcggcaacagcaacgccaacagccggggccccagcttctctagcggcctggtgccactgtccctgagagggagccacatgggccccatggagatctacaaaaccgtgagcgcctggaagcggcagcctgtgcgcgtgctgagcctgtttcggaatatcgataaagtcctgaaaagcctgggattcctggagagcggctctggctccggcggtggcaccctgaagtacgtggaggatgtgacaaacgtggtcagacgggatgtggagaagtggggccccttcgatctggtgtacggcagcacccaacccctgggcagctcttgtgaccggtgccctggctggtacatgtttcagttccaccggatcctgcagtacgccctgccgagacaggagtcccagcggccattcttttggattttcatggacaacttgctgctgaccgaggatgaccaggaaactaccactcggttcctgcagaccgaagccgtgaccctgcaggacgtgagaggccgggactaccagaacgccatgcgggtgtggtccaacatccctggactgaaaagcaagcacgcacctctgacccctaaagaagaggagtacctgcaggcccaggtgcggagcagaagcaagctggacgcccctaaggtggatctgctggtgaagaattgcctcctgcccctgagagagtacttcaagtatttcagccagaatagtctgcccctgggaggcagcggcggcggcagcaaggcccccgtgaccttcggcgacctggccgtgtacttcacccaggccgagtgggagtggctgagccccgtgcagaaggccctgtaccaggacgtgatgctggagaactaccaggtgctggtgagcctgggcctgtgcctgaggaggcccaacctgatcagcctgctggagaagggcaaggccccctgggtggccgagcccgtgaggaggaggaggggccccgacagcgccagcaagttcggcggcccaagcagcggcgcccctcctcccagcggcggcagcccagccggctccccaacctctaccgaggagggcacctctgagtccgccacccccgagagcggccctggcacctccaccgagcccagcgagggcagcgcacccggcagccctgccggcagccccacctccacagaggagggaaccagcaccgagcccagcgaaggcagcgccccaggcaccagcaccgagcctagtgagcaggagattaaacggatcaacaagatcagaagaagacttgtgaaagacagcaacaccaagaaggccggcaagacaggccccatgaaaaccctgctggttagagtgatgacacccgatctgagagagcggctggaaaacctgagaaagaagcctgaaaatatcccccagcccatcagcaatacatctagagccaacctgaataagctgctgaccgattacaccgaaatgaagaaggcgatcctgcatgtgtactgggaagagttccagaaggaccctgtgggcctgatgagccgggtggcccagcctgccagcaagaagatcgatcagaacaagctgaaacctgagatggacgagaagggcaacctgaccaccgccggctttgcctgctctcagtgtggccagcccctgttcgtgtacaagctggagcaggtgtctgagaagggcaaggcttacaccaactacttcggacggtgcaatgtggccgagcacgaaaagctgatcctgctggcccagctgaagcccgagaaggatagcgacgaagccgtgacatatagcctgggaaagtttgggcagagggccctggatttctacagcattcatgtgaccaaggagtccacccaccccgtgaagcccctggcccagatcgccggaaacagatacgcctccggacctgtgggaaaggccctgagcgacgcatgtatgggcacaatcgcctccttcctgtctaagtaccaggacatcatcatcgaacaccagaaggtggtgaagggcaaccagaagagactggagagcctgcgggagctggccggcaaggaaaacctggaataccctagcgtgaccctgccacctcagcctcacaccaaggagggcgttgatgcctacaacgaagtgatcgcccgggtgcgaatgtgggtgaacctgaacctgtggcagaagctgaagctaagcagagatgatgccaagcctctgctgagactgaagggattcccttcctttcctctggtcgagagacaggccaacgaagtggactggtgggacatggtgtgtaacgtgaagaagctgatcaacgagaaaaaggaggatggcaaggtgttttggcagaatctggctggctacaagagacaggaagccctgagaccatacctgagcagcgaggaagatcggaagaagggaaagaaattcgctcggtaccagctgggcgacctgctgctgcacctggaaaagaagcacggcgaggactggggaaaggtgtacgacgaggcctgggagcggattgacaagaaagtggaaggcctgagcaagcacatcaagctggaagaggaacggagaagcgaggacgcccagagcaaggccgccctgaccgactggctgcgggctaaggccagcttcgtgatcgagggcctgaaggaggccgacaaggacgagttctgcagatgcgagctgaagctgcagaagtggtacggggacctgcggggaaagcccttcgccatcgaagccgagaacagcatcctggacatcagcggcttcagcaagcagtacaactgtgccttcatctggcagaaggacggcgtgaagaagctgaacctgtacctgatcatcaactacttcaagggcggcaagctgcggttcaagaagatcaaacctgaagccttcgaagccaacagattctacaccgtgatcaacaaaaagagcggcgagatcgtgcccatggaggtgaacttcaacttcgacgaccccaacctgatcatcctgcctctggcctttggcaagagacagggcagagaattcatctggaacgacctgctgtccctggaaaccggcagcctgaagctggccaacggaagagtgatcgagaagacactgtacaacagaagaacccggcaggatgagcctgccctgttcgtggccctgaccttcgagcggcgggaggtcctggactcctccaatatcaaaccaatgaacctgatcggcgtggcaagaggcgaaaacatccccgccgtgatcgccctgaccgaccccgagggctgcccactgagccggtttaaggatagcctgggaaacccaacccacatcctgagaatcggcgagagctataaggagaagcagcggaccatccaggccaagaaggaggtggagcagcggagagccggcggctacagccggaagtacgccagcaaagccaagaatctggcagacgatatggtgagaaacaccgctagagatctgctgtactacgccgtgacccaggatgccatgctgatcttcgccaacctgagccggggcttcggccggcagggcaagcggaccttcatggccgagagacagtacacacggatggaggactggctgaccgccaagctggcctacgagggcctgagcaagacctacctgtccaagacactggcccagtacacctccaagacatgcagcaactgtgggtttaccatcaccagcgccgactacgacagggtgctggagaagctgaagaagacagcaacaggctggatgaccacaattaacggcaaggagctgaaggtggagggccagattacctactacaacagatacaagagacagaacgtagtcaaggacctgtccgtcgagctggatagactgagcgaagaatctgtgaacaacgacatctcctcctggacaaagggcagaagcggagaagctctgagcctcctgaagaaaagattctcccatagacccgtgcaggagaagttcgtgtgcctgaactgcggcttcgagacacacgcagccgagcaagccgccctgaacatcgccagatcctggctgttcctgcggagccaggagtacaagaaataccagacaaacaagacaaccggcaacaccgataagagagccttcgtcgagacctggcagtccttttaccggaagaagcttaaggaggtgtggaaacctgccgtgcggtctggcggatctggcggaggctccaccagccccaagaaaaagagaaaagtctaagctgccttctgcggggcttgccttctggccatgcccttcttctctcccttgcacctgtacctcttggtctttgaataaagcctgagtaggaaggctagcaaaaaaaaaaaaaaaaaaaaaaaaaaaaaaaaaaaaaaaaaaaaaaaaaaaaaaaaaaaaaaaaaaaaaaaaaaaaaaaa

SEQ ID NO: 12322 - RNA, 5785 nt, synthetic construct
  source 1..5785: mol_type = other RNA
aggaaataagagagaaaagaagagtaagaagaaatataagagccaccatggcccctaagaagaagcgtaaagtgagccggatggaacgcctcgtctacgaggtgcggcagaagtgcagaaacatcgaggacatctgcatctcctgcggatctctgaacgtgaccctggagcacccactgttcatcggcggcatgtgccagaactgtaaaaactgttttctggagtgtgcctatcaatacgacgatgacggctaccagagctactgcaccatctgttgcggcggaagagaggtgctgatgtgtggaaataacaactgctgccggtgcttctgcgtggaatgcgtggacctgctggtgggccccggcgccgcccaggccgctattaaggaagatccttggaactgctacatgtgcggccacaagggcacatacggcctgctgagacggagagaggactggcctagcagactgcagatgttcttcgccaataaccacgaccaggagttcgacccccctaaggtgtaccctcccgtccccgccgagaagagaaagcccatccgggtcctgagcctgttcgatggcatcgccaccggtctgctggtgctgaaggacctgggcatccaggtggataggtacattgcctccgaggtgtgcgaggactccatcaccgtgggaatggtgcgtcatcagggcaagatcatgtacgtgggcgacgtgcggagcgtgacacagaagcatatccaggagtggggccctttcgacctggtgatcggcggcagcccttgcaatgacctgagcatcgtgaacccagcccggaagggcctgtacgagggaaccggcagactgttcttcgagttttacagactgctgcacgacgcccggcctaaggaaggcgacgaccggcccttcttttggctgttcgagaatgtggtggccatgggagtcagcgacaagcgggatattagccggttcctggagagcaaccccgtgatgatcgatgccaaggaagtgagcgccgcccaccgggccagatacttctggggcaatctgcctggcatgaacagacccctggccagcaccgtgaacgacaagctggagctgcaggagtgcctggagcacggccggatcgccaagttcagcaaggtgagaaccatcaccacccgaagcaacagcatcaaacaaggcaaggaccagcactttcctgtgttcatgaacgagaaggaggacatcctgtggtgtaccgagatggagagagtgttcgggttcccagtccactacacagatgtcagcaacatgtctagactggccagacagagactgctgggaagaagctggtccgtccctgtgatcagacacctgttcgcccctctgaaggagtacttcgcctgcgtgagcagcggcaacagcaacgccaacagccggggccccagcttctctagcggcctggtgccactgtccctgagagggagccacatgggccccatggagatctacaaaaccgtgagcgcctggaagcggcagcctgtgcgcgtgctgagcctgtttcggaatatcgataaagtcctgaaaagcctgggattcctggagagcggctctggctccggcggtggcaccctgaagtacgtggaggatgtgacaaacgtggtcagacgggatgtggagaagtggggccccttcgatctggtgtacggcagcacccaacccctgggcagctcttgtgaccggtgccctggctggtacatgtttcagttccaccggatcctgcagtacgccctgccgagacaggagtcccagcggccattcttttggattttcatggacaacttgctgctgaccgaggatgaccaggaaactaccactcggttcctgcagaccgaagccgtgaccctgcaggacgtgagaggccgggactaccagaacgccatgcgggtgtggtccaacatccctggactgaaaagcaagcacgcacctctgacccctaaagaagaggagtacctgcaggcccaggtgcggagcagaagcaagctggacgcccctaaggtggatctgctggtgaagaattgcctcctgcccctgagagagtacttcaagtatttcagccagaatagtctgcccctgggaggcagcggcggcggcttccaggagcccctgaagttcagggacgtggccgtggagttcagcctggaggagtggcagtgcctggacaccatccagcagaacctgtacaggaacgtgatgctggagaactacaggaacctggtgttcctgggcatcgccgtgagcaagcccgacctgatcacctgcctggagcaggagaaggagccctggaccaggaagaggcacaggatggtggccaagcccgtgacctgcagccacttcggcggcccaagcagcggcgcccctcctcccagcggcggcagcccagccggctccccaacctctaccgaggagggcacctctgagtccgccacccccgagagcggccctggcacctccaccgagcccagcgagggcagcgcacccggcagccctgccggcagccccacctccacagaggagggaaccagcaccgagcccagcgaaggcagcgccccaggcaccagcaccgagcctagtgagcaggagattaaacggatcaacaagatcagaagaagacttgtgaaagacagcaacaccaagaaggccggcaagacaggccccatgaaaaccctgctggttagagtgatgacacccgatctgagagagcggctggaaaacctgagaaagaagcctgaaaatatcccccagcccatcagcaatacatctagagccaacctgaataagctgctgaccgattacaccgaaatgaagaaggcgatcctgcatgtgtactgggaagagttccagaaggaccctgtgggcctgatgagccgggtggcccagcctgccagcaagaagatcgatcagaacaagctgaaacctgagatggacgagaagggcaacctgaccaccgccggctttgcctgctctcagtgtggccagcccctgttcgtgtacaagctggagcaggtgtctgagaagggcaaggcttacaccaactacttcggacggtgcaatgtggccgagcacgaaaagctgatcctgctggcccagctgaagcccgagaaggatagcgacgaagccgtgacatatagcctgggaaagtttgggcagagggccctggatttctacagcattcatgtgaccaaggagtccacccaccccgtgaagcccctggcccagatcgccggaaacagatacgcctccggacctgtgggaaaggccctgagcgacgcatgtatgggcacaatcgcctccttcctgtctaagtaccaggacatcatcatcgaacaccagaaggtggtgaagggcaaccagaagagactggagagcctgcgggagctggccggcaaggaaaacctggaataccctagcgtgaccctgccacctcagcctcacaccaaggagggcgttgatgcctacaacgaagtgatcgcccgggtgcgaatgtgggtgaacctgaacctgtggcagaagctgaagctaagcagagatgatgccaagcctctgctgagactgaagggattcccttcctttcctctggtcgagagacaggccaacgaagtggactggtgggacatggtgtgtaacgtgaagaagctgatcaacgagaaaaaggaggatggcaaggtgttttggcagaatctggctggctacaagagacaggaagccctgagaccatacctgagcagcgaggaagatcggaagaagggaaagaaattcgctcggtaccagctgggcgacctgctgctgcacctggaaaagaagcacggcgaggactggggaaaggtgtacgacgaggcctgggagcggattgacaagaaagtggaaggcctgagcaagcacatcaagctggaagaggaacggagaagcgaggacgcccagagcaaggccgccctgaccgactggctgcgggctaaggccagcttcgtgatcgagggcctgaaggaggccgacaaggacgagttctgcagatgcgagctgaagctgcagaagtggtacggggacctgcggggaaagcccttcgccatcgaagccgagaacagcatcctggacatcagcggcttcagcaagcagtacaactgtgccttcatctggcagaaggacggcgtgaagaagctgaacctgtacctgatcatcaactacttcaagggcggcaagctgcggttcaagaagatcaaacctgaagccttcgaagccaacagattctacaccgtgatcaacaaaaagagcggcgagatcgtgcccatggaggtgaacttcaacttcgacgaccccaacctgatcatcctgcctctggcctttggcaagagacagggcagagaattcatctggaacgacctgctgtccctggaaaccggcagcctgaagctggccaacggaagagtgatcgagaagacactgtacaacagaagaacccggcaggatgagcctgccctgttcgtggccctgaccttcgagcggcgggaggtcctggactcctccaatatcaaaccaatgaacctgatcggcgtggcaagaggcgaaaacatccccgccgtgatcgccctgaccgaccccgagggctgcccactgagccggtttaaggatagcctgggaaacccaacccacatcctgagaatcggcgagagctataaggagaagcagcggaccatccaggccaagaaggaggtggagcagcggagagccggcggctacagccggaagtacgccagcaaagccaagaatctggcagacgatatggtgagaaacaccgctagagatctgctgtactacgccgtgacccaggatgccatgctgatcttcgccaacctgagccggggcttcggccggcagggcaagcggaccttcatggccgagagacagtacacacggatggaggactggctgaccgccaagctggcctacgagggcctgagcaagacctacctgtccaagacactggcccagtacacctccaagacatgcagcaactgtgggtttaccatcaccagcgccgactacgacagggtgctggagaagctgaagaagacagcaacaggctggatgaccacaattaacggcaaggagctgaaggtggagggccagattacctactacaacagatacaagagacagaacgtagtcaaggacctgtccgtcgagctggatagactgagcgaagaatctgtgaacaacgacatctcctcctggacaaagggcagaagcggagaagctctgagcctcctgaagaaaagattctcccatagacccgtgcaggagaagttcgtgtgcctgaactgcggcttcgagacacacgcagccgagcaagccgccctgaacatcgccagatcctggctgttcctgcggagccaggagtacaagaaataccagacaaacaagacaaccggcaacaccgataagagagccttcgtcgagacctggcagtccttttaccggaagaagcttaaggaggtgtggaaacctgccgtgcggtctggcggatctggcggaggctccaccagccccaagaaaaagagaaaagtctaagctgccttctgcggggcttgccttctggccatgcccttcttctctcccttgcacctgtacctcttggtctttgaataaagcctgagtaggaaggctagcaaaaaaaaaaaaaaaaaaaaaaaaaaaaaaaaaaaaaaaaaaaaaaaaaaaaaaaaaaaaaaaaaaaaaaaaaaaaaaaa

SEQ ID NO: 12323 - RNA, 5785 nt, synthetic construct
  source 1..5785: mol_type = other RNA
aggaaataagagagaaaagaagagtaagaagaaatataagagccaccatggcccctaagaagaagcgtaaagtgagccggatggaacgcctcgtctacgaggtgcggcagaagtgcagaaacatcgaggacatctgcatctcctgcggatctctgaacgtgaccctggagcacccactgttcatcggcggcatgtgccagaactgtaaaaactgttttctggagtgtgcctatcaatacgacgatgacggctaccagagctactgcaccatctgttgcggcggaagagaggtgctgatgtgtggaaataacaactgctgccggtgcttctgcgtggaatgcgtggacctgctggtgggccccggcgccgcccaggccgctattaaggaagatccttggaactgctacatgtgcggccacaagggcacatacggcctgctgagacggagagaggactggcctagcagactgcagatgttcttcgccaataaccacgaccaggagttcgacccccctaaggtgtaccctcccgtccccgccgagaagagaaagcccatccgggtcctgagcctgttcgatggcatcgccaccggtctgctggtgctgaaggacctgggcatccaggtggataggtacattgcctccgaggtgtgcgaggactccatcaccgtgggaatggtgcgtcatcagggcaagatcatgtacgtgggcgacgtgcggagcgtgacacagaagcatatccaggagtggggccctttcgacctggtgatcggcggcagcccttgcaatgacctgagcatcgtgaacccagcccggaagggcctgtacgagggaaccggcagactgttcttcgagttttacagactgctgcacgacgcccggcctaaggaaggcgacgaccggcccttcttttggctgttcgagaatgtggtggccatgggagtcagcgacaagcgggatattagccggttcctggagagcaaccccgtgatgatcgatgccaaggaagtgagcgccgcccaccgggccagatacttctggggcaatctgcctggcatgaacagacccctggccagcaccgtgaacgacaagctggagctgcaggagtgcctggagcacggccggatcgccaagttcagcaaggtgagaaccatcaccacccgaagcaacagcatcaaacaaggcaaggaccagcactttcctgtgttcatgaacgagaaggaggacatcctgtggtgtaccgagatggagagagtgttcgggttcccagtccactacacagatgtcagcaacatgtctagactggccagacagagactgctgggaagaagctggtccgtccctgtgatcagacacctgttcgcccctctgaaggagtacttcgcctgcgtgagcagcggcaacagcaacgccaacagccggggccccagcttctctagcggcctggtgccactgtccctgagagggagccacatgggccccatggagatctacaaaaccgtgagcgcctggaagcggcagcctgtgcgcgtgctgagcctgtttcggaatatcgataaagtcctgaaaagcctgggattcctggagagcggctctggctccggcggtggcaccctgaagtacgtggaggatgtgacaaacgtggtcagacgggatgtggagaagtggggccccttcgatctggtgtacggcagcacccaacccctgggcagctcttgtgaccggtgccctggctggtacatgtttcagttccaccggatcctgcagtacgccctgccgagacaggagtcccagcggccattcttttggattttcatggacaacttgctgctgaccgaggatgaccaggaaactaccactcggttcctgcagaccgaagccgtgaccctgcaggacgtgagaggccgggactaccagaacgccatgcgggtgtggtccaacatccctggactgaaaagcaagcacgcacctctgacccctaaagaagaggagtacctgcaggcccaggtgcggagcagaagcaagctggacgcccctaaggtggatctgctggtgaagaattgcctcctgcccctgagagagtacttcaagtatttcagccagaatagtctgcccctgggaggcagcggcggcggcgagcccggcgccgtgagcttcgccgacgtggccgtgtacttcagccccgaggagtgggagtgcctgaggcccgcccagagggccctgtacagggacgtgatgagggagacctacggccacctgggcgccctgggcttccccggccccaagcccgccctgatcagctggatggagcaggagagcgaggcctggagccccgccgcccaggaccccgagaagggcgagaggctgggcggcgccaggggcggcccaagcagcggcgcccctcctcccagcggcggcagcccagccggctccccaacctctaccgaggagggcacctctgagtccgccacccccgagagcggccctggcacctccaccgagcccagcgagggcagcgcacccggcagccctgccggcagccccacctccacagaggagggaaccagcaccgagcccagcgaaggcagcgccccaggcaccagcaccgagcctagtgagcaggagattaaacggatcaacaagatcagaagaagacttgtgaaagacagcaacaccaagaaggccggcaagacaggccccatgaaaaccctgctggttagagtgatgacacccgatctgagagagcggctggaaaacctgagaaagaagcctgaaaatatcccccagcccatcagcaatacatctagagccaacctgaataagctgctgaccgattacaccgaaatgaagaaggcgatcctgcatgtgtactgggaagagttccagaaggaccctgtgggcctgatgagccgggtggcccagcctgccagcaagaagatcgatcagaacaagctgaaacctgagatggacgagaagggcaacctgaccaccgccggctttgcctgctctcagtgtggccagcccctgttcgtgtacaagctggagcaggtgtctgagaagggcaaggcttacaccaactacttcggacggtgcaatgtggccgagcacgaaaagctgatcctgctggcccagctgaagcccgagaaggatagcgacgaagccgtgacatatagcctgggaaagtttgggcagagggccctggatttctacagcattcatgtgaccaaggagtccacccaccccgtgaagcccctggcccagatcgccggaaacagatacgcctccggacctgtgggaaaggccctgagcgacgcatgtatgggcacaatcgcctccttcctgtctaagtaccaggacatcatcatcgaacaccagaaggtggtgaagggcaaccagaagagactggagagcctgcgggagctggccggcaaggaaaacctggaataccctagcgtgaccctgccacctcagcctcacaccaaggagggcgttgatgcctacaacgaagtgatcgcccgggtgcgaatgtgggtgaacctgaacctgtggcagaagctgaagctaagcagagatgatgccaagcctctgctgagactgaagggattcccttcctttcctctggtcgagagacaggccaacgaagtggactggtgggacatggtgtgtaacgtgaagaagctgatcaacgagaaaaaggaggatggcaaggtgttttggcagaatctggctggctacaagagacaggaagccctgagaccatacctgagcagcgaggaagatcggaagaagggaaagaaattcgctcggtaccagctgggcgacctgctgctgcacctggaaaagaagcacggcgaggactggggaaaggtgtacgacgaggcctgggagcggattgacaagaaagtggaaggcctgagcaagcacatcaagctggaagaggaacggagaagcgaggacgcccagagcaaggccgccctgaccgactggctgcgggctaaggccagcttcgtgatcgagggcctgaaggaggccgacaaggacgagttctgcagatgcgagctgaagctgcagaagtggtacggggacctgcggggaaagcccttcgccatcgaagccgagaacagcatcctggacatcagcggcttcagcaagcagtacaactgtgccttcatctggcagaaggacggcgtgaagaagctgaacctgtacctgatcatcaactacttcaagggcggcaagctgcggttcaagaagatcaaacctgaagccttcgaagccaacagattctacaccgtgatcaacaaaaagagcggcgagatcgtgcccatggaggtgaacttcaacttcgacgaccccaacctgatcatcctgcctctggcctttggcaagagacagggcagagaattcatctggaacgacctgctgtccctggaaaccggcagcctgaagctggccaacggaagagtgatcgagaagacactgtacaacagaagaacccggcaggatgagcctgccctgttcgtggccctgaccttcgagcggcgggaggtcctggactcctccaatatcaaaccaatgaacctgatcggcgtggcaagaggcgaaaacatccccgccgtgatcgccctgaccgaccccgagggctgcccactgagccggtttaaggatagcctgggaaacccaacccacatcctgagaatcggcgagagctataaggagaagcagcggaccatccaggccaagaaggaggtggagcagcggagagccggcggctacagccggaagtacgccagcaaagccaagaatctggcagacgatatggtgagaaacaccgctagagatctgctgtactacgccgtgacccaggatgccatgctgatcttcgccaacctgagccggggcttcggccggcagggcaagcggaccttcatggccgagagacagtacacacggatggaggactggctgaccgccaagctggcctacgagggcctgagcaagacctacctgtccaagacactggcccagtacacctccaagacatgcagcaactgtgggtttaccatcaccagcgccgactacgacagggtgctggagaagctgaagaagacagcaacaggctggatgaccacaattaacggcaaggagctgaaggtggagggccagattacctactacaacagatacaagagacagaacgtagtcaaggacctgtccgtcgagctggatagactgagcgaagaatctgtgaacaacgacatctcctcctggacaaagggcagaagcggagaagctctgagcctcctgaagaaaagattctcccatagacccgtgcaggagaagttcgtgtgcctgaactgcggcttcgagacacacgcagccgagcaagccgccctgaacatcgccagatcctggctgttcctgcggagccaggagtacaagaaataccagacaaacaagacaaccggcaacaccgataagagagccttcgtcgagacctggcagtccttttaccggaagaagcttaaggaggtgtggaaacctgccgtgcggtctggcggatctggcggaggctccaccagccccaagaaaaagagaaaagtctaagctgccttctgcggggcttgccttctggccatgcccttcttctctcccttgcacctgtacctcttggtctttgaataaagcctgagtaggaaggctagcaaaaaaaaaaaaaaaaaaaaaaaaaaaaaaaaaaaaaaaaaaaaaaaaaaaaaaaaaaaaaaaaaaaaaaaaaaaaaaaa

SEQ ID NO: 12324 - RNA, 5785 nt, synthetic construct
  source 1..5785: mol_type = other RNA
aggaaataagagagaaaagaagagtaagaagaaatataagagccaccatggcccctaagaagaagcgtaaagtgagccggatggaacgcctcgtctacgaggtgcggcagaagtgcagaaacatcgaggacatctgcatctcctgcggatctctgaacgtgaccctggagcacccactgttcatcggcggcatgtgccagaactgtaaaaactgttttctggagtgtgcctatcaatacgacgatgacggctaccagagctactgcaccatctgttgcggcggaagagaggtgctgatgtgtggaaataacaactgctgccggtgcttctgcgtggaatgcgtggacctgctggtgggccccggcgccgcccaggccgctattaaggaagatccttggaactgctacatgtgcggccacaagggcacatacggcctgctgagacggagagaggactggcctagcagactgcagatgttcttcgccaataaccacgaccaggagttcgacccccctaaggtgtaccctcccgtccccgccgagaagagaaagcccatccgggtcctgagcctgttcgatggcatcgccaccggtctgctggtgctgaaggacctgggcatccaggtggataggtacattgcctccgaggtgtgcgaggactccatcaccgtgggaatggtgcgtcatcagggcaagatcatgtacgtgggcgacgtgcggagcgtgacacagaagcatatccaggagtggggccctttcgacctggtgatcggcggcagcccttgcaatgacctgagcatcgtgaacccagcccggaagggcctgtacgagggaaccggcagactgttcttcgagttttacagactgctgcacgacgcccggcctaaggaaggcgacgaccggcccttcttttggctgttcgagaatgtggtggccatgggagtcagcgacaagcgggatattagccggttcctggagagcaaccccgtgatgatcgatgccaaggaagtgagcgccgcccaccgggccagatacttctggggcaatctgcctggcatgaacagacccctggccagcaccgtgaacgacaagctggagctgcaggagtgcctggagcacggccggatcgccaagttcagcaaggtgagaaccatcaccacccgaagcaacagcatcaaacaaggcaaggaccagcactttcctgtgttcatgaacgagaaggaggacatcctgtggtgtaccgagatggagagagtgttcgggttcccagtccactacacagatgtcagcaacatgtctagactggccagacagagactgctgggaagaagctggtccgtccctgtgatcagacacctgttcgcccctctgaaggagtacttcgcctgcgtgagcagcggcaacagcaacgccaacagccggggccccagcttctctagcggcctggtgccactgtccctgagagggagccacatgggccccatggagatctacaaaaccgtgagcgcctggaagcggcagcctgtgcgcgtgctgagcctgtttcggaatatcgataaagtcctgaaaagcctgggattcctggagagcggctctggctccggcggtggcaccctgaagtacgtggaggatgtgacaaacgtggtcagacgggatgtggagaagtggggccccttcgatctggtgtacggcagcacccaacccctgggcagctcttgtgaccggtgccctggctggtacatgtttcagttccaccggatcctgcagtacgccctgccgagacaggagtcccagcggccattcttttggattttcatggacaacttgctgctgaccgaggatgaccaggaaactaccactcggttcctgcagaccgaagccgtgaccctgcaggacgtgagaggccgggactaccagaacgccatgcgggtgtggtccaacatccctggactgaaaagcaagcacgcacctctgacccctaaagaagaggagtacctgcaggcccaggtgcggagcagaagcaagctggacgcccctaaggtggatctgctggtgaagaattgcctcctgcccctgagagagtacttcaagtatttcagccagaatagtctgcccctgggaggcagcggcggcggccaggccgaggtgaccttcgaggacgtggccgtgctgttcagcagggaggagtggggcaggctgggccccgcccagaggggcctgtacagggacgtgatgctggagacctacaggaacctggccagcctgggcgccggcagggccggcagcaagcccggcgtgatcacccagctggagaggggcgacgagccctgggtgctggacgcccagggcgccaagggcaagggccagcccagggtgagcggcggcccaagcagcggcgcccctcctcccagcggcggcagcccagccggctccccaacctctaccgaggagggcacctctgagtccgccacccccgagagcggccctggcacctccaccgagcccagcgagggcagcgcacccggcagccctgccggcagccccacctccacagaggagggaaccagcaccgagcccagcgaaggcagcgccccaggcaccagcaccgagcctagtgagcaggagattaaacggatcaacaagatcagaagaagacttgtgaaagacagcaacaccaagaaggccggcaagacaggccccatgaaaaccctgctggttagagtgatgacacccgatctgagagagcggctggaaaacctgagaaagaagcctgaaaatatcccccagcccatcagcaatacatctagagccaacctgaataagctgctgaccgattacaccgaaatgaagaaggcgatcctgcatgtgtactgggaagagttccagaaggaccctgtgggcctgatgagccgggtggcccagcctgccagcaagaagatcgatcagaacaagctgaaacctgagatggacgagaagggcaacctgaccaccgccggctttgcctgctctcagtgtggccagcccctgttcgtgtacaagctggagcaggtgtctgagaagggcaaggcttacaccaactacttcggacggtgcaatgtggccgagcacgaaaagctgatcctgctggcccagctgaagcccgagaaggatagcgacgaagccgtgacatatagcctgggaaagtttgggcagagggccctggatttctacagcattcatgtgaccaaggagtccacccaccccgtgaagcccctggcccagatcgccggaaacagatacgcctccggacctgtgggaaaggccctgagcgacgcatgtatgggcacaatcgcctccttcctgtctaagtaccaggacatcatcatcgaacaccagaaggtggtgaagggcaaccagaagagactggagagcctgcgggagctggccggcaaggaaaacctggaataccctagcgtgaccctgccacctcagcctcacaccaaggagggcgttgatgcctacaacgaagtgatcgcccgggtgcgaatgtgggtgaacctgaacctgtggcagaagctgaagctaagcagagatgatgccaagcctctgctgagactgaagggattcccttcctttcctctggtcgagagacaggccaacgaagtggactggtgggacatggtgtgtaacgtgaagaagctgatcaacgagaaaaaggaggatggcaaggtgttttggcagaatctggctggctacaagagacaggaagccctgagaccatacctgagcagcgaggaagatcggaagaagggaaagaaattcgctcggtaccagctgggcgacctgctgctgcacctggaaaagaagcacggcgaggactggggaaaggtgtacgacgaggcctgggagcggattgacaagaaagtggaaggcctgagcaagcacatcaagctggaagaggaacggagaagcgaggacgcccagagcaaggccgccctgaccgactggctgcgggctaaggccagcttcgtgatcgagggcctgaaggaggccgacaaggacgagttctgcagatgcgagctgaagctgcagaagtggtacggggacctgcggggaaagcccttcgccatcgaagccgagaacagcatcctggacatcagcggcttcagcaagcagtacaactgtgccttcatctggcagaaggacggcgtgaagaagctgaacctgtacctgatcatcaactacttcaagggcggcaagctgcggttcaagaagatcaaacctgaagccttcgaagccaacagattctacaccgtgatcaacaaaaagagcggcgagatcgtgcccatggaggtgaacttcaacttcgacgaccccaacctgatcatcctgcctctggcctttggcaagagacagggcagagaattcatctggaacgacctgctgtccctggaaaccggcagcctgaagctggccaacggaagagtgatcgagaagacactgtacaacagaagaacccggcaggatgagcctgccctgttcgtggccctgaccttcgagcggcgggaggtcctggactcctccaatatcaaaccaatgaacctgatcggcgtggcaagaggcgaaaacatccccgccgtgatcgccctgaccgaccccgagggctgcccactgagccggtttaaggatagcctgggaaacccaacccacatcctgagaatcggcgagagctataaggagaagcagcggaccatccaggccaagaaggaggtggagcagcggagagccggcggctacagccggaagtacgccagcaaagccaagaatctggcagacgatatggtgagaaacaccgctagagatctgctgtactacgccgtgacccaggatgccatgctgatcttcgccaacctgagccggggcttcggccggcagggcaagcggaccttcatggccgagagacagtacacacggatggaggactggctgaccgccaagctggcctacgagggcctgagcaagacctacctgtccaagacactggcccagtacacctccaagacatgcagcaactgtgggtttaccatcaccagcgccgactacgacagggtgctggagaagctgaagaagacagcaacaggctggatgaccacaattaacggcaaggagctgaaggtggagggccagattacctactacaacagatacaagagacagaacgtagtcaaggacctgtccgtcgagctggatagactgagcgaagaatctgtgaacaacgacatctcctcctggacaaagggcagaagcggagaagctctgagcctcctgaagaaaagattctcccatagacccgtgcaggagaagttcgtgtgcctgaactgcggcttcgagacacacgcagccgagcaagccgccctgaacatcgccagatcctggctgttcctgcggagccaggagtacaagaaataccagacaaacaagacaaccggcaacaccgataagagagccttcgtcgagacctggcagtccttttaccggaagaagcttaaggaggtgtggaaacctgccgtgcggtctggcggatctggcggaggctccaccagccccaagaaaaagagaaaagtctaagctgccttctgcggggcttgccttctggccatgcccttcttctctcccttgcacctgtacctcttggtctttgaataaagcctgagtaggaaggctagcaaaaaaaaaaaaaaaaaaaaaaaaaaaaaaaaaaaaaaaaaaaaaaaaaaaaaaaaaaaaaaaaaaaaaaaaaaaaaaaa

SEQ ID NO: 12325 - RNA, 5785 nt, synthetic construct
  source 1..5785: mol_type = other RNA
aggaaataagagagaaaagaagagtaagaagaaatataagagccaccatggcccctaagaagaagcgtaaagtgagccggatggaacgcctcgtctacgaggtgcggcagaagtgcagaaacatcgaggacatctgcatctcctgcggatctctgaacgtgaccctggagcacccactgttcatcggcggcatgtgccagaactgtaaaaactgttttctggagtgtgcctatcaatacgacgatgacggctaccagagctactgcaccatctgttgcggcggaagagaggtgctgatgtgtggaaataacaactgctgccggtgcttctgcgtggaatgcgtggacctgctggtgggccccggcgccgcccaggccgctattaaggaagatccttggaactgctacatgtgcggccacaagggcacatacggcctgctgagacggagagaggactggcctagcagactgcagatgttcttcgccaataaccacgaccaggagttcgacccccctaaggtgtaccctcccgtccccgccgagaagagaaagcccatccgggtcctgagcctgttcgatggcatcgccaccggtctgctggtgctgaaggacctgggcatccaggtggataggtacattgcctccgaggtgtgcgaggactccatcaccgtgggaatggtgcgtcatcagggcaagatcatgtacgtgggcgacgtgcggagcgtgacacagaagcatatccaggagtggggccctttcgacctggtgatcggcggcagcccttgcaatgacctgagcatcgtgaacccagcccggaagggcctgtacgagggaaccggcagactgttcttcgagttttacagactgctgcacgacgcccggcctaaggaaggcgacgaccggcccttcttttggctgttcgagaatgtggtggccatgggagtcagcgacaagcgggatattagccggttcctggagagcaaccccgtgatgatcgatgccaaggaagtgagcgccgcccaccgggccagatacttctggggcaatctgcctggcatgaacagacccctggccagcaccgtgaacgacaagctggagctgcaggagtgcctggagcacggccggatcgccaagttcagcaaggtgagaaccatcaccacccgaagcaacagcatcaaacaaggcaaggaccagcactttcctgtgttcatgaacgagaaggaggacatcctgtggtgtaccgagatggagagagtgttcgggttcccagtccactacacagatgtcagcaacatgtctagactggccagacagagactgctgggaagaagctggtccgtccctgtgatcagacacctgttcgcccctctgaaggagtacttcgcctgcgtgagcagcggcaacagcaacgccaacagccggggccccagcttctctagcggcctggtgccactgtccctgagagggagccacatgggccccatggagatctacaaaaccgtgagcgcctggaagcggcagcctgtgcgcgtgctgagcctgtttcggaatatcgataaagtcctgaaaagcctgggattcctggagagcggctctggctccggcggtggcaccctgaagtacgtggaggatgtgacaaacgtggtcagacgggatgtggagaagtggggccccttcgatctggtgtacggcagcacccaacccctgggcagctcttgtgaccggtgccctggctggtacatgtttcagttccaccggatcctgcagtacgccctgccgagacaggagtcccagcggccattcttttggattttcatggacaacttgctgctgaccgaggatgaccaggaaactaccactcggttcctgcagaccgaagccgtgaccctgcaggacgtgagaggccgggactaccagaacgccatgcgggtgtggtccaacatccctggactgaaaagcaagcacgcacctctgacccctaaagaagaggagtacctgcaggcccaggtgcggagcagaagcaagctggacgcccctaaggtggatctgctggtgaagaattgcctcctgcccctgagagagtacttcaagtatttcagccagaatagtctgcccctgggaggcagcggcggcggcaagcccgccgccgtgagcttcgccgacgtggccgtgtacttcagcgtggaggagtggggctgcctgaggcccgcccagagggccctgtacagggacgtgatgagggagacctacggccacctgggcgccctgggcttccccggccccaagcccgccctgatcagctggatggagcaggagagcgaggcctggagccccgccgcccaggaccccgaggagggcgagagcctgggcggcgccctgggcggcccaagcagcggcgcccctcctcccagcggcggcagcccagccggctccccaacctctaccgaggagggcacctctgagtccgccacccccgagagcggccctggcacctccaccgagcccagcgagggcagcgcacccggcagccctgccggcagccccacctccacagaggagggaaccagcaccgagcccagcgaaggcagcgccccaggcaccagcaccgagcctagtgagcaggagattaaacggatcaacaagatcagaagaagacttgtgaaagacagcaacaccaagaaggccggcaagacaggccccatgaaaaccctgctggttagagtgatgacacccgatctgagagagcggctggaaaacctgagaaagaagcctgaaaatatcccccagcccatcagcaatacatctagagccaacctgaataagctgctgaccgattacaccgaaatgaagaaggcgatcctgcatgtgtactgggaagagttccagaaggaccctgtgggcctgatgagccgggtggcccagcctgccagcaagaagatcgatcagaacaagctgaaacctgagatggacgagaagggcaacctgaccaccgccggctttgcctgctctcagtgtggccagcccctgttcgtgtacaagctggagcaggtgtctgagaagggcaaggcttacaccaactacttcggacggtgcaatgtggccgagcacgaaaagctgatcctgctggcccagctgaagcccgagaaggatagcgacgaagccgtgacatatagcctgggaaagtttgggcagagggccctggatttctacagcattcatgtgaccaaggagtccacccaccccgtgaagcccctggcccagatcgccggaaacagatacgcctccggacctgtgggaaaggccctgagcgacgcatgtatgggcacaatcgcctccttcctgtctaagtaccaggacatcatcatcgaacaccagaaggtggtgaagggcaaccagaagagactggagagcctgcgggagctggccggcaaggaaaacctggaataccctagcgtgaccctgccacctcagcctcacaccaaggagggcgttgatgcctacaacgaagtgatcgcccgggtgcgaatgtgggtgaacctgaacctgtggcagaagctgaagctaagcagagatgatgccaagcctctgctgagactgaagggattcccttcctttcctctggtcgagagacaggccaacgaagtggactggtgggacatggtgtgtaacgtgaagaagctgatcaacgagaaaaaggaggatggcaaggtgttttggcagaatctggctggctacaagagacaggaagccctgagaccatacctgagcagcgaggaagatcggaagaagggaaagaaattcgctcggtaccagctgggcgacctgctgctgcacctggaaaagaagcacggcgaggactggggaaaggtgtacgacgaggcctgggagcggattgacaagaaagtggaaggcctgagcaagcacatcaagctggaagaggaacggagaagcgaggacgcccagagcaaggccgccctgaccgactggctgcgggctaaggccagcttcgtgatcgagggcctgaaggaggccgacaaggacgagttctgcagatgcgagctgaagctgcagaagtggtacggggacctgcggggaaagcccttcgccatcgaagccgagaacagcatcctggacatcagcggcttcagcaagcagtacaactgtgccttcatctggcagaaggacggcgtgaagaagctgaacctgtacctgatcatcaactacttcaagggcggcaagctgcggttcaagaagatcaaacctgaagccttcgaagccaacagattctacaccgtgatcaacaaaaagagcggcgagatcgtgcccatggaggtgaacttcaacttcgacgaccccaacctgatcatcctgcctctggcctttggcaagagacagggcagagaattcatctggaacgacctgctgtccctggaaaccggcagcctgaagctggccaacggaagagtgatcgagaagacactgtacaacagaagaacccggcaggatgagcctgccctgttcgtggccctgaccttcgagcggcgggaggtcctggactcctccaatatcaaaccaatgaacctgatcggcgtggcaagaggcgaaaacatccccgccgtgatcgccctgaccgaccccgagggctgcccactgagccggtttaaggatagcctgggaaacccaacccacatcctgagaatcggcgagagctataaggagaagcagcggaccatccaggccaagaaggaggtggagcagcggagagccggcggctacagccggaagtacgccagcaaagccaagaatctggcagacgatatggtgagaaacaccgctagagatctgctgtactacgccgtgacccaggatgccatgctgatcttcgccaacctgagccggggcttcggccggcagggcaagcggaccttcatggccgagagacagtacacacggatggaggactggctgaccgccaagctggcctacgagggcctgagcaagacctacctgtccaagacactggcccagtacacctccaagacatgcagcaactgtgggtttaccatcaccagcgccgactacgacagggtgctggagaagctgaagaagacagcaacaggctggatgaccacaattaacggcaaggagctgaaggtggagggccagattacctactacaacagatacaagagacagaacgtagtcaaggacctgtccgtcgagctggatagactgagcgaagaatctgtgaacaacgacatctcctcctggacaaagggcagaagcggagaagctctgagcctcctgaagaaaagattctcccatagacccgtgcaggagaagttcgtgtgcctgaactgcggcttcgagacacacgcagccgagcaagccgccctgaacatcgccagatcctggctgttcctgcggagccaggagtacaagaaataccagacaaacaagacaaccggcaacaccgataagagagccttcgtcgagacctggcagtccttttaccggaagaagcttaaggaggtgtggaaacctgccgtgcggtctggcggatctggcggaggctccaccagccccaagaaaaagagaaaagtctaagctgccttctgcggggcttgccttctggccatgcccttcttctctcccttgcacctgtacctcttggtctttgaataaagcctgagtaggaaggctagcaaaaaaaaaaaaaaaaaaaaaaaaaaaaaaaaaaaaaaaaaaaaaaaaaaaaaaaaaaaaaaaaaaaaaaaaaaaaaaaa

SEQ ID NO: 12326 - RNA, 5785 nt, synthetic construct
  source 1..5785: mol_type = other RNA
aggaaataagagagaaaagaagagtaagaagaaatataagagccaccatggcccctaagaagaagcgtaaagtgagccggatggaacgcctcgtctacgaggtgcggcagaagtgcagaaacatcgaggacatctgcatctcctgcggatctctgaacgtgaccctggagcacccactgttcatcggcggcatgtgccagaactgtaaaaactgttttctggagtgtgcctatcaatacgacgatgacggctaccagagctactgcaccatctgttgcggcggaagagaggtgctgatgtgtggaaataacaactgctgccggtgcttctgcgtggaatgcgtggacctgctggtgggccccggcgccgcccaggccgctattaaggaagatccttggaactgctacatgtgcggccacaagggcacatacggcctgctgagacggagagaggactggcctagcagactgcagatgttcttcgccaataaccacgaccaggagttcgacccccctaaggtgtaccctcccgtccccgccgagaagagaaagcccatccgggtcctgagcctgttcgatggcatcgccaccggtctgctggtgctgaaggacctgggcatccaggtggataggtacattgcctccgaggtgtgcgaggactccatcaccgtgggaatggtgcgtcatcagggcaagatcatgtacgtgggcgacgtgcggagcgtgacacagaagcatatccaggagtggggccctttcgacctggtgatcggcggcagcccttgcaatgacctgagcatcgtgaacccagcccggaagggcctgtacgagggaaccggcagactgttcttcgagttttacagactgctgcacgacgcccggcctaaggaaggcgacgaccggcccttcttttggctgttcgagaatgtggtggccatgggagtcagcgacaagcgggatattagccggttcctggagagcaaccccgtgatgatcgatgccaaggaagtgagcgccgcccaccgggccagatacttctggggcaatctgcctggcatgaacagacccctggccagcaccgtgaacgacaagctggagctgcaggagtgcctggagcacggccggatcgccaagttcagcaaggtgagaaccatcaccacccgaagcaacagcatcaaacaaggcaaggaccagcactttcctgtgttcatgaacgagaaggaggacatcctgtggtgtaccgagatggagagagtgttcgggttcccagtccactacacagatgtcagcaacatgtctagactggccagacagagactgctgggaagaagctggtccgtccctgtgatcagacacctgttcgcccctctgaaggagtacttcgcctgcgtgagcagcggcaacagcaacgccaacagccggggccccagcttctctagcggcctggtgccactgtccctgagagggagccacatgggccccatggagatctacaaaaccgtgagcgcctggaagcggcagcctgtgcgcgtgctgagcctgtttcggaatatcgataaagtcctgaaaagcctgggattcctggagagcggctctggctccggcggtggcaccctgaagtacgtggaggatgtgacaaacgtggtcagacgggatgtggagaagtggggccccttcgatctggtgtacggcagcacccaacccctgggcagctcttgtgaccggtgccctggctggtacatgtttcagttccaccggatcctgcagtacgccctgccgagacaggagtcccagcggccattcttttggattttcatggacaacttgctgctgaccgaggatgaccaggaaactaccactcggttcctgcagaccgaagccgtgaccctgcaggacgtgagaggccgggactaccagaacgccatgcgggtgtggtccaacatccctggactgaaaagcaagcacgcacctctgacccctaaagaagaggagtacctgcaggcccaggtgcggagcagaagcaagctggacgcccctaaggtggatctgctggtgaagaattgcctcctgcccctgagagagtacttcaagtatttcagccagaatagtctgcccctgggaggcagcggcggcggcctgcagggcagcgtgaccttccaggacgtggccgtggacttcagctgggaggagtggggccacctgggccccgcccagaaggagctgtacagggaggtgatgctggagaactacggcaacctggtgtgcctgggcctggccgtgagcagccccgacgtggtgtgccagctggagaggggcgagggcccctggatgcccgagggcgacgtgcccggcagcagctgcgccggctgggagaccaagggcggcccaagcagcggcgcccctcctcccagcggcggcagcccagccggctccccaacctctaccgaggagggcacctctgagtccgccacccccgagagcggccctggcacctccaccgagcccagcgagggcagcgcacccggcagccctgccggcagccccacctccacagaggagggaaccagcaccgagcccagcgaaggcagcgccccaggcaccagcaccgagcctagtgagcaggagattaaacggatcaacaagatcagaagaagacttgtgaaagacagcaacaccaagaaggccggcaagacaggccccatgaaaaccctgctggttagagtgatgacacccgatctgagagagcggctggaaaacctgagaaagaagcctgaaaatatcccccagcccatcagcaatacatctagagccaacctgaataagctgctgaccgattacaccgaaatgaagaaggcgatcctgcatgtgtactgggaagagttccagaaggaccctgtgggcctgatgagccgggtggcccagcctgccagcaagaagatcgatcagaacaagctgaaacctgagatggacgagaagggcaacctgaccaccgccggctttgcctgctctcagtgtggccagcccctgttcgtgtacaagctggagcaggtgtctgagaagggcaaggcttacaccaactacttcggacggtgcaatgtggccgagcacgaaaagctgatcctgctggcccagctgaagcccgagaaggatagcgacgaagccgtgacatatagcctgggaaagtttgggcagagggccctggatttctacagcattcatgtgaccaaggagtccacccaccccgtgaagcccctggcccagatcgccggaaacagatacgcctccggacctgtgggaaaggccctgagcgacgcatgtatgggcacaatcgcctccttcctgtctaagtaccaggacatcatcatcgaacaccagaaggtggtgaagggcaaccagaagagactggagagcctgcgggagctggccggcaaggaaaacctggaataccctagcgtgaccctgccacctcagcctcacaccaaggagggcgttgatgcctacaacgaagtgatcgcccgggtgcgaatgtgggtgaacctgaacctgtggcagaagctgaagctaagcagagatgatgccaagcctctgctgagactgaagggattcccttcctttcctctggtcgagagacaggccaacgaagtggactggtgggacatggtgtgtaacgtgaagaagctgatcaacgagaaaaaggaggatggcaaggtgttttggcagaatctggctggctacaagagacaggaagccctgagaccatacctgagcagcgaggaagatcggaagaagggaaagaaattcgctcggtaccagctgggcgacctgctgctgcacctggaaaagaagcacggcgaggactggggaaaggtgtacgacgaggcctgggagcggattgacaagaaagtggaaggcctgagcaagcacatcaagctggaagaggaacggagaagcgaggacgcccagagcaaggccgccctgaccgactggctgcgggctaaggccagcttcgtgatcgagggcctgaaggaggccgacaaggacgagttctgcagatgcgagctgaagctgcagaagtggtacggggacctgcggggaaagcccttcgccatcgaagccgagaacagcatcctggacatcagcggcttcagcaagcagtacaactgtgccttcatctggcagaaggacggcgtgaagaagctgaacctgtacctgatcatcaactacttcaagggcggcaagctgcggttcaagaagatcaaacctgaagccttcgaagccaacagattctacaccgtgatcaacaaaaagagcggcgagatcgtgcccatggaggtgaacttcaacttcgacgaccccaacctgatcatcctgcctctggcctttggcaagagacagggcagagaattcatctggaacgacctgctgtccctggaaaccggcagcctgaagctggccaacggaagagtgatcgagaagacactgtacaacagaagaacccggcaggatgagcctgccctgttcgtggccctgaccttcgagcggcgggaggtcctggactcctccaatatcaaaccaatgaacctgatcggcgtggcaagaggcgaaaacatccccgccgtgatcgccctgaccgaccccgagggctgcccactgagccggtttaaggatagcctgggaaacccaacccacatcctgagaatcggcgagagctataaggagaagcagcggaccatccaggccaagaaggaggtggagcagcggagagccggcggctacagccggaagtacgccagcaaagccaagaatctggcagacgatatggtgagaaacaccgctagagatctgctgtactacgccgtgacccaggatgccatgctgatcttcgccaacctgagccggggcttcggccggcagggcaagcggaccttcatggccgagagacagtacacacggatggaggactggctgaccgccaagctggcctacgagggcctgagcaagacctacctgtccaagacactggcccagtacacctccaagacatgcagcaactgtgggtttaccatcaccagcgccgactacgacagggtgctggagaagctgaagaagacagcaacaggctggatgaccacaattaacggcaaggagctgaaggtggagggccagattacctactacaacagatacaagagacagaacgtagtcaaggacctgtccgtcgagctggatagactgagcgaagaatctgtgaacaacgacatctcctcctggacaaagggcagaagcggagaagctctgagcctcctgaagaaaagattctcccatagacccgtgcaggagaagttcgtgtgcctgaactgcggcttcgagacacacgcagccgagcaagccgccctgaacatcgccagatcctggctgttcctgcggagccaggagtacaagaaataccagacaaacaagacaaccggcaacaccgataagagagccttcgtcgagacctggcagtccttttaccggaagaagcttaaggaggtgtggaaacctgccgtgcggtctggcggatctggcggaggctccaccagccccaagaaaaagagaaaagtctaagctgccttctgcggggcttgccttctggccatgcccttcttctctcccttgcacctgtacctcttggtctttgaataaagcctgagtaggaaggctagcaaaaaaaaaaaaaaaaaaaaaaaaaaaaaaaaaaaaaaaaaaaaaaaaaaaaaaaaaaaaaaaaaaaaaaaaaaaaaaaa

SEQ ID NO: 12327 - RNA, 5785 nt, synthetic construct
  source 1..5785: mol_type = other RNA
aggaaataagagagaaaagaagagtaagaagaaatataagagccaccatggcccctaagaagaagcgtaaagtgagccggatggaacgcctcgtctacgaggtgcggcagaagtgcagaaacatcgaggacatctgcatctcctgcggatctctgaacgtgaccctggagcacccactgttcatcggcggcatgtgccagaactgtaaaaactgttttctggagtgtgcctatcaatacgacgatgacggctaccagagctactgcaccatctgttgcggcggaagagaggtgctgatgtgtggaaataacaactgctgccggtgcttctgcgtggaatgcgtggacctgctggtgggccccggcgccgcccaggccgctattaaggaagatccttggaactgctacatgtgcggccacaagggcacatacggcctgctgagacggagagaggactggcctagcagactgcagatgttcttcgccaataaccacgaccaggagttcgacccccctaaggtgtaccctcccgtccccgccgagaagagaaagcccatccgggtcctgagcctgttcgatggcatcgccaccggtctgctggtgctgaaggacctgggcatccaggtggataggtacattgcctccgaggtgtgcgaggactccatcaccgtgggaatggtgcgtcatcagggcaagatcatgtacgtgggcgacgtgcggagcgtgacacagaagcatatccaggagtggggccctttcgacctggtgatcggcggcagcccttgcaatgacctgagcatcgtgaacccagcccggaagggcctgtacgagggaaccggcagactgttcttcgagttttacagactgctgcacgacgcccggcctaaggaaggcgacgaccggcccttcttttggctgttcgagaatgtggtggccatgggagtcagcgacaagcgggatattagccggttcctggagagcaaccccgtgatgatcgatgccaaggaagtgagcgccgcccaccgggccagatacttctggggcaatctgcctggcatgaacagacccctggccagcaccgtgaacgacaagctggagctgcaggagtgcctggagcacggccggatcgccaagttcagcaaggtgagaaccatcaccacccgaagcaacagcatcaaacaaggcaaggaccagcactttcctgtgttcatgaacgagaaggaggacatcctgtggtgtaccgagatggagagagtgttcgggttcccagtccactacacagatgtcagcaacatgtctagactggccagacagagactgctgggaagaagctggtccgtccctgtgatcagacacctgttcgcccctctgaaggagtacttcgcctgcgtgagcagcggcaacagcaacgccaacagccggggccccagcttctctagcggcctggtgccactgtccctgagagggagccacatgggccccatggagatctacaaaaccgtgagcgcctggaagcggcagcctgtgcgcgtgctgagcctgtttcggaatatcgataaagtcctgaaaagcctgggattcctggagagcggctctggctccggcggtggcaccctgaagtacgtggaggatgtgacaaacgtggtcagacgggatgtggagaagtggggccccttcgatctggtgtacggcagcacccaacccctgggcagctcttgtgaccggtgccctggctggtacatgtttcagttccaccggatcctgcagtacgccctgccgagacaggagtcccagcggccattcttttggattttcatggacaacttgctgctgaccgaggatgaccaggaaactaccactcggttcctgcagaccgaagccgtgaccctgcaggacgtgagaggccgggactaccagaacgccatgcgggtgtggtccaacatccctggactgaaaagcaagcacgcacctctgacccctaaagaagaggagtacctgcaggcccaggtgcggagcagaagcaagctggacgcccctaaggtggatctgctggtgaagaattgcctcctgcccctgagagagtacttcaagtatttcagccagaatagtctgcccctgggaggcagcggcggcggcaccctggagagcgtgaccttccaggacgtggccgtggacttcacccaggaggagtgggccctgctggacaccagccagaggaccctgttcagggaggtgatgctggagaacatcagccacctggtgagcgtgggcaaccagctgtacaagagcgacgtgatcagccacctggagcagggcgagcagctgagcagggagggcctgggcttcctgcagggccagagccccgtgatcagcgacaggggcggcccaagcagcggcgcccctcctcccagcggcggcagcccagccggctccccaacctctaccgaggagggcacctctgagtccgccacccccgagagcggccctggcacctccaccgagcccagcgagggcagcgcacccggcagccctgccggcagccccacctccacagaggagggaaccagcaccgagcccagcgaaggcagcgccccaggcaccagcaccgagcctagtgagcaggagattaaacggatcaacaagatcagaagaagacttgtgaaagacagcaacaccaagaaggccggcaagacaggccccatgaaaaccctgctggttagagtgatgacacccgatctgagagagcggctggaaaacctgagaaagaagcctgaaaatatcccccagcccatcagcaatacatctagagccaacctgaataagctgctgaccgattacaccgaaatgaagaaggcgatcctgcatgtgtactgggaagagttccagaaggaccctgtgggcctgatgagccgggtggcccagcctgccagcaagaagatcgatcagaacaagctgaaacctgagatggacgagaagggcaacctgaccaccgccggctttgcctgctctcagtgtggccagcccctgttcgtgtacaagctggagcaggtgtctgagaagggcaaggcttacaccaactacttcggacggtgcaatgtggccgagcacgaaaagctgatcctgctggcccagctgaagcccgagaaggatagcgacgaagccgtgacatatagcctgggaaagtttgggcagagggccctggatttctacagcattcatgtgaccaaggagtccacccaccccgtgaagcccctggcccagatcgccggaaacagatacgcctccggacctgtgggaaaggccctgagcgacgcatgtatgggcacaatcgcctccttcctgtctaagtaccaggacatcatcatcgaacaccagaaggtggtgaagggcaaccagaagagactggagagcctgcgggagctggccggcaaggaaaacctggaataccctagcgtgaccctgccacctcagcctcacaccaaggagggcgttgatgcctacaacgaagtgatcgcccgggtgcgaatgtgggtgaacctgaacctgtggcagaagctgaagctaagcagagatgatgccaagcctctgctgagactgaagggattcccttcctttcctctggtcgagagacaggccaacgaagtggactggtgggacatggtgtgtaacgtgaagaagctgatcaacgagaaaaaggaggatggcaaggtgttttggcagaatctggctggctacaagagacaggaagccctgagaccatacctgagcagcgaggaagatcggaagaagggaaagaaattcgctcggtaccagctgggcgacctgctgctgcacctggaaaagaagcacggcgaggactggggaaaggtgtacgacgaggcctgggagcggattgacaagaaagtggaaggcctgagcaagcacatcaagctggaagaggaacggagaagcgaggacgcccagagcaaggccgccctgaccgactggctgcgggctaaggccagcttcgtgatcgagggcctgaaggaggccgacaaggacgagttctgcagatgcgagctgaagctgcagaagtggtacggggacctgcggggaaagcccttcgccatcgaagccgagaacagcatcctggacatcagcggcttcagcaagcagtacaactgtgccttcatctggcagaaggacggcgtgaagaagctgaacctgtacctgatcatcaactacttcaagggcggcaagctgcggttcaagaagatcaaacctgaagccttcgaagccaacagattctacaccgtgatcaacaaaaagagcggcgagatcgtgcccatggaggtgaacttcaacttcgacgaccccaacctgatcatcctgcctctggcctttggcaagagacagggcagagaattcatctggaacgacctgctgtccctggaaaccggcagcctgaagctggccaacggaagagtgatcgagaagacactgtacaacagaagaacccggcaggatgagcctgccctgttcgtggccctgaccttcgagcggcgggaggtcctggactcctccaatatcaaaccaatgaacctgatcggcgtggcaagaggcgaaaacatccccgccgtgatcgccctgaccgaccccgagggctgcccactgagccggtttaaggatagcctgggaaacccaacccacatcctgagaatcggcgagagctataaggagaagcagcggaccatccaggccaagaaggaggtggagcagcggagagccggcggctacagccggaagtacgccagcaaagccaagaatctggcagacgatatggtgagaaacaccgctagagatctgctgtactacgccgtgacccaggatgccatgctgatcttcgccaacctgagccggggcttcggccggcagggcaagcggaccttcatggccgagagacagtacacacggatggaggactggctgaccgccaagctggcctacgagggcctgagcaagacctacctgtccaagacactggcccagtacacctccaagacatgcagcaactgtgggtttaccatcaccagcgccgactacgacagggtgctggagaagctgaagaagacagcaacaggctggatgaccacaattaacggcaaggagctgaaggtggagggccagattacctactacaacagatacaagagacagaacgtagtcaaggacctgtccgtcgagctggatagactgagcgaagaatctgtgaacaacgacatctcctcctggacaaagggcagaagcggagaagctctgagcctcctgaagaaaagattctcccatagacccgtgcaggagaagttcgtgtgcctgaactgcggcttcgagacacacgcagccgagcaagccgccctgaacatcgccagatcctggctgttcctgcggagccaggagtacaagaaataccagacaaacaagacaaccggcaacaccgataagagagccttcgtcgagacctggcagtccttttaccggaagaagcttaaggaggtgtggaaacctgccgtgcggtctggcggatctggcggaggctccaccagccccaagaaaaagagaaaagtctaagctgccttctgcggggcttgccttctggccatgcccttcttctctcccttgcacctgtacctcttggtctttgaataaagcctgagtaggaaggctagcaaaaaaaaaaaaaaaaaaaaaaaaaaaaaaaaaaaaaaaaaaaaaaaaaaaaaaaaaaaaaaaaaaaaaaaaaaaaaaaa

SEQ ID NO: 12328 - RNA, 5785 nt, synthetic construct
  source 1..5785: mol_type = other RNA
aggaaataagagagaaaagaagagtaagaagaaatataagagccaccatggcccctaagaagaagcgtaaagtgagccggatggaacgcctcgtctacgaggtgcggcagaagtgcagaaacatcgaggacatctgcatctcctgcggatctctgaacgtgaccctggagcacccactgttcatcggcggcatgtgccagaactgtaaaaactgttttctggagtgtgcctatcaatacgacgatgacggctaccagagctactgcaccatctgttgcggcggaagagaggtgctgatgtgtggaaataacaactgctgccggtgcttctgcgtggaatgcgtggacctgctggtgggccccggcgccgcccaggccgctattaaggaagatccttggaactgctacatgtgcggccacaagggcacatacggcctgctgagacggagagaggactggcctagcagactgcagatgttcttcgccaataaccacgaccaggagttcgacccccctaaggtgtaccctcccgtccccgccgagaagagaaagcccatccgggtcctgagcctgttcgatggcatcgccaccggtctgctggtgctgaaggacctgggcatccaggtggataggtacattgcctccgaggtgtgcgaggactccatcaccgtgggaatggtgcgtcatcagggcaagatcatgtacgtgggcgacgtgcggagcgtgacacagaagcatatccaggagtggggccctttcgacctggtgatcggcggcagcccttgcaatgacctgagcatcgtgaacccagcccggaagggcctgtacgagggaaccggcagactgttcttcgagttttacagactgctgcacgacgcccggcctaaggaaggcgacgaccggcccttcttttggctgttcgagaatgtggtggccatgggagtcagcgacaagcgggatattagccggttcctggagagcaaccccgtgatgatcgatgccaaggaagtgagcgccgcccaccgggccagatacttctggggcaatctgcctggcatgaacagacccctggccagcaccgtgaacgacaagctggagctgcaggagtgcctggagcacggccggatcgccaagttcagcaaggtgagaaccatcaccacccgaagcaacagcatcaaacaaggcaaggaccagcactttcctgtgttcatgaacgagaaggaggacatcctgtggtgtaccgagatggagagagtgttcgggttcccagtccactacacagatgtcagcaacatgtctagactggccagacagagactgctgggaagaagctggtccgtccctgtgatcagacacctgttcgcccctctgaaggagtacttcgcctgcgtgagcagcggcaacagcaacgccaacagccggggccccagcttctctagcggcctggtgccactgtccctgagagggagccacatgggccccatggagatctacaaaaccgtgagcgcctggaagcggcagcctgtgcgcgtgctgagcctgtttcggaatatcgataaagtcctgaaaagcctgggattcctggagagcggctctggctccggcggtggcaccctgaagtacgtggaggatgtgacaaacgtggtcagacgggatgtggagaagtggggccccttcgatctggtgtacggcagcacccaacccctgggcagctcttgtgaccggtgccctggctggtacatgtttcagttccaccggatcctgcagtacgccctgccgagacaggagtcccagcggccattcttttggattttcatggacaacttgctgctgaccgaggatgaccaggaaactaccactcggttcctgcagaccgaagccgtgaccctgcaggacgtgagaggccgggactaccagaacgccatgcgggtgtggtccaacatccctggactgaaaagcaagcacgcacctctgacccctaaagaagaggagtacctgcaggcccaggtgcggagcagaagcaagctggacgcccctaaggtggatctgctggtgaagaattgcctcctgcccctgagagagtacttcaagtatttcagccagaatagtctgcccctgggaggcagcggcggcggccaccaggaggtggtgaccttcgaggacgtggccgtgtacttcacccagaccgagtgggccggcctgagccccgcccagagggccctgtacaggagcgtgatgctggagatctacggcaacctgaccagcctgggctaccccgtgcccaagcccgccctggtgagcctgctggagaggggcgacctgcccgtgggcctggagacccaggacaacccccccgcccagggcaccagggacatctacggcggcccaagcagcggcgcccctcctcccagcggcggcagcccagccggctccccaacctctaccgaggagggcacctctgagtccgccacccccgagagcggccctggcacctccaccgagcccagcgagggcagcgcacccggcagccctgccggcagccccacctccacagaggagggaaccagcaccgagcccagcgaaggcagcgccccaggcaccagcaccgagcctagtgagcaggagattaaacggatcaacaagatcagaagaagacttgtgaaagacagcaacaccaagaaggccggcaagacaggccccatgaaaaccctgctggttagagtgatgacacccgatctgagagagcggctggaaaacctgagaaagaagcctgaaaatatcccccagcccatcagcaatacatctagagccaacctgaataagctgctgaccgattacaccgaaatgaagaaggcgatcctgcatgtgtactgggaagagttccagaaggaccctgtgggcctgatgagccgggtggcccagcctgccagcaagaagatcgatcagaacaagctgaaacctgagatggacgagaagggcaacctgaccaccgccggctttgcctgctctcagtgtggccagcccctgttcgtgtacaagctggagcaggtgtctgagaagggcaaggcttacaccaactacttcggacggtgcaatgtggccgagcacgaaaagctgatcctgctggcccagctgaagcccgagaaggatagcgacgaagccgtgacatatagcctgggaaagtttgggcagagggccctggatttctacagcattcatgtgaccaaggagtccacccaccccgtgaagcccctggcccagatcgccggaaacagatacgcctccggacctgtgggaaaggccctgagcgacgcatgtatgggcacaatcgcctccttcctgtctaagtaccaggacatcatcatcgaacaccagaaggtggtgaagggcaaccagaagagactggagagcctgcgggagctggccggcaaggaaaacctggaataccctagcgtgaccctgccacctcagcctcacaccaaggagggcgttgatgcctacaacgaagtgatcgcccgggtgcgaatgtgggtgaacctgaacctgtggcagaagctgaagctaagcagagatgatgccaagcctctgctgagactgaagggattcccttcctttcctctggtcgagagacaggccaacgaagtggactggtgggacatggtgtgtaacgtgaagaagctgatcaacgagaaaaaggaggatggcaaggtgttttggcagaatctggctggctacaagagacaggaagccctgagaccatacctgagcagcgaggaagatcggaagaagggaaagaaattcgctcggtaccagctgggcgacctgctgctgcacctggaaaagaagcacggcgaggactggggaaaggtgtacgacgaggcctgggagcggattgacaagaaagtggaaggcctgagcaagcacatcaagctggaagaggaacggagaagcgaggacgcccagagcaaggccgccctgaccgactggctgcgggctaaggccagcttcgtgatcgagggcctgaaggaggccgacaaggacgagttctgcagatgcgagctgaagctgcagaagtggtacggggacctgcggggaaagcccttcgccatcgaagccgagaacagcatcctggacatcagcggcttcagcaagcagtacaactgtgccttcatctggcagaaggacggcgtgaagaagctgaacctgtacctgatcatcaactacttcaagggcggcaagctgcggttcaagaagatcaaacctgaagccttcgaagccaacagattctacaccgtgatcaacaaaaagagcggcgagatcgtgcccatggaggtgaacttcaacttcgacgaccccaacctgatcatcctgcctctggcctttggcaagagacagggcagagaattcatctggaacgacctgctgtccctggaaaccggcagcctgaagctggccaacggaagagtgatcgagaagacactgtacaacagaagaacccggcaggatgagcctgccctgttcgtggccctgaccttcgagcggcgggaggtcctggactcctccaatatcaaaccaatgaacctgatcggcgtggcaagaggcgaaaacatccccgccgtgatcgccctgaccgaccccgagggctgcccactgagccggtttaaggatagcctgggaaacccaacccacatcctgagaatcggcgagagctataaggagaagcagcggaccatccaggccaagaaggaggtggagcagcggagagccggcggctacagccggaagtacgccagcaaagccaagaatctggcagacgatatggtgagaaacaccgctagagatctgctgtactacgccgtgacccaggatgccatgctgatcttcgccaacctgagccggggcttcggccggcagggcaagcggaccttcatggccgagagacagtacacacggatggaggactggctgaccgccaagctggcctacgagggcctgagcaagacctacctgtccaagacactggcccagtacacctccaagacatgcagcaactgtgggtttaccatcaccagcgccgactacgacagggtgctggagaagctgaagaagacagcaacaggctggatgaccacaattaacggcaaggagctgaaggtggagggccagattacctactacaacagatacaagagacagaacgtagtcaaggacctgtccgtcgagctggatagactgagcgaagaatctgtgaacaacgacatctcctcctggacaaagggcagaagcggagaagctctgagcctcctgaagaaaagattctcccatagacccgtgcaggagaagttcgtgtgcctgaactgcggcttcgagacacacgcagccgagcaagccgccctgaacatcgccagatcctggctgttcctgcggagccaggagtacaagaaataccagacaaacaagacaaccggcaacaccgataagagagccttcgtcgagacctggcagtccttttaccggaagaagcttaaggaggtgtggaaacctgccgtgcggtctggcggatctggcggaggctccaccagccccaagaaaaagagaaaagtctaagctgccttctgcggggcttgccttctggccatgcccttcttctctcccttgcacctgtacctcttggtctttgaataaagcctgagtaggaaggctagcaaaaaaaaaaaaaaaaaaaaaaaaaaaaaaaaaaaaaaaaaaaaaaaaaaaaaaaaaaaaaaaaaaaaaaaaaaaaaaaa

SEQ ID NO: 12329 - RNA, 5785 nt, synthetic construct
  source 1..5785: mol_type = other RNA
aggaaataagagagaaaagaagagtaagaagaaatataagagccaccatggcccctaagaagaagcgtaaagtgagccggatggaacgcctcgtctacgaggtgcggcagaagtgcagaaacatcgaggacatctgcatctcctgcggatctctgaacgtgaccctggagcacccactgttcatcggcggcatgtgccagaactgtaaaaactgttttctggagtgtgcctatcaatacgacgatgacggctaccagagctactgcaccatctgttgcggcggaagagaggtgctgatgtgtggaaataacaactgctgccggtgcttctgcgtggaatgcgtggacctgctggtgggccccggcgccgcccaggccgctattaaggaagatccttggaactgctacatgtgcggccacaagggcacatacggcctgctgagacggagagaggactggcctagcagactgcagatgttcttcgccaataaccacgaccaggagttcgacccccctaaggtgtaccctcccgtccccgccgagaagagaaagcccatccgggtcctgagcctgttcgatggcatcgccaccggtctgctggtgctgaaggacctgggcatccaggtggataggtacattgcctccgaggtgtgcgaggactccatcaccgtgggaatggtgcgtcatcagggcaagatcatgtacgtgggcgacgtgcggagcgtgacacagaagcatatccaggagtggggccctttcgacctggtgatcggcggcagcccttgcaatgacctgagcatcgtgaacccagcccggaagggcctgtacgagggaaccggcagactgttcttcgagttttacagactgctgcacgacgcccggcctaaggaaggcgacgaccggcccttcttttggctgttcgagaatgtggtggccatgggagtcagcgacaagcgggatattagccggttcctggagagcaaccccgtgatgatcgatgccaaggaagtgagcgccgcccaccgggccagatacttctggggcaatctgcctggcatgaacagacccctggccagcaccgtgaacgacaagctggagctgcaggagtgcctggagcacggccggatcgccaagttcagcaaggtgagaaccatcaccacccgaagcaacagcatcaaacaaggcaaggaccagcactttcctgtgttcatgaacgagaaggaggacatcctgtggtgtaccgagatggagagagtgttcgggttcccagtccactacacagatgtcagcaacatgtctagactggccagacagagactgctgggaagaagctggtccgtccctgtgatcagacacctgttcgcccctctgaaggagtacttcgcctgcgtgagcagcggcaacagcaacgccaacagccggggccccagcttctctagcggcctggtgccactgtccctgagagggagccacatgggccccatggagatctacaaaaccgtgagcgcctggaagcggcagcctgtgcgcgtgctgagcctgtttcggaatatcgataaagtcctgaaaagcctgggattcctggagagcggctctggctccggcggtggcaccctgaagtacgtggaggatgtgacaaacgtggtcagacgggatgtggagaagtggggccccttcgatctggtgtacggcagcacccaacccctgggcagctcttgtgaccggtgccctggctggtacatgtttcagttccaccggatcctgcagtacgccctgccgagacaggagtcccagcggccattcttttggattttcatggacaacttgctgctgaccgaggatgaccaggaaactaccactcggttcctgcagaccgaagccgtgaccctgcaggacgtgagaggccgggactaccagaacgccatgcgggtgtggtccaacatccctggactgaaaagcaagcacgcacctctgacccctaaagaagaggagtacctgcaggcccaggtgcggagcagaagcaagctggacgcccctaaggtggatctgctggtgaagaattgcctcctgcccctgagagagtacttcaagtatttcagccagaatagtctgcccctgggaggcagcggcggcggcctggacgcccccgtgaccttcgaggacgtggccgtgtacttcagcgagaacgagtggacctgcctgacctgcccccagagggccctgtacagggacgtgatgctggagaactacggcgccgtggccagcctggccttcctgttccccaagcccgccctgatcagcaggctggagaggggcgaggccccctggtgcagcgccccccagggcgccctggacggcgagggctggaagggcgtgagcggcggcccaagcagcggcgcccctcctcccagcggcggcagcccagccggctccccaacctctaccgaggagggcacctctgagtccgccacccccgagagcggccctggcacctccaccgagcccagcgagggcagcgcacccggcagccctgccggcagccccacctccacagaggagggaaccagcaccgagcccagcgaaggcagcgccccaggcaccagcaccgagcctagtgagcaggagattaaacggatcaacaagatcagaagaagacttgtgaaagacagcaacaccaagaaggccggcaagacaggccccatgaaaaccctgctggttagagtgatgacacccgatctgagagagcggctggaaaacctgagaaagaagcctgaaaatatcccccagcccatcagcaatacatctagagccaacctgaataagctgctgaccgattacaccgaaatgaagaaggcgatcctgcatgtgtactgggaagagttccagaaggaccctgtgggcctgatgagccgggtggcccagcctgccagcaagaagatcgatcagaacaagctgaaacctgagatggacgagaagggcaacctgaccaccgccggctttgcctgctctcagtgtggccagcccctgttcgtgtacaagctggagcaggtgtctgagaagggcaaggcttacaccaactacttcggacggtgcaatgtggccgagcacgaaaagctgatcctgctggcccagctgaagcccgagaaggatagcgacgaagccgtgacatatagcctgggaaagtttgggcagagggccctggatttctacagcattcatgtgaccaaggagtccacccaccccgtgaagcccctggcccagatcgccggaaacagatacgcctccggacctgtgggaaaggccctgagcgacgcatgtatgggcacaatcgcctccttcctgtctaagtaccaggacatcatcatcgaacaccagaaggtggtgaagggcaaccagaagagactggagagcctgcgggagctggccggcaaggaaaacctggaataccctagcgtgaccctgccacctcagcctcacaccaaggagggcgttgatgcctacaacgaagtgatcgcccgggtgcgaatgtgggtgaacctgaacctgtggcagaagctgaagctaagcagagatgatgccaagcctctgctgagactgaagggattcccttcctttcctctggtcgagagacaggccaacgaagtggactggtgggacatggtgtgtaacgtgaagaagctgatcaacgagaaaaaggaggatggcaaggtgttttggcagaatctggctggctacaagagacaggaagccctgagaccatacctgagcagcgaggaagatcggaagaagggaaagaaattcgctcggtaccagctgggcgacctgctgctgcacctggaaaagaagcacggcgaggactggggaaaggtgtacgacgaggcctgggagcggattgacaagaaagtggaaggcctgagcaagcacatcaagctggaagaggaacggagaagcgaggacgcccagagcaaggccgccctgaccgactggctgcgggctaaggccagcttcgtgatcgagggcctgaaggaggccgacaaggacgagttctgcagatgcgagctgaagctgcagaagtggtacggggacctgcggggaaagcccttcgccatcgaagccgagaacagcatcctggacatcagcggcttcagcaagcagtacaactgtgccttcatctggcagaaggacggcgtgaagaagctgaacctgtacctgatcatcaactacttcaagggcggcaagctgcggttcaagaagatcaaacctgaagccttcgaagccaacagattctacaccgtgatcaacaaaaagagcggcgagatcgtgcccatggaggtgaacttcaacttcgacgaccccaacctgatcatcctgcctctggcctttggcaagagacagggcagagaattcatctggaacgacctgctgtccctggaaaccggcagcctgaagctggccaacggaagagtgatcgagaagacactgtacaacagaagaacccggcaggatgagcctgccctgttcgtggccctgaccttcgagcggcgggaggtcctggactcctccaatatcaaaccaatgaacctgatcggcgtggcaagaggcgaaaacatccccgccgtgatcgccctgaccgaccccgagggctgcccactgagccggtttaaggatagcctgggaaacccaacccacatcctgagaatcggcgagagctataaggagaagcagcggaccatccaggccaagaaggaggtggagcagcggagagccggcggctacagccggaagtacgccagcaaagccaagaatctggcagacgatatggtgagaaacaccgctagagatctgctgtactacgccgtgacccaggatgccatgctgatcttcgccaacctgagccggggcttcggccggcagggcaagcggaccttcatggccgagagacagtacacacggatggaggactggctgaccgccaagctggcctacgagggcctgagcaagacctacctgtccaagacactggcccagtacacctccaagacatgcagcaactgtgggtttaccatcaccagcgccgactacgacagggtgctggagaagctgaagaagacagcaacaggctggatgaccacaattaacggcaaggagctgaaggtggagggccagattacctactacaacagatacaagagacagaacgtagtcaaggacctgtccgtcgagctggatagactgagcgaagaatctgtgaacaacgacatctcctcctggacaaagggcagaagcggagaagctctgagcctcctgaagaaaagattctcccatagacccgtgcaggagaagttcgtgtgcctgaactgcggcttcgagacacacgcagccgagcaagccgccctgaacatcgccagatcctggctgttcctgcggagccaggagtacaagaaataccagacaaacaagacaaccggcaacaccgataagagagccttcgtcgagacctggcagtccttttaccggaagaagcttaaggaggtgtggaaacctgccgtgcggtctggcggatctggcggaggctccaccagccccaagaaaaagagaaaagtctaagctgccttctgcggggcttgccttctggccatgcccttcttctctcccttgcacctgtacctcttggtctttgaataaagcctgagtaggaaggctagcaaaaaaaaaaaaaaaaaaaaaaaaaaaaaaaaaaaaaaaaaaaaaaaaaaaaaaaaaaaaaaaaaaaaaaaaaaaaaaaa

SEQ ID NO: 12330 - RNA, 5785 nt, synthetic construct
  source 1..5785: mol_type = other RNA
aggaaataagagagaaaagaagagtaagaagaaatataagagccaccatggcccctaagaagaagcgtaaagtgagccggatggaacgcctcgtctacgaggtgcggcagaagtgcagaaacatcgaggacatctgcatctcctgcggatctctgaacgtgaccctggagcacccactgttcatcggcggcatgtgccagaactgtaaaaactgttttctggagtgtgcctatcaatacgacgatgacggctaccagagctactgcaccatctgttgcggcggaagagaggtgctgatgtgtggaaataacaactgctgccggtgcttctgcgtggaatgcgtggacctgctggtgggccccggcgccgcccaggccgctattaaggaagatccttggaactgctacatgtgcggccacaagggcacatacggcctgctgagacggagagaggactggcctagcagactgcagatgttcttcgccaataaccacgaccaggagttcgacccccctaaggtgtaccctcccgtccccgccgagaagagaaagcccatccgggtcctgagcctgttcgatggcatcgccaccggtctgctggtgctgaaggacctgggcatccaggtggataggtacattgcctccgaggtgtgcgaggactccatcaccgtgggaatggtgcgtcatcagggcaagatcatgtacgtgggcgacgtgcggagcgtgacacagaagcatatccaggagtggggccctttcgacctggtgatcggcggcagcccttgcaatgacctgagcatcgtgaacccagcccggaagggcctgtacgagggaaccggcagactgttcttcgagttttacagactgctgcacgacgcccggcctaaggaaggcgacgaccggcccttcttttggctgttcgagaatgtggtggccatgggagtcagcgacaagcgggatattagccggttcctggagagcaaccccgtgatgatcgatgccaaggaagtgagcgccgcccaccgggccagatacttctggggcaatctgcctggcatgaacagacccctggccagcaccgtgaacgacaagctggagctgcaggagtgcctggagcacggccggatcgccaagttcagcaaggtgagaaccatcaccacccgaagcaacagcatcaaacaaggcaaggaccagcactttcctgtgttcatgaacgagaaggaggacatcctgtggtgtaccgagatggagagagtgttcgggttcccagtccactacacagatgtcagcaacatgtctagactggccagacagagactgctgggaagaagctggtccgtccctgtgatcagacacctgttcgcccctctgaaggagtacttcgcctgcgtgagcagcggcaacagcaacgccaacagccggggccccagcttctctagcggcctggtgccactgtccctgagagggagccacatgggccccatggagatctacaaaaccgtgagcgcctggaagcggcagcctgtgcgcgtgctgagcctgtttcggaatatcgataaagtcctgaaaagcctgggattcctggagagcggctctggctccggcggtggcaccctgaagtacgtggaggatgtgacaaacgtggtcagacgggatgtggagaagtggggccccttcgatctggtgtacggcagcacccaacccctgggcagctcttgtgaccggtgccctggctggtacatgtttcagttccaccggatcctgcagtacgccctgccgagacaggagtcccagcggccattcttttggattttcatggacaacttgctgctgaccgaggatgaccaggaaactaccactcggttcctgcagaccgaagccgtgaccctgcaggacgtgagaggccgggactaccagaacgccatgcgggtgtggtccaacatccctggactgaaaagcaagcacgcacctctgacccctaaagaagaggagtacctgcaggcccaggtgcggagcagaagcaagctggacgcccctaaggtggatctgctggtgaagaattgcctcctgcccctgagagagtacttcaagtatttcagccagaatagtctgcccctgggaggcagcggcggcggcatggccgccatgcccctgaaggcccagtaccaggagatggtgaccttcgaggacgtggccgtgcacttcaccaagaccgagtggaccggcctgagccccgcccagagggccctgtacaggagcgtgatgctggagaacttcggcaacctgaccgccctgggctaccccgtgcccaagcccgccctgatcagcctgctggagggcggcgacatggcctggggcctggaggcccaggacgaccccggcggcccaagcagcggcgcccctcctcccagcggcggcagcccagccggctccccaacctctaccgaggagggcacctctgagtccgccacccccgagagcggccctggcacctccaccgagcccagcgagggcagcgcacccggcagccctgccggcagccccacctccacagaggagggaaccagcaccgagcccagcgaaggcagcgccccaggcaccagcaccgagcctagtgagcaggagattaaacggatcaacaagatcagaagaagacttgtgaaagacagcaacaccaagaaggccggcaagacaggccccatgaaaaccctgctggttagagtgatgacacccgatctgagagagcggctggaaaacctgagaaagaagcctgaaaatatcccccagcccatcagcaatacatctagagccaacctgaataagctgctgaccgattacaccgaaatgaagaaggcgatcctgcatgtgtactgggaagagttccagaaggaccctgtgggcctgatgagccgggtggcccagcctgccagcaagaagatcgatcagaacaagctgaaacctgagatggacgagaagggcaacctgaccaccgccggctttgcctgctctcagtgtggccagcccctgttcgtgtacaagctggagcaggtgtctgagaagggcaaggcttacaccaactacttcggacggtgcaatgtggccgagcacgaaaagctgatcctgctggcccagctgaagcccgagaaggatagcgacgaagccgtgacatatagcctgggaaagtttgggcagagggccctggatttctacagcattcatgtgaccaaggagtccacccaccccgtgaagcccctggcccagatcgccggaaacagatacgcctccggacctgtgggaaaggccctgagcgacgcatgtatgggcacaatcgcctccttcctgtctaagtaccaggacatcatcatcgaacaccagaaggtggtgaagggcaaccagaagagactggagagcctgcgggagctggccggcaaggaaaacctggaataccctagcgtgaccctgccacctcagcctcacaccaaggagggcgttgatgcctacaacgaagtgatcgcccgggtgcgaatgtgggtgaacctgaacctgtggcagaagctgaagctaagcagagatgatgccaagcctctgctgagactgaagggattcccttcctttcctctggtcgagagacaggccaacgaagtggactggtgggacatggtgtgtaacgtgaagaagctgatcaacgagaaaaaggaggatggcaaggtgttttggcagaatctggctggctacaagagacaggaagccctgagaccatacctgagcagcgaggaagatcggaagaagggaaagaaattcgctcggtaccagctgggcgacctgctgctgcacctggaaaagaagcacggcgaggactggggaaaggtgtacgacgaggcctgggagcggattgacaagaaagtggaaggcctgagcaagcacatcaagctggaagaggaacggagaagcgaggacgcccagagcaaggccgccctgaccgactggctgcgggctaaggccagcttcgtgatcgagggcctgaaggaggccgacaaggacgagttctgcagatgcgagctgaagctgcagaagtggtacggggacctgcggggaaagcccttcgccatcgaagccgagaacagcatcctggacatcagcggcttcagcaagcagtacaactgtgccttcatctggcagaaggacggcgtgaagaagctgaacctgtacctgatcatcaactacttcaagggcggcaagctgcggttcaagaagatcaaacctgaagccttcgaagccaacagattctacaccgtgatcaacaaaaagagcggcgagatcgtgcccatggaggtgaacttcaacttcgacgaccccaacctgatcatcctgcctctggcctttggcaagagacagggcagagaattcatctggaacgacctgctgtccctggaaaccggcagcctgaagctggccaacggaagagtgatcgagaagacactgtacaacagaagaacccggcaggatgagcctgccctgttcgtggccctgaccttcgagcggcgggaggtcctggactcctccaatatcaaaccaatgaacctgatcggcgtggcaagaggcgaaaacatccccgccgtgatcgccctgaccgaccccgagggctgcccactgagccggtttaaggatagcctgggaaacccaacccacatcctgagaatcggcgagagctataaggagaagcagcggaccatccaggccaagaaggaggtggagcagcggagagccggcggctacagccggaagtacgccagcaaagccaagaatctggcagacgatatggtgagaaacaccgctagagatctgctgtactacgccgtgacccaggatgccatgctgatcttcgccaacctgagccggggcttcggccggcagggcaagcggaccttcatggccgagagacagtacacacggatggaggactggctgaccgccaagctggcctacgagggcctgagcaagacctacctgtccaagacactggcccagtacacctccaagacatgcagcaactgtgggtttaccatcaccagcgccgactacgacagggtgctggagaagctgaagaagacagcaacaggctggatgaccacaattaacggcaaggagctgaaggtggagggccagattacctactacaacagatacaagagacagaacgtagtcaaggacctgtccgtcgagctggatagactgagcgaagaatctgtgaacaacgacatctcctcctggacaaagggcagaagcggagaagctctgagcctcctgaagaaaagattctcccatagacccgtgcaggagaagttcgtgtgcctgaactgcggcttcgagacacacgcagccgagcaagccgccctgaacatcgccagatcctggctgttcctgcggagccaggagtacaagaaataccagacaaacaagacaaccggcaacaccgataagagagccttcgtcgagacctggcagtccttttaccggaagaagcttaaggaggtgtggaaacctgccgtgcggtctggcggatctggcggaggctccaccagccccaagaaaaagagaaaagtctaagctgccttctgcggggcttgccttctggccatgcccttcttctctcccttgcacctgtacctcttggtctttgaataaagcctgagtaggaaggctagcaaaaaaaaaaaaaaaaaaaaaaaaaaaaaaaaaaaaaaaaaaaaaaaaaaaaaaaaaaaaaaaaaaaaaaaaaaaaaaaa
